(19) United States
(12) Patent Application Publication
(10) Pub. No.: US 2015/0232836 A1
(43) Pub. Date: Aug. 20, 2015

(54) COMPOSITIONS AND METHODS FOR MODULATING GENE EXPRESSION

(71) Applicants: RaNA Therapeutics, inc., Cambridge, MA (US); The General Hospital Corporation, Boston, MA (US)

(72) Inventors: Arthur M. Krieg, Cambridge, MA (US); Romesh Subramanian, Framingham, MA (US); James McSwiggen, Arlington, MA (US); Jeannie T. Lee, Boston, MA (US)

(73) Assignees: RaNA Therapeutics, inc., Cambridge, MA (US); The General Hospital Corporation, Boston, MA (US)

(21) Appl. No.: 14/401,240

(22) PCT Filed: May 16, 2013
(86) PCT No.: PCT/US2013/041434

§ 371 Date: Nov. 14, 2014

Related U.S. Application Data
(60) Provisional application No. 61/786,095, filed on Mar. 14, 2013.
(60) Provisional application No. 61/647,915, filed on May 16, 2012.
(60) Provisional application No. 61/647,938, filed on May 16, 2012.
(60) Provisional application No. 61/648,030, filed on May 16, 2012.
(60) Provisional application No. 61/648,045, filed on May 16, 2012.
(60) Provisional application No. 61/648,052, filed on May 16, 2012.
(60) Provisional application No. 61/648,069, filed on May 16, 2012.

(51) Int. Cl. C12N 15/113

(52) U.S. Cl. CPC C12N 15/113; C12N 2310/11; C12N 2310/315; C12N 2310/3231; C12N 2310/343; C12N 2310/321

(57) ABSTRACT

Aspects of the invention provide single stranded oligonucleotides for activating or enhancing expression of a target gene. Further aspects provide compositions and kits comprising single stranded oligonucleotides for activating or enhancing expression of a target gene. Methods for modulating expression of a target gene using the single stranded oligonucleotides are also provided. Further aspects of the invention provide methods for selecting a candidate oligonucleotide for activating or enhancing expression of a target gene.

### CROSS-REFERENCE TO RELATED APPLICATIONS

[0001] This application claims the benefit under 35 U.S.C. §119(e) of U.S. Provisional Application No. 61/647,915, entitled “COMPOSITIONS AND METHODS FOR MODULATING CFTR EXPRESSION”, filed May 16, 2012; U.S. Provisional Application No. 61/647,938, entitled “COMPOSITIONS AND METHODS FOR MODULATING PAH EXPRESSION”, filed May 16, 2012; U.S. Provisional Application No. 61/648,030, entitled “COMPOSITIONS AND METHODS FOR MODULATING CEP290 EXPRESSION”, filed May 16, 2012; U.S. Provisional Application No. 61/648,045, entitled “COMPOSITIONS AND METHODS FOR MODULATING ADIPOQ EXPRESSION”, filed May 16, 2012; U.S. Provisional Application No. 61/648,052, entitled “COMPOSITIONS AND METHODS FOR MODULATING CD274 EXPRESSION”, filed May 16, 2012; U.S. Provisional Application No. 61/648,069, entitled “COMPOSITIONS AND METHODS FOR MODULATING GENE EXPRESSION”, filed May 16, 2012; U.S. Provisional Application No. 61/786,095, entitled “COMPOSITIONS AND METHODS FOR MODULATING GENE EXPRESSION”, filed Mar. 14, 2013, the contents of each of which are incorporated herein by reference in their entireties.

### FIELD OF THE INVENTION

[0002] The invention relates to oligonucleotide based compositions, as well as methods of using oligonucleotide based compositions for treating disease.

### BACKGROUND OF THE INVENTION

[0003] Transcriptome analyses have suggested that, although only 1-2% of the mammalian genome is protein coding, 70-90% is transcriptionally active. Recent discoveries argue that a subset of these non-protein coding transcripts play crucial roles in epigenetic regulation. In spite of their ubiquity, the structure and function of many of such transcripts remains uncharacterized. Recent studies indicate that some long non-coding RNAs function as an epigenetic regulator/RNA cofactor in chromatin remodeling through interactions with Polycomb repressor complex 2 (PRC2) and thus function to regulate gene expression.

### SUMMARY OF THE INVENTION

[0004] Aspects of the invention disclosed herein provide methods and compositions that are useful for upregulating expression of a target gene in cells. In some embodiments, single stranded oligonucleotides are provided that target a PRC2-associated region of a target gene encoding a protein of interest. In some embodiments, single stranded oligonucleotides are provided that target a PRC2-associated region of a target gene (e.g., a human gene) and thereby cause upregulation of the gene. In some embodiments, the target gene is a gene listed in Table 4. In some embodiments, these single stranded oligonucleotides activate or enhance expression of a target gene by relieving or preventing PRC2 mediated repression of the target gene. In some embodiments, the target gene is listed in Table 4. In some embodiments, these single stranded oligonucleotides activate or enhance expression of a target gene to treat a disease associated with reduced expression of the target gene. In some embodiments, the disease associated with reduced expression of the target gene is listed is Table 4. In some embodiments, a phenotype associated with the disease is referred to in Table 4 by an OMIM identification number.

[0005] Further aspects of the invention provide methods for selecting oligonucleotides for activating or enhancing expression of a target. In some embodiments, the target gene may be a target gene listed in Table 4, such as BCL2L11, BRCA1, F8, FLI1, FMR1, FNDC5, GCK, GLP1R, GRN, HAMP, HPRT1, IDO1, IGF1, IL10, LDLR, NANOG, PTGS2, RB1, SERPINF1, SIRT1, SIRT6, SMAD7, ST7, CFTR, PAH, CEP290, CD274, ADIPOQ or STAT3. In some embodiments, methods are provided for selecting a set of oligonucleotides that is enriched in candidates (e.g., compared with a random selection of oligonucleotides) for activating or enhancing expression of a target. Accordingly, the methods may be used to establish sets of clinical candidates that are enriched in oligonucleotides that activate or enhance expression of a target. Such libraries may be utilized, for example, to identify lead oligonucleotides for developing therapeutics to treat a disease associated with reduced expression of the target gene. In some embodiments, the disease associated with reduced expression of the target gene is listed is Table 4 or otherwise disclosed herein. Furthermore, in some embodiments, oligonucleotide chemistries are provided that are useful for controlling the pharmacokinetics, biodistribution, bioavailability and/or efficacy of the single stranded oligonucleotides for activating expression of a target gene.

[0006] According to some aspects of the invention single stranded oligonucleotides are provided that have a region of complementarity that is complementary with (e.g., at least 8 consecutive nucleotides of) a PRC2-associated region of the nucleotide sequence set forth as any one of SEQ ID NOS: 1 to 96.

[0007] According to some aspects of the invention single stranded oligonucleotides are provided that have a region of complementarity that is complementary with (e.g., at least 8 consecutive nucleotides of) a PRC2-associated region of a target gene listed in Table 4, e.g., a PRC2-associated region of the nucleotide sequence set forth as SEQ ID NO: 1, 2, 5, 6, 9, 10, 13, 14, 17, 18, 21, 22, 25, 26, 29, 30, 33, 34, 37, 38, 43, 44, 45, 46, 49, 50, 53, 54, 57, 58, 61, 62, 65, 66, 69, 70, 73, 74, 77, 78, 81, 82, 85, 86, 89, 90, 93, 94, 815175, 815176, 868590, 868591, 899865, 899866, 962801, 962802, 981187, or 981188. In some embodiments, the oligonucleotide has at least one of the following features: a) a sequence that is 5′X-Y-Z, in which X is any nucleotide and in which X is at the 5′ end of the oligonucleotide, Y is a nucleotide sequence of 6 nucleotides in length that is not a human seed sequence of a microRNA, and Z is a nucleotide sequence of 1 to 23 nucleotides in length; b) a sequence that does not comprise three or more consecutive guanosine nucleotides; c) a sequence that has less than a threshold level of sequence identity with every sequence of nucleotides, of equivalent length to the second nucleotide sequence, that are between 50 kilobases upstream of a 5′-end of an off-target gene and 50 kilobases downstream of a 3′-end of the off-target gene; d) a sequence that is complementary to a PRC2-associated region that encodes an RNA that forms a secondary structure comprising at least two single stranded loops; and e) a sequence that has greater than 60% G-C content. In some embodiments, the single stranded oligonucleotide has at least two of features a), b), c), d), and e), each independently selected. In some embodiments, the single stranded oligonucleotide has at least three of features a), b), c), d), and e), each independently selected. In some embodiments, the single stranded oligonucleotide has at least four of features a), b), c), d), and e), each independently selected. In some embodiments, the single stranded oligonucleotide has each of features a), b), c), d), and e). In certain embodiments, the oligonucleotide has the sequence 5′X-Y-Z, in which the oligonucleotide is 8-50 nucleotides in length.

[0008] According to some aspects of the invention, single stranded oligonucleotides are provided that have a sequence X-Y-Z, in which X is any nucleotide, Y is a nucleotide sequence of 6 nucleotides in length that is not a seed sequence of a human microRNA, and Z is a nucleotide sequence of 1 to 23 nucleotides in length, in which the single stranded oligonucleotide is complementary with a PRC2-associated region of a target gene listed in Table 4, e.g., a PRC2-associated region of the nucleotide sequence set forth as SEQ ID NO: 1, 2, 5, 6, 9, 10, 13, 14, 17, 18, 21, 22, 25, 26, 29, 30, 33, 34, 37, 38, 43, 44, 45, 46, 49, 50, 53, 54, 57, 58, 61, 62, 65, 66, 69, 70, 73, 74, 77, 78, 81, 82, 85, 86, 89, 90, 93, 94, 815175, 815176, 868590, 868591, 899865, 899866, 962801, 962802, 981187, or 981188. In some aspects of the invention, single stranded oligonucleotides are provided that have a sequence 5′-X-Y-Z, in which X is any nucleotide, Y is a nucleotide sequence of 6 nucleotides in length that is not a seed sequence of a human microRNA, and Z is a nucleotide sequence of 1 to 23 nucleotides in length, in which the single stranded oligonucleotide is complementary with at least 8 consecutive nucleotides of a PRC2-associated region of a target gene listed in Table 4, e.g., a PRC2-associated region of the nucleotide sequence set forth as SEQ ID NO: 1, 2, 5, 6, 9, 10, 13, 14, 17, 18, 21, 22, 25, 26, 29, 30, 33, 34, 37, 38, 43, 44, 45, 46, 49, 50, 53, 54, 57, 58, 61, 62, 65, 66, 69, 70, 73, 74, 77, 78, 81, 82, 85, 86, 89, 90, 93, 94, 815175, 815176, 868590, 868591, 899865, 899866, 962801, 962802, 981187, or 981188. In some embodiments, Y is a sequence selected from Table 1. In some embodiments, the PRC2-associated region is a sequence listed in any one of SEQ ID NOS: 97 to 1210, 815179 to 815208, 868594 to 868617, 899869 to 899932, 962805 to 962816 or 981191 to 981196.

[0009] In some embodiments, the single stranded oligonucleotide comprises a nucleotide sequence as set forth in any one of SEQ ID NOS: 1211 to 815174, 815209 to 868589, 868618 to 899864, 899933 to 962800, 962817 to 980845, 981197 to 989598, 989617 to 989649, or 989650 to 1412676, or a fragment thereof that is at least 8 nucleotides. In some embodiments, the single stranded oligonucleotide comprises a nucleotide sequence as set forth in any one of SEQ ID NOS: 1211 to to 815174, 815209 to 868589, 868618 to 899864, 899933 to 962800, 962817 to 980845, 981197 to 989598, 989617 to 989649, or 989650 to 1412676, in which the 5′ end of the nucleotide sequence provided is the 5′ end of the oligonucleotide. In some embodiments, the region of complementarity (e.g., the at least 8 consecutive nucleotides) is also present within the nucleotide sequence set forth as SEQ ID NO: 3, 4, 7, 8, 11, 12, 15, 16, 19, 20, 23, 24, 27, 28, 31, 32, 35, 36, 39, 40, 41, 42, 47, 48, 51, 52, 55, 56, 59, 60, 63, 64, 67, 68, 71, 72, 75, 76, 79, 80, 83, 84, 87, 88, 91, 92, 95, 96, 815177, 815178, 868592, 868593, 899867, 899868, 962803, 962804, 981189, or 981190.

[0010] In some embodiments, the single stranded oligonucleotide comprises a nucleotide sequence as set forth in any one of SEQ ID NOS: 1211 to 815174, 815209 to 868589, 868618 to 899864, 899933 to 962800, 962817 to 980845, 981197 to 989598, 989617 to 989649, or 989650 to 1412676. In some embodiments, the single stranded oligonucleotide comprises a fragment of at least 8 nucleotides of a nucleotide sequence as set forth in any one of SEQ ID NOS: 1211 to 815174, 815209 to 868589, 868618 to 899864, 899933 to 962800, 962817 to 980845, 981197 to 989598, 989617 to 989649, or 989650 to 1412676.

[0011] In some embodiments, the PRC2-associated region is a sequence listed in any one of SEQ ID NOS: 97 to 1210, 815179 to 815208, 868594 to 868617, 899869 to 899932, 962805 to 962816 or 981191 to 981196. In some embodiments, the single stranded oligonucleotide comprises a nucleotide sequence as set forth in any one of SEQ ID NOS: 1211 to 497442, 815209 to 842011, 868618 to 887872, 899933 to 949635, 962817 to 976788, 981197 to 987384, 989617 to 989640, 989650 to 989675, or 989676 to 1412676 or a fragment thereof that is at least 8 nucleotides. In some embodiments, the single stranded oligonucleotide comprises a nucleotide sequence as set forth in any one of SEQ ID NOS: 1211 to 497442, 815209 to 842011, 868618 to 887872, 899933 to 949635, 962817 to 976788, 981197 to 987384, 989617 to 989640, 989650 to 989675, or 989676 to 1412676, wherein the 5′ end of the nucleotide sequence provided in any one of SEQ ID NOS: 1211 to 497442, 815209 to 842011, 868618 to 887872, 899933 to 949635, 962817 to 976788, 981197 to 987384, 989617 to 989640, 989650 to 989675, or 989676 to 1412676 is the 5′ end of the oligonucleotide. In some embodiments, the at least 8 consecutive nucleotides are also present within the nucleotide sequence set forth as SEQ ID NO: 3, 7, 11, 15, 19, 23, 27, 31, 35, 39, 41, 47, 51, 55, 59, 63, 67, 71, 75, 79, 83, 87, 91, 95, 815177, 868592, 899867, 962803, or 981189.

[0012] In some embodiments, the single stranded oligonucleotide comprises a nucleotide sequence as set forth in any one of SEQ ID NOS: 497443 to 815174, 842012 to 868589, 887873 to 899864, 949636 to 962800, 976789 to 980845, 987385 to 989598, or 989641 to 989649, 1412677-1914950 or a fragment thereof that is at least 8 nucleotides. In some embodiments, the single stranded oligonucleotide comprises a nucleotide sequence as set forth in any one of SEQ ID NOS: 497443 to 815174, 842012 to 868589, 887873 to 899864, 949636 to 962800, 976789 to 980845, 987385 to 989598, or 989641 to 989649, 1412677-1914950, wherein the 5′ end of the nucleotide sequence provided in any one of SEQ ID NOS: 497443 to 815174, 842012 to 868589, 887873 to 899864, 949636 to 962800, 976789 to 980845, 987385 to 989598, or 989641 to 989649, 1412677-1914950 is the 5′ end of the oligonucleotide. In some embodiments, the at least 8 consecutive nucleotides are present within the nucleotide sequence set forth as SEQ ID NO: 4, 8, 12, 16, 20, 24, 28, 32, 36, 40, 42, 48, 52, 56, 60, 64, 68, 72, 76, 80, 84, 88, 92, 96, 815178, 868593, 899868, 962804, or 981190.

[0013] In some embodiments, a single stranded oligonucleotide comprises a nucleotide sequence as set forth in any one of SEQ ID NOS: 1211 to 815174, 815209 to 868589, 868618 to 899864, 899933 to 962800, 962817 to 980845, 981197 to 989598, 989617 to 989649, or 989650 to 1412676. In some embodiments, the oligonucleotide is up to 50 nucleotides in length. In some embodiments, a single stranded oligonucleotide comprises a fragment of at least 8 nucleotides of a nucleotide sequence as set forth in any one of SEQ ID NOS: 1211 to 815174, 815209 to 868589, 868618 to 899864, 899933 to 962800, 962817 to 980845, 981197 to 989598, 989617 to 989649, or 989650 to 1412676.

[0014] In some embodiments, a single stranded oligonucleotide comprises a nucleotide sequence as set forth in Table 2 or Table 6. In some embodiments, the oligonucleotide is up to 50 nucleotides in length. In some embodiments, a single stranded oligonucleotide consists of a nucleotide sequence as set forth in Table 2 or Table 6.

[0015] In some embodiments, the single stranded oligonucleotide does not comprise three or more consecutive guanosine nucleotides. In some embodiments, the single stranded oligonucleotide does not comprise four or more consecutive guanosine nucleotides.

[0016] In some embodiments, the single stranded oligonucleotide is 8 to 30 nucleotides in length. In some embodiments, the single stranded oligonucleotide is up to 50 nucleotides in length. In some embodiments, the single stranded oligonucleotide is 8 to 10 nucleotides in length and all but 1, 2, or 3 of the nucleotides of the complementary sequence of the PRC2-associated region are cytosine or guanosine nucleotides.

[0017] In some embodiments, the single stranded oligonucleotide is complementary with at least 8 consecutive nucleotides of a PRC2-associated region of a target gene listed in Table 4, e.g., a PRC2-associated region of a nucleotide sequence set forth as SEQ ID NO: 1, 2, 5, 6, 9, 10, 13, 14, 17, 18, 21, 22, 25, 26, 29, 30, 33, 34, 37, 38, 43, 44, 45, 46, 49, 50, 53, 54, 57, 58, 61, 62, 65, 66, 69, 70, 73, 74, 77, 78, 81, 82, 85, 86, 89, 90, 93, 94, 815175, 815176, 868590, 868591, 899865, 899866, 962801, 962802, 981187, or 981188, in which the nucleotide sequence of the single stranded oligonucleotide comprises one or more of a nucleotide sequence selected from the group consisting of

[0018] (a) (X)Xxxxxx, (X)xXxxxx, (X)xxXxxx, (X)xxxXxx, (X)xxxxXx and (X)xxxxxX,

[0019] (b) (X)XXxxxx, (X)XxXxxx, (X)XxxXxx, (X)XxxxXx, (X)XxxxxX, (X)xXXxxx, (X)xXxXxx, (X)xXxxXx, (X)xXxxxX, (X)xxXXxx, (X)xxXxXx, (X)xxXxxX, (X)xxxXXx, (X)xxxXxX and (X)xxxxXX,

[0020] (c) (X)XXXxxx, (X)xXXXxx, (X)xxXXXx, (X)xxxXXX, (X)XXxXxx, (X)XXxxXx, (X)XXxxxX, (X)xXXxXx, (X)xXXxxX, (X)xxXXxX, (X)XxXXxx, (X)XxxXXx (X)XxxxXX, (X)xXxXXx, (X)xXxxXX, (X)xxXxXX, (X)xXxXxX and (X)XxXxXx,

[0021] (d) (X)xxXXX, (X)xXxXXX, (X)xXXxXX, (X)xXXXxX, (X)xXXXXx, (X)XxxXXXX, (X)XxXxXX, (X)XxXXxX, (X)XxXXx, (X)XXxxXX, (X)XXxXxX, (X)XXxXXx, (X)XXXxxX, (X)XXXxXx, and (X)XXXXxx,

[0022] (e) (X)xXXXXX, (X)XxXXXX, (X)XXxXXX, (X)XXXxXX, (X)XXXXxX and (X)XXXXXx, and

[0023] (f) XXXXXX, XxXXXXX, XXxXXXX, XXXxXXX, XXXXxXX, XXXXXxX and XXXXXXx, wherein “X” denotes a nucleotide analogue, (X) denotes an optional nucleotide analogue, and “x” denotes a DNA or RNA nucleotide unit.

[0024] In some embodiments, at least one nucleotide of the oligonucleotide is a nucleotide analogue. In some embodiments, the at least one nucleotide analogue results in an increase in Tm of the oligonucleotide in a range of 1 to 5° C. compared with an oligonucleotide that does not have the at least one nucleotide analogue.

[0025] In some embodiments, at least one nucleotide of the oligonucleotide comprises a 2′ O-methyl. In some embodiments, each nucleotide of the oligonucleotide comprises a 2′ O-methyl. In some embodiments, the oligonucleotide comprises at least one ribonucleotide, at least one deoxyribonucleotide, or at least one bridged nucleotide. In some embodiments, the bridged nucleotide is a LNA nucleotide, a cEt nucleotide or a ENA modified nucleotide. In some embodiments, each nucleotide of the oligonucleotide is a LNA nucleotide.

[0026] In some embodiments, the nucleotides of the oligonucleotide comprise alternating deoxyribonucleotides and 2′-fluoro-deoxyribonucleotides. In some embodiments, the nucleotides of the oligonucleotide comprise alternating deoxyribonucleotides and 2′-O-methyl nucleotides. In some embodiments, the nucleotides of the oligonucleotide comprise alternating deoxyribonucleotides and ENA nucleotide analogues. In some embodiments, the nucleotides of the oligonucleotide comprise alternating deoxyribonucleotides and LNA nucleotides. In some embodiments, the 5′ nucleotide of the oligonucleotide is a deoxyribonucleotide. In some embodiments, the nucleotides of the oligonucleotide comprise alternating LNA nucleotides and 2′-O-methyl nucleotides. In some embodiments, the 5′ nucleotide of the oligonucleotide is a LNA nucleotide. In some embodiments, the nucleotides of the oligonucleotide comprise deoxyribonucleotides flanked by at least one LNA nucleotide on each of the 5′ and 3′ ends of the deoxyribonucleotides.

[0027] In some embodiments, the single stranded oligonucleotide comprises modified internucleotide linkages (e.g., phosphorothioate internucleotide linkages or other linkages) between at least two, at least three, at least four, at least five or more nucleotides. In some embodiments, the single stranded oligonucleotide comprises modified internucleotide linkages (e.g., phosphorothioate internucleotide linkages or other linkages) between between all nucleotides.

[0028] In some embodiments, the nucleotide at the 3′ position of the oligonucleotide has a 3′ hydroxyl group. In some embodiments, the nucleotide at the 3′ position of the oligonucleotide has a 3′ thiophosphate. In some embodiments, the single stranded oligonucleotide has a biotin moiety or other moiety conjugated to its 5′ or 3′ nucleotide. In some embodiments, the single stranded oligonucleotide has cholesterol, Vitamin A, folate, sigma receptor ligands, aptamers, peptides, such as CPP, hydrophobic molecules, such as lipids, ASGPR or dynamic polyconjugates and variants thereof at its 5′ or 3′ end.

[0029] According to some aspects of the invention compositions are provided that comprise any of the oligonucleotides disclosed herein, and a carrier. In some embodiments, compositions are provided that comprise any of the oligonucleotides in a buffered solution. In some embodiments, the oligonucleotide is conjugated to the carrier. In some embodiments, the carrier is a peptide. In some embodiments, the carrier is a steroid. According to some aspects of the invention pharmaceutical compositions are provided that comprise any of the oligonucleotides disclosed herein, and a pharmaceutically acceptable carrier.

[0030] According to other aspects of the invention, kits are provided that comprise a container housing any of the compositions disclosed herein.

[0031] According to some aspects of the invention, methods of increasing expression of a target gene in a cell are provided. In some embodiments, the methods-involve delivering any one or more of the single stranded oligonucleotides disclosed herein into the cell. In some embodiments, delivery of the single stranded oligonucleotide into the cell results in a level of expression of a target gene that is greater (e.g., at least 50% greater) than a level of expression of the target gene in a control cell that does not comprise the single stranded oligonucleotide.

[0032] According to some aspects of the invention, methods of increasing levels of a target gene in a subject are provided. According to some aspects of the invention, methods of treating a condition (e.g., a disease listed in Table 4 or otherwise disclosed herein) associated with decreased levels of the target gene in a subject are provided. In some embodiments, the methods involve administering any one or more of the single stranded oligonucleotides disclosed herein to the subject. In some embodiments, the target gene is BCL2L11, BRCA1, F8, FLI1, FMR1, FNDC5, GCK, GLP1R, GRN, HAMP, HPRT1, IDO1, IGF1, IL10, LDLR, NANOG, PTGS2, RB1, SERPINF1, SIRT1, SIRT6, SMAD7, ST7, CFTR, PAH, CEP290, CD274, ADIPOQ or STAT3.

### BRIEF DESCRIPTION OF TABLES

[0033] Table 1: Hexamers that are not seed sequences of human miRNAs

[0034] Table 2: Oligonucleotide sequences made for testing in the lab. RQ (column 2) and RQ SE (column 3) shows the activity of the oligo relative to a control well (usually carrier alone) and the standard error or the triplicate replicates of the experiment. [oligo] is shown in nanomolar for in vitro experiments and in milligrams per kilogram of body weight for in vivo experiments. The Formatted Sequence column shows the sequence of the modified nucleotides, where lnaX represents an LNA nucleotide with 3′ phosphorothioate linkage, omeX is a 2′-O-methyl nucleotide, dX is a deoxy nucleotide. An s at the end of a nucleotide code indicates that the nucleotide had a 3′ phosphorothioate linkage. The “-Sup” at the end of the sequence marks the fact that the 3′ end lacks either a phosphate or thiophosphate on the 3′ linkage.

[0035] Table 3: A listing of oligonucleotide modifications

[0036] Table 4: Target Genes and Related Diseases

[0037] Table 5: Oligonucleotides made for testing in the lab. RQ (column 4) and RQ SE (column 5) shows the activity of the oligo relative to a control well (usually carrier alone) and the standard error for the triplicate replicates of the experiment. [oligo] is shown in nanomolar for in vitro experiments and in milligrams per kilogram of body weight for in vivo experiments. The sequence of each oligonucleotide including any modified nucleotides in is shown in Table 6.

[0038] Table 6: Formatted oligonucleotide sequences made for testing in the lab showing nucleotide modifications. The Formatted Sequence column shows the sequence of the modified nucleotides, where lnaX represents an LNA nucleotide with 3′ phosphorothioate linkage, omeX is a 2′-O-methyl nucleotide, dX is a deoxy nucleotide. An s at the end of a nucleotide code indicates that the nucleotide had a 3′ phosphorothioate linkage. The “-Sup” at the end of the sequence marks the fact that the 3′ end lacks either a phosphate or thiophosphate on the 3′ linkage. The Formatted Sequence column shows the sequence of the oligonucleotide, including modified nucleotides, for the oligonucleotides tested in Table 5.

[0039] Table 7: Cell lines

### DETAILED DESCRIPTION OF CERTAIN EMBODIMENTS OF THE INVENTION

[0040] Aspects of the invention provided herein relate to the discovery of polycomb repressive complex 2 (PRC2)-interacting RNAs. Polycomb repressive complex 2 (PRC2) is a histone methyltransferase and a known epigenetic regulator involved in silencing of genomic regions through methylation of histone H3. Among other functions, PRC2 interacts with long noncoding RNAs (lncRNAs), such as RepA, Xist, and Tsix, to catalyze trimethylation of histone H3-lysine27. PRC2 contains four subunits, Eed, Suz12, RbAp48, and Ezh2. Aspects of the invention relate to the recognition that single stranded oligonucleotides that bind to PRC2-associated regions of RNAs (e.g., lncRNAs) that are expressed from within a genomic region that encompasses or that is in functional proximity to the target gene can induce or enhance expression of the target gene. In some embodiments, this upregulation is believed to result from inhibition of PRC2 mediated repression of the target gene.

[0041] As used herein, the term “PRC2-associated region” refers to a region of a nucleic acid that comprises or encodes a sequence of nucleotides that interact directly or indirectly with a component of PRC2. A PRC2-associated region may be present in a RNA (e.g., a long non-coding RNA (lncRNA)) that that interacts with a PRC2. A PRC2-associated region may be present in a DNA that encodes an RNA that interacts with PRC2. In some cases, the PRC2-associated region is equivalently referred to as a PRC2-interacting region.

[0042] In some embodiments, a PRC2-associated region is a region of an RNA that crosslinks to a component of PRC2 in response to in situ ultraviolet irradiation of a cell that expresses the RNA, or a region of genomic DNA that encodes that RNA region. In some embodiments, a PRC2-associated region is a region of an RNA that immunoprecipitates with an antibody that targets a component of PRC2, or a region of genomic DNA that encodes that RNA region. In some embodiments, a PRC2-associated region is a region of an RNA that immunoprecipitates with an antibody that binds specifically to SUZ12, EED, EZH2 or RBBP4 (which as noted above are components of PRC2), or a region of genomic DNA that encodes that RNA region.

[0043] In some embodiments, a PRC2-associated region is a region of an RNA that is protected from nucleases (e.g., RNases) in an RNA-immunoprecipitation assay that employs an antibody that targets a component of PRC2, or a region of genomic DNA that encodes that protected RNA region. In some embodiments, a PRC2-associated region is a region of an RNA that is protected from nucleases (e.g., RNases) in an RNA-immunoprecipitation assay that employs an antibody that targets SUZ12, EED, EZH2 or RBBP4, or a region of genomic DNA that encodes that protected RNA region.

[0044] In some embodiments, a PRC2-associated region is a region of an RNA within which occur a relatively high frequency of sequence reads in a sequencing reaction of products of an RNA-immunoprecipitation assay that employs an antibody that targets a component of PRC2, or a region of genomic DNA that encodes that RNA region. In some embodiments, a PRC2-associated region is a region of an RNA within which occur a relatively high frequency of sequence reads in a sequencing reaction of products of an RNA-immunoprecipitation assay that employs an antibody that binds specifically to SUZ12, EED, EZH2 or RBBP4, or a region of genomic DNA that encodes that protected RNA region. In such embodiments, the PRC2-associated region may be referred to as a “peak.”

[0045] In some embodiments, a PRC2-associated region comprises a sequence of 40 to 60 nucleotides that interact with PRC2 complex. In some embodiments, a PRC2-associated region comprises a sequence of 40 to 60 nucleotides that encode an RNA that interacts with PRC2. In some embodiments, a PRC2-associated region comprises a sequence of up to 5 kb in length that comprises a sequence (e.g., of 40 to 60 nucleotides) that interacts with PRC2. In some embodiments, a PRC2-associated region comprises a sequence of up to 5 kb in length within which an RNA is encoded that has a sequence (e.g., of 40 to 60 nucleotides) that is known to interact with PRC2. In some embodiments, a PRC2-associated region comprises a sequence of about 4 kb in length that comprise a sequence (e.g., of 40 to 60 nucleotides) that interacts with PRC2. In some embodiments, a PRC2-associated region comprises a sequence of about 4 kb in length within which an RNA is encoded that includes a sequence (e.g., of 40 to 60 nucleotides) that is known to interact with PRC2. In some embodiments, a PRC2-associated region has a sequence as set forth in any one of SEQ ID NOS: 97 to 1210, 815179 to 815208, 868594 to 868617, 899869 to 899932, or 962805 to 962816, or 981191 to 981196.

[0046] In some embodiments, single stranded oligonucleotides are provided that specifically bind to, or are complementary to, a PRC2-associated region in a genomic region that encompasses or that is in proximity to the target gene. In some embodiments, single stranded oligonucleotides are provided that specifically bind to, or are complementary to, a PRC2-associated region that has a sequence as set forth in any one of SEQ ID NOS: 97 to 1210, 815179 to 815208, 868594 to 868617, 899869 to 899932, or 962805 to 962816, or 981191 to 981196. In some embodiments, single stranded oligonucleotides are provided that specifically bind to, or are complementary to, a PRC2-associated region that has a sequence as set forth in any one of SEQ ID NOS: 97 to 1210, 815179 to 815208, 868594 to 868617, 899869 to 899932, 962805 to 962816, or 981191 to 981196 combined with up to 2 kb, up to 5 kb, or up to 10 kb of flanking sequences from a corresponding genomic region to which these SEQ IDs map (e.g., in a human genome). In some embodiments, single stranded oligonucleotides have a sequence as set forth in any one of SEQ ID NOS: 1211 to 815174, 815209 to 868589, 868618 to 899864, 899933 to 962800, 962817 to 980845, 981197 to 989598, 989617 to 989649, or 989650 to 1412676. In some embodiments, single stranded oligonucleotides have a sequence as set forth in Table 2 or Table 6.

[0047] Without being bound by a theory of invention, these oligonucleotides are able to interfere with the binding of and function of PRC2, by preventing recruitment of PRC2 to a specific chromosomal locus. For example, a single administration of single stranded oligonucleotides designed to specifically bind a PRC2-associated region lncRNA can stably displace not only the lncRNA, but also the PRC2 that binds to the lncRNA, from binding chromatin. After displacement, the full complement of PRC2 is not recovered for up to 24 hours. Further, lncRNA can recruit PRC2 in a cis fashion, repressing gene expression at or near the specific chromosomal locus from which the lncRNA was transcribed.

[0048] Methods of modulating gene expression are provided, in some embodiments, that may be carried out in vitro, ex vivo, or in vivo. It is understood that any reference to uses of compounds throughout the description contemplates use of the compound in preparation of a pharmaceutical composition or medicament for use in the treatment of condition (e.g., a disease listed in Table 4 or otherwise disclosed herein) associated with decreased levels or activity of the target gene. Thus, as one nonlimiting example, this aspect of the invention includes use of such single stranded oligonucleotides in the preparation of a medicament for use in the treatment of disease, wherein the treatment involves upregulating expression of a target gene.

[0049] In further aspects of the invention, methods are provided for selecting a candidate oligonucleotide for activating expression of a target gene. The methods generally involve selecting as a candidate oligonucleotide, a single stranded oligonucleotide comprising a nucleotide sequence that is complementary to a PRC2-associated region (e.g., a nucleotide sequence as set forth in any one of SEQ ID NOS: 97 to 1210, 815179 to 815208, 868594 to 868617, 899869 to 899932, 962805 to 962816, or 981191 to 981196). In some embodiments, sets of oligonucleotides may be selected that are enriched (e.g., compared with a random selection of oligonucleotides) in oligonucleotides that activate expression of a target gene.

TABLE 4
Target Genes and Related Diseases

| | | | Related *OMIM |
|---|---|---|---|
| Gene | | | Phenotype |
| Symbol | Protein name | Related Diseases | numbers |
| BCL2L11 | BCL2-like 11 (apoptosis | Cancer, e.g. human T- | |
| | facilitator) | cell acute | |
| | | lymphoblastic | |
| | | leukemia and | |
| | | lymphoma | |
| BRCA1 | breast cancer 1, early | Cancer, e.g. breast | 604370, 614320 |
| | onset | cancer, pancreatic | |
| | | cancer | |
| F8 | coagulation factor VIII, | Hemophilia | 306700 |
| | procoagulant component | | |
| FLI1 | Friend leukemia virus | cancer, e.g. Ewing's | |
| | integration 1 | sarcoma, and | |
| | | myelodysplasia | |
| FMR1 | fragile X mental | Fragile X syndrome | 300624, 300623, |
| | retardation 1 | and premature | 311360 |
| | | ovarian failure | |
| FNDC5 | fibronectin type III | Obesity, Type 2 | |
| | domain containing 5 | Diabetes | |
| GCK | glucokinase (hexokinase | Obesity, Type 2 | 125851, 125853, |
| | 4) | Diabetes, and | 606176, 602485, |
| | | Hyperinsulinemic | 125851 |
| | | hypoglycemia | |
| GLP1R | glucagon-like peptide 1 | Type 2 Diabetes | |
| | receptor | | |
| GRN | granulin | autoimmune, | 607485 |
| | | inflammatory, | |
| | | dementia/CNS | |
| | | disease, cancer, e.g. | |
| | | hepatic cancer | |
| HAMP | hepcidin antimicrobial | hemochromatosis, | 613313 |
| | peptide | thalassemia | |
| HPRT1 | hypoxanthine | Lesch-Nyhan disease | 300322, 300323 |
| | phosphoribosyltransferase 1 | and HPRT-related | |
| | | gout | |
| IDO1 | indoleamine 2,3- | autoimmune and | |
| | dioxygenase 1 | inflammatory diseases | |
| IGF1 | insulin-like growth factor 1 | CNS diseases, | 608747 |
| | (somatomedin C) | metabolic disease, | |
| | | delayed growth, | |
| | | cancer | |
| IL10 | interleukin 10 | Autoimmune and | 614395, 180300 |
| | | inflammatory | |
| | | diseases, e.g. graft vs. | |
| | | host disease and | |
| | | rheumatoid arthritis | |
| LDLR | low density lipoprotein | dyslipidemias, | 143890 |
| | receptor | atherosclerosis , and | |
| | | hypercholesterolemia | |
| NANOG | Nanog homeobox | tissue regeneration | |
| PTGS2 | prostaglandin- | inflammation, cancer, | |
| | endoperoxide synthase 2 | infectious disease | |
| | (prostaglandin G/H | | |
| | synthase and | | |
| | cyclooxygenase) | | |
| RB1 | retinoblastoma 1 | cancer, e.g. bladder | 109800, 259500, |
| | | cancer, osteosarcoma, | 180200, 182280 |
| | | retinoblastoma, small | |
| | | cell lung cancer | |
| SERPINF1 | serpin peptidase inhibitor, | cancer, choroidal | 613982 |
| | Glade F (alpha-2 | neovascularization, | |
| | antiplasmin, pigment | cardiovascular | |
| | epithelium derived | disease, diabetes, and | |
| | factor), member 1 | osteogenesis | |
| | | imperfecta | |
| SIRT1 | sirtuin 1 | Metabolic disease, | |
| | | aging | |
| SIRT6 | sirtuin 6 | antioxidative | |
| | | pathway, anti-NFkB | |
| SMAD7 | SMAD family member 7 | Acute kidney injury | 612229 |
| | | (anti-TGFb), | |
| | | colorectal cancer | |
| ST7 | suppression of | cancer, e.g. myeloid | |
| | tumorigenicity 7 | cancer, head and neck | |
| | | squamous cell | |
| | | carcinomas, breast | |
| | | cancer, colon | |
| | | carcinoma, and | |
| | | prostate cancer | |
| STAT3 | signal transducer and | tissue regeneration | 147060 |
| | activator of transcription 3 | and Hyper-IgE | |
| | (acute-phase response | recurrent infection | |
| | factor) | syndrome | |
| CFTR | Cystic fibrosis | Cystic fibrosis (CF) | 602421 |
| | transmembrane | and congenital | |
| | conductance regulator | bilateral absence of | |
| | | vas deferens | |
| | | (CBAVD) | |
| PAH | Phenylalanine | Phenylketonuria | 612349 |
| | hydroxylase | (PKU) | |
| CEP290 | Centrosomal protein of | Leber's congenital | 610142 |
| | 290 kDa | amaurosis (LCA), | |
| | | Bardet-Biedl | |
| | | syndrome (BBS), | |
| | | Joubert syndrome, | |
| | | Meckel syndrome, | |
| | | Sior-Loken syndrome | |
| CD274 | cluster of differentiation | Autoimmune disease, | 605402 |
| (also | 274 (also known as | transplant rejection, | |
| known as | Programmed cell death 1 | allergies or asthma | |
| PD-L1) | ligand 1) | | |
| ADIPOQ | adiponectin, C1Q and | Obesity and obesity- | 605441, 612556 |
| | collagen domain | linked diseases (e.g., | |
| | containing (also known as | hypertension, | |
| | adiponectin) | metabolic | |
| | | dysfunction, type 2 | |
| | | diabetes, | |
| | | atherosclerosis, and | |
| | | ischemic heart | |
| | | disease) | |

*Online Mendelian Inheritance in Man ® An Online Catalog of Human Genes and Genetic Disorders (omim.org)

### Target Genes and Related Disease and Biological Pathways

### Cancer—SERPINF1; BCL2L11, BRCA1, RB1, and ST7

[0050] Cancer is a broad group of various diseases, all involving unregulated cell growth. In cancer, cells divide and grow uncontrollably, forming malignant tumors, and invade nearby parts of the body. Several genes, many classified as tumor suppressors, are down-regulated during cancer progression, e.g., SERPINF1, BCL2L11, BRCA1, RB1, and ST7, and have roles in inhibiting genomic instability, metabolic processes, immune response, cell growth/cell cycle progression, migration, and/or survival. These cellular processes are important for blocking tumor progression. SERPINF1 encodes an anti-angiogenic factor. BCL2L11 encodes an apoptosis facilitator. BRCA1 encodes a RING finger protein involved in DNA damage repair. RB1 prevents excessive cell growth by inhibiting cell cycle progression until a cell is ready to divide. ST7 suppresses tumor growth in mouse models and is involved in regulation of genes involved in differentiation. Aspects of the invention disclosed herein provide methods and compositions that are useful for upregulating SERPINF1, BCL2L11, BRCA1, RB1, and ST7 for the treatment and/or prevention of diseases associated with reduced SERPINF1, BCL2L11, BRCA1, RB1, and ST7 expression or function such as cancer. For example, aspects of the invention disclosed herein provide methods and compositions that are useful for upregulating BCL2L11 for the treatment or prevention of human T-cell acute lymphoblastic leukemia and lymphoma. In another example, aspects of the invention disclosed herein provide methods and compositions that are useful for upregulating BRCA1 for the treatment or prevention of breast cancer or pancreatic cancer. In another example, aspects of the invention disclosed herein provide methods and compositions that are useful for upregulating RB1 for the treatment or prevention of bladder cancer, osteosarcoma, retinoblastoma, or small cell lung cancer. In another example, aspects of the invention disclosed herein provide methods and compositions that are useful for upregulating ST7 for the treatment or prevention of myeloid cancer, head and neck squamous cell carcinomas, breast cancer, colon carcinoma, or prostate cancer.

[0051] Examples of cancer include but are not limited to leukemias, lymphomas, myelomas, carcinomas, metastatic carcinomas, sarcomas, adenomas, nervous system cancers and genito-urinary cancers. In some embodiments, the cancer is adult and pediatric acute lymphoblastic leukemia, acute myeloid leukemia, adrenocortical carcinoma, AIDS-related cancers, anal cancer, cancer of the appendix, astrocytoma, basal cell carcinoma, bile duct cancer, bladder cancer, bone cancer, osteosarcoma, fibrous histiocytoma, brain cancer, brain stem glioma, cerebellar astrocytoma, malignant glioma, ependymoma, medulloblastoma, supratentorial primitive neuroectodermal tumors, hypothalamic glioma, breast cancer, male breast cancer, bronchial adenomas, Burkitt lymphoma, carcinoid tumor, carcinoma of unknown origin, central nervous system lymphoma, cerebellar astrocytoma, malignant glioma, cervical cancer, childhood cancers, chronic lymphocytic leukemia, chronic myelogenous leukemia, chronic myeloproliferative disorders, colorectal cancer, cutaneous T-cell lymphoma, endometrial cancer, ependymoma, esophageal cancer, Ewing family tumors, extracranial germ cell tumor, extragonadal germ cell tumor, extrahepatic bile duct cancer, intraocular melanoma, retinoblastoma, gallbladder cancer, gastric cancer, gastrointestinal stromal tumor, extracranial germ cell tumor, extragonadal germ cell tumor, ovarian germ cell tumor, gestational trophoblastic tumor, glioma, hairy cell leukemia, head and neck cancer, hepatocellular cancer, Hodgkin lymphoma, non-Hodgkin lymphoma, hypopharyngeal cancer, hypothalamic and visual pathway glioma, intraocular melanoma, islet cell tumors, Kaposi sarcoma, kidney cancer, renal cell cancer, laryngeal cancer, lip and oral cavity cancer, small cell lung cancer, non-small cell lung cancer, primary central nervous system lymphoma, Waldenstrom macroglobulinemia, malignant fibrous histiocytoma, medulloblastoma, melanoma, Merkel cell carcinoma, malignant mesothelioma, squamous neck cancer, multiple endocrine neoplasia syndrome, multiple myeloma, mycosis fungoides, myelodysplastic syndromes, myeloproliferative disorders, chronic myeloproliferative disorders, nasal cavity and paranasal sinus cancer, nasopharyngeal cancer, neuroblastoma, oropharyngeal cancer, ovarian cancer, pancreatic cancer, parathyroid cancer, penile cancer, pharyngeal cancer, pheochromocytoma, pineoblastoma and supratentorial primitive neuroectodermal tumors, pituitary cancer, plasma cell neoplasms, pleuropulmonary blastoma, prostate cancer, rectal cancer, rhabdomyosarcoma, salivary gland cancer, soft tissue sarcoma, uterine sarcoma, Sezary syndrome, non-melanoma skin cancer, small intestine cancer, squamous cell carcinoma, squamous neck cancer, supratentorial primitive neuroectodermal tumors, testicular cancer, throat cancer, thymoma and thymic carcinoma, thyroid cancer, transitional cell cancer, trophoblastic tumors, urethral cancer, uterine cancer, uterine sarcoma, vaginal cancer, vulvar cancer, or Wilms tumor.

### Hemophilia-F8

[0052] Hemophilia is a group of hereditary genetic disorders that impair the body's ability to control blood clotting or coagulation, which is used to stop bleeding when a blood vessel is broken. Like most recessive sex-linked, X chromosome disorders, haemophilia is more likely to occur in males than females. For example, Haemophilia A (clotting factor VIII deficiency), the most common form of the disorder, is present in about 1 in 5,000-10,000 male births. Haemophilia B (factor IX deficiency) occurs in around 1 in about 20,000-34,000 male births. Hemophilia lowers blood plasma clotting factor levels of the coagulation factors, e.g. F8, needed for a normal clotting process. Thus when a blood vessel is injured, a temporary scab does form, but the missing coagulation factors prevent fibrin formation, which is necessary to maintain the blood clot. F8, for example, encodes Factor VIII (FVIII), an essential blood clotting protein. Factor VIII participates in blood coagulation; it is a cofactor for factor IXa which, in the presence of Ca+2 and phospholipids forms a complex that converts factor X to the activated form Xa. Aspects of the invention disclosed herein provide methods and compositions that are useful for upregulating F8 for the treatment and/or prevention of diseases associated with reduced F8 expression or function such as hemophilia.

### Fragile X Syndrome—FMR1

[0053] Fragile X syndrome (FXS) (also known as Martin-Bell syndrome, or Escalante's syndrome) is a genetic syndrome that is the most common known single-gene cause of autism and the most common inherited cause of intellectual disability. It results in a spectrum of intellectual disability ranging from mild to severe as well as physical characteristics such as an elongated face, large or protruding ears, and larger testes (macroorchidism), behavioral characteristics such as stereotypical movements (e.g. hand-flapping), and social anxiety. Fragile X syndrome is associated with the expansion of the CGG trinucleotide repeat affecting the Fragile X mental retardation 1 (FMR1) gene on the X chromosome, resulting reduced expression of the X mental retardation protein (FMRP), which is required for normal neural development. Aspects of the invention disclosed herein provide methods and compositions that are useful for upregulating FMR1 for the treatment and/or prevention of diseases associated with reduced FMR1 expression or function such as Fragile X syndrome.

### Premature Ovarian Failure—FMR1

[0054] Premature Ovarian Failure (POF), also known as premature ovarian insufficiency, primary ovarian insufficiency, premature menopause, or hypergonadotropic hypogonadism, is the loss of function of the ovaries before age 40. POF can be associated mutations in the Fragile X mental retardation 1 (FMR1) gene on the X chromosome, resulting reduced expression of the X mental retardation protein (FMRP). Aspects of the invention disclosed herein provide methods and compositions that are useful for upregulating FMR1 for the treatment and/or prevention of diseases associated with reduced FMR1 expression or function such as Premature Ovarian Failure.

### Obesity FNDC5, GCK, ADIPOQ

[0055] Obesity is a medical condition in which excess body fat has accumulated to the extent that it may have an adverse effect on health, leading to reduced life expectancy and/or increased health problems. A person is considered obese when his or her weight is 20% or more above normal weight. The most common measure of obesity is the body mass index or BMI. A person is considered overweight if his or her BMI is between 25 and 29.9; a person is considered obese if his or her BMI is over 30. Obesity increases the likelihood of various diseases, particularly heart disease, type 2 diabetes, obstructive sleep apnea, certain types of cancer, and osteoarthritis. Obesity is most commonly caused by a combination of excessive food energy intake, lack of physical activity, and genetic susceptibility. Overexpression of FNDC5, fibronectin type II containing 5, has been shown in animal models to reduce body weight in obese mice. GCK, glucokinase (hexokinase 4), phosphorylates glucose to produce glucose-6-phosphate, the first step in most glucose metabolism pathways. Mutations in the GCK gene have been found to be associated with obesity in humans. Aspects of the invention disclosed herein provide methods and compositions that are useful for upregulating FNDC5 for the treatment and/or prevention of diseases associated with reduced FNDC5 expression or function such as obesity. Aspects of the invention disclosed herein provide methods and compositions that are useful for upregulating GCK for the treatment and/or prevention of diseases associated with reduced GCK expression or function such as obesity.

[0056] Adiponectin, encoded by the ADIPOQ gene, is a hormone that regulates metabolism of lipids and glucose. Adipocytes found in adipose tissue secrete adiponectin into the bloodstream where it self-associates into larger structures by binding of multiple adiponectin trimers to form hexamers and dodecamers. Adiponectin levels are inversely related to the amount of body fat in an individual and positively associated with insulin sensitivity both in healthy subjects and in diabetic patients. Adiponectin has a variety of protective properties against obesity-linked complications, such as hypertension, metabolic dysfunction, type 2 diabetes, atherosclerosis, and ischemic heart disease through its anti-inflammatory and anti-atherogenic properties. Specifically with regard to type 2 diabetes, administration of adiponectin has been accompanied by a reduction in plasma glucose and an increase in insulin sensitivity. Aspects of the invention disclosed herein provide methods and compositions that are useful for upregulating ADIPOQ for the treatment and/or prevention of diseases associated with reduced ADIPOQ expression or function such as obesity or an obesity-linked disease or disorders such as hypertension, metabolic dysfunction, type 2 diabetes, atherosclerosis, and ischemic heart disease.

### Type 2 Diabetes—FNDC5, GCK, GLP1R, SIRT1, ADIPOQ

[0057] Type 2 diabetes (also called Diabetes mellitus type 2 and formally known as adult-onset diabetes) a metabolic disorder that is characterized by high blood glucose in the context of insulin resistance and relative insulin deficiency. Type 2 diabetes makes up about 90% of cases of diabetes with the other 10% due primarily to diabetes mellitus type 1 and gestational diabetes. Obesity is thought to be the primary cause of type 2 diabetes in people who are genetically predisposed to the disease. The prevalence of diabetes has increased dramatically in the last 50 years. As of 2010 there were approximately 285 million people with the disease compared to around 30 million in 1985. Overexpression of FNDC5, fibronectin type II containing 5, has been shown in animal models to improve their insulin sensitivity. GCK, glucokinase (hexokinase 4), phosphorylates glucose to produce glucose-6-phosphate, the first step in most glucose metabolism pathways. Mutations in the GCK gene are known to be associated with Type 2 Diabetes. Glucagon-like peptide 1 receptor (GLP1R) is known to be expressed in pancreatic beta cells. Activated GLP1R stimulates the adenylyl cyclase pathway which results in increased insulin synthesis and release of insulin. SIRT1 (Sirtuin 1, also known as NAD-dependent deacetylase sirtuin-1) is an enzyme that deacetylates proteins that contribute to cellular regulation. Sirtuin 1 is downregulated in cells that have high insulin resistance and inducing its expression increases insulin sensitivity, suggesting the molecule is associated with improving insulin sensitivity. Aspects of the invention disclosed herein provide methods and compositions that are useful for upregulating FNDC5 for the treatment and/or prevention of diseases associated with reduced FNDC5 expression or function such as Type 2 Diabetes. Aspects of the invention disclosed herein provide methods and compositions that are useful for upregulating GCK for the treatment and/or prevention of diseases associated with reduced GCK expression or function such as Type 2 Diabetes. Aspects of the invention disclosed herein provide methods and compositions that are useful for upregulating GLP1R for the treatment and/or prevention of diseases associated with reduced GLP1R expression or function such as Type 2 Diabetes. Aspects of the invention disclosed herein provide methods and compositions that are useful for upregulating SIRT1 for the treatment and/or prevention of diseases associated with reduced SIRT1 expression or function such as Type 2 Diabetes. Aspects of the invention disclosed herein provide methods and compositions that are useful for upregulating ADIPOQ for the treatment and/or prevention of diseases associated with reduced ADIPOQ expression or function such as Type 2 Diabetes.

### Metabolic Disease—IGF1, SIRT1

[0058] Inborn errors of metabolism comprise a large class of genetic diseases involving disorders of metabolism. The majority are due to defects of single genes that code for enzymes that facilitate conversion of various substances (substrates) into others (products). In most of the disorders, problems arise due to accumulation of substances which are toxic or interfere with normal function, or to the effects of reduced ability to synthesize essential compounds. Inborn errors of metabolism are now often referred to as congenital metabolic diseases or inherited metabolic diseases. IGF-1, Insulin growth factor-1, is a hormone similar in molecular structure to insulin. IGF-1 plays an important role in childhood growth and continues to have anabolic effects in adults. Reduced IGF-1 and mutations in the IGF-1 gene are associated with metabolic disease. SIRT1 (Sirtuin 1, also known as NAD-dependent deacetylase sirtuin-1) is an enzyme that deacetylates proteins that contribute to cellular regulation. SIRT1 has been shown to de-acetylate and affect the activity of both members of the PGC1-alpha/ERR-alpha complex, which are essential metabolic regulatory transcription factors. Aspects of the invention disclosed herein provide methods and compositions that are useful for upregulating IGF-1 for the treatment and/or prevention of diseases associated with reduced IGF-1 expression or function such as metabolic disease. Aspects of the invention disclosed herein provide methods and compositions that are useful for upregulating SIRT1 for the treatment and/or prevention of diseases associated with reduced SIRT1 expression or function such as metabolic disease.

### Aging/Senescence—SIRT1

[0059] Senescence is the state or process of aging. Cellular senescence is a phenomenon where isolated cells demonstrate a limited ability to divide in culture, while organismal senescence is the aging of organisms. After a period of near perfect renewal (in humans, between 20 and 35 years of age), organismal senescence/aging is characterised by the declining ability to respond to stress, increasing homeostatic imbalance and increased risk of disease. This currently irreversible series of changes inevitably ends in death. SIRT1 (Sirtuin 1, also known as NAD-dependent deacetylase sirtuin-1) is an enzyme that deacetylates proteins that contribute to cellular regulation. Mice overexpressing SIRT1 present lower levels of DNA damage, decreased expression of the ageing-associated gene p16Ink4a, a better general health and fewer spontaneous carcinomas and sarcomas. Aspects of the invention disclosed herein provide methods and compositions that are useful for upregulating SIRT1 for the treatment and/or prevention of biological processes associated with reduced SIRT1 expression or function such as aging.

### Autoimmune—GRN, IDO1, CD274

[0060] Autoimmune diseases arise from an inappropriate immune response of the body against substances and tissues normally present in the body. In other words, the immune system mistakes some part of the body as a pathogen and attacks its own cells. Autoimmune diseases are classified by corresponding types of hypersensitivity: type II, type III, or type IV. Examples of autoimmune disease include, but are not limited to, Ankylosing Spondylitis, Autoimmune cardiomyopathy, Autoimmune hemolytic anemia, Autoimmune hepatitis, Autoimmune inner ear disease, immune lymphoproliferative syndrome, Autoimmune peripheral neuropathy, Autoimmune pancreatitis, Autoimmune polyendocrine syndrome, Autoimmune thrombocytopenic purpura, Celiac disease, Cold agglutinin disease, Contact dermatitis, Crohn's disease, Dermatomyositis, Diabetes mellitus type 1, Eosinophilic fasciitis, Gastrointestinal pemphigoid, Goodpasture's syndrome, Graves' disease, Guillain-Barré syndrome, Hashimoto's encephalopathy, Hashimoto's thyroiditis, Idiopathic thrombocytopenic purpura, Lupus erythematosus, Miller-Fisher syndrome, Myasthenia gravis, Pemphigus vulgaris, Pernicious anaemia, Polymyositis, Primary biliary cirrhosis, Psoriasis, Psoriatic arthritis, Relapsing polychondritis, Rheumatoid arthritis, Sjögren's syndrome, Temporal arteritis, Transverse myelitis, Ulcerative colitis, Undifferentiated connective tissue disease, Vasculitis, Vitiligo, and Wegener's granulomatosis. IDO1 encodes indoleamine 2,3-dioxygenase (IDO)—a heme enzyme that catalyzes the first and rate-limiting step in tryptophan catabolism to N-formyl-kynurenine. This enzyme acts on multiple tryptophan substrates including D-tryptophan, L-tryptophan, 5-hydroxy-tryptophan, tryptamine, and serotonin. This enzyme is thought to play a role in a variety of pathophysiological processes such as antimicrobial and antitumor defense, neuropathology, immunoregulation, and antioxidant activity. Increased catabolism of tryptophan by IDO1 suppresses T cell responses in a variety of diseases or states, including autoimmune disorders. GRN encodes a precursor protein called Progranulin, which is then cleaved to form the secreted protein granulin. Granulin regulates cell division, survival, motility and migration. Granulin has roles in cancer, inflammation, host defense, cartilage development and degeneration, and neurological functions. Downregulation of GRN has been shown to increase the onset of autoimmune diseases like rheumatoid arthritis. Aspects of the invention disclosed herein provide methods and compositions that are useful for upregulating IDO1 for the treatment and/or prevention of diseases associated with reduced IDO1 expression or function such as autoimmune diseases. Aspects of the invention disclosed herein provide methods and compositions that are useful for upregulating GRN for the treatment and/or prevention of diseases associated with reduced GRN expression or function such as autoimmune diseases.

[0061] CD274 (also known as PDL1) is a transmembrane protein containing IgV-like and IgC-like extracellular domains expressed on immune cells and non-hematopoietic cells, and is a ligand for the programmed death receptor (PD-1) expressed on lymphocytes and macrophages. PD-1 and CD274 interactions are essential in maintaining the balance of T-cell activation, tolerance, and immune-mediated tissue damage. CD274 is involved in inhibiting the initial phase of activation and expansion of self-reactive T cells, and restricting self-reactive T-cell effector function and target organ injury. More specifically, activation of PD-1 by CD274 inhibits T-cell proliferation, cytokine production, and cytolytic function by blocking the induction of phosphatidylinositol-3-kinase (PI3K) activity and downstream activation of Akt.

[0062] Decreased expression of CD274 results in autoimmunity in animal models. For example, mice deficient for the CD274 receptor, PD-1, developed features of late onset lupus. In another instance, blockade of CD274 activity in a mouse model of Type 1 diabetes resulted in accelerated progression of diabetes. In yet another example, CD274 blockade in an animal model of multiple sclerosis resulted in accelerated disease onset and progression.

[0063] Increasing expression of CD274 offers a novel approach for treating diseases related to inappropriate or undesirable activation of the immune system, including in the context of translation rejection, allergies, asthma and autoimmune disorders. Aspects of the invention disclosed herein provide methods and compositions that are useful for upregulating CD274 for the treatment and/or prevention of diseases associated with reduced CD274 expression or function such as autoimmune disease, transplant rejection, allergies or asthma.

### Inflammation (Chronic Inflammation)—GRN, IDO1, IL10

[0064] Inflammation is part of the complex biological response of vascular tissues to harmful stimuli, such as pathogens, damaged cells, or irritants. Inflammation is a protective attempt by the organism to remove the injurious stimuli and to initiate the healing process. However, chronic inflammation can also lead to a host of diseases, such as hay fever, periodontitis, atherosclerosis, and rheumatoid arthritis. Prolonged inflammation, known as chronic inflammation, leads to a progressive shift in the type of cells present at the site of inflammation and is characterized by simultaneous destruction and healing of the tissue from the inflammatory process. Inflammatory disorder include, but are not limited to, acne vulgaris, asthma, autoimmune diseases, celiac disease, chronic prostatitis, glomerulonephritis, inflammatory bowel diseases, pelvic inflammatory disease, reperfusion injury, rheumatoid arthritis, sarcoidosis, transplant rejection (graft vs host disease), vasculitis and interstitial cystitis.

[0065] GRN encodes a precursor protein called Progranulin, which is then cleaved to form the secreted protein granulin. Granulin regulates cell division, survival, motility and migration. Granulin has roles in cancer, inflammation, host defense, cartilage development and degeneration, and neurological functions. GRN has been shown to alleviate inflammatory arthritis symptoms in mouse models. Indoleamine 2,3-dioxygenase 1 (IDO1; previously referred as IDO or INDO) is the main inducible and rate-limiting enzyme for the catabolism of the amino acid tryptophan through the kynurenine pathway. Increased catabolism of tryptophan by IDO1 suppresses T cell responses in a variety of diseases, such as allograft rejection.

[0066] IL-10 is capable of inhibiting synthesis of pro-inflammatory cytokines such as IFN-γ, IL-2, IL-3, TNFα and GM-CSF made by cells such as macrophages and regulatory T-cells. It also displays a potent ability to suppress the antigen-presentation capacity of antigen presenting cells. Treatment with IL-10 (e.g. as a recombinant protein given to patients) is currently in clinical trials for Crohn's disease. Genetic variation in the IL-10 pathway modulates severity of acute graft-versus-host disease. Mouse models of arthritis have been shown to have decreased levels of IL-10. Aspects of the invention disclosed herein provide methods and compositions that are useful for upregulating GRN for the treatment and/or prevention of diseases associated with reduced GRN expression or function such as chronic inflammation.

[0067] Aspects of the invention disclosed herein provide methods and compositions that are useful for upregulating GRN for the treatment and/or prevention of diseases associated with reduced GRN expression or function such as chronic inflammation. Aspects of the invention disclosed herein provide methods and compositions that are useful for upregulating GRN for the treatment and/or prevention of diseases associated with reduced GRN expression or function such as rheumatoid arthritis. Aspects of the invention disclosed herein provide methods and compositions that are useful for upregulating IDO1 for the treatment and/or prevention of diseases associated with reduced IDO1 expression or function such as chronic inflammation. Aspects of the invention disclosed herein provide methods and compositions that are useful for upregulating IDO1 for the treatment and/or prevention of diseases associated with reduced IDO1 expression or function such as graft vs. host disease.

[0068] Aspects of the invention disclosed herein provide methods and compositions that are useful for upregulating IL10 for the treatment and/or prevention of diseases associated with reduced IL10 expression or function such as chronic inflammation. Aspects of the invention disclosed herein provide methods and compositions that are useful for upregulating IL10 for the treatment and/or prevention of diseases associated with reduced IL10 expression or function such as rheumatoid arthritis. Aspects of the invention disclosed herein provide methods and compositions that are useful for upregulating IL10 for the treatment and/or prevention of diseases associated with reduced IL10 expression or function such as graft vs host disease. Aspects of the invention disclosed herein provide methods and compositions that are useful for upregulating IL10 for the treatment and/or prevention of diseases associated with reduced IL10 expression or function such as Crohn's disease.

### Infectious Disease—PTGS2

[0069] Infectious diseases, also known as transmissible diseases or communicable diseases comprise clinically evident illness (i.e., characteristic medical signs and/or symptoms of disease) resulting from the infection, presence and growth of pathogenic biological agents in an individual host organism. Infectious pathogens include some viruses, bacteria, fungi, protozoa, multicellular parasites, and aberrant proteins known as prions. A contagious disease is a subset of infectious disease that is especially infective or easily transmitted. Prostaglandin-endoperoxide synthase 2, also known as cyclooxygenase-2 or simply COX-2, is an enzyme that in humans is encoded by the PTGS2 gene. Prostaglandin endoperoxide H synthase, COX 2, converts arachidonic acid (AA) to prostaglandin endoperoxide H2. COX-2 is elevated during inflammation and infection. Aspects of the invention disclosed herein provide methods and compositions that are useful for upregulating PTGS2 for the treatment and/or prevention of diseases associated with reduced PTGS2 expression or function such as infectious disease.

### CNS Disease—IGF1, GRN

[0070] Central nervous system (CNS) disease can affect either the spinal cord (myelopathy) or brain (encephalopathy), both of which are part of the central nervous system. CNS diseases include Encephalitis, Meningitis, Tropical spastic paraparesis, Arachnoid cysts, Amyotrophic lateral sclerosis, Huntington's disease, Alzheimer's disease, Dementia, Locked-in syndrome, Parkinson's disease, Tourette', and Multiple sclerosis. CNS diseases have a variety of causes including Trauma, Infections, Degeneration, Structural defects, Tumors, Autoimmune Disorders, and Stroke. Symptoms range from persistent headache, loss of feeling, memory loss, loss of muscle strength, tremors, seizures, slurred speech, and in some cases, death. IGF-1, Insulin growth factor-1, is a hormone similar in molecular structure to insulin. IGF-I deficiency is associated with neurodegenerative disease and has been shown to improve survival of neurons both in vitro and in vivo. Aspects of the invention disclosed herein provide methods and compositions that are useful for upregulating IGF1 for the treatment and/or prevention of diseases associated with reduced IGF1 expression or function such as CNS disease.

[0071] GRN encodes a precursor protein called Progranulin, which is then cleaved to form the secreted protein granulin. Granulin regulates cell division, survival, motility and migration. Granulin has roles in cancer, inflammation, host defense, cartilage development and degeneration, and neurological functions. Mutations in granulin are associated with dementia. Aspects of the invention disclosed herein provide methods and compositions that are useful for upregulating GRN for the treatment and/or prevention of diseases associated with reduced GRN expression or function such as CNS disease.

### Hemochromatosis—HAMP

[0072] Hemochromatosis is the abnormal accumulation of iron in parenchymal organs, leading to organ toxicity. This is the most common inherited liver disease in Caucasians and the most common autosomal recessive genetic disorder. HAMP (hepcidin antimicrobial peptide) encodes the protein hepcidin, which plays a major role in maintaining iron balance in the body. Hepcidin circulates in the blood and inhibits iron absorption by the small intestine when the body's supply of iron is too high. Hepcidin interacts primarily with other proteins in the intestines, liver, and certain white blood cells to adjust iron absorption and storage. At least eight mutations in the HAMP-gene have been identified that result in reduced levels of hepcidin and hemochromatosis. Aspects of the invention disclosed herein provide methods and compositions that are useful for upregulating HAMP for the treatment and/or prevention of diseases associated with reduced HAMP expression or function such as hemochromatosis.

### Acute Kidney Injury—SMAD7

[0073] Acute kidney injury (AKI), previously called acute renal failure (ARF), is a rapid loss of kidney function. Its causes are numerous and include low blood volume from any cause, exposure to substances harmful to the kidney, and obstruction of the urinary tract. AKI may lead to a number of complications, including metabolic acidosis, high potassium levels, uremia, changes in body fluid balance, and effects to other organ systems. SMAD7 (Mothers against decapentaplegic homolog 7) is a protein that, as its name describes, is a homolog of the Drosophila gene: “Mothers against decapentaplegic”. It belongs to the SMAD family of proteins, which belong to the TGFβ superfamily of ligands. Like many other TGFβ family members, SMAD7 is involved in cell signalling. It is a TGFβ type 1 receptor antagonist. It blocks TGFβ1 and activin associating with the receptor, blocking access to SMAD2. It is an inhibitory SMAD (I-SMAD) and is enhanced by SMURF2. Upon TGF-β treatment, Smad7 binds to discrete regions of Pellino-1 via distinct regions of the Smad MH2 domains. The interaction block formation of the IRAK1-mediated IL-1R/TLR signaling complex therefore abrogates NF-κB activity, which subsequently causes reduced expression of pro-inflammatory genes. Overexpression of SMAD7 in the kidney using gene therapy inhibited renal fibrosis and inflammatory pathways. Aspects of the invention disclosed herein provide methods and compositions that are useful for upregulating SMAD7 for the treatment and/or prevention of diseases associated with reduced SMAD7 expression or function such as acute kidney injury.

### Thalassemia—HAMP

[0074] Thalassemia is a group of inherited autosomal recessive blood disorders, resulting in a reduced rate of synthesis or no synthesis of one of the globin chains that make up hemoglobin. This can cause the formation of abnormal hemoglobin molecules or reduced numbers of hemoglobin, thus causing anemia, the characteristic presenting symptom of the thalassemias. HAMP (hepcidin antimicrobial peptide) encodes the protein hepcidin, which plays a major role in maintaining iron balance in the body. Hepcidin circulates in the blood and inhibits iron absorption by the small intestine when the body's supply of iron is too high. HAMP expression has been shown to be lower in patients with thalassemia and is associated with iron-overload (sometimes called hemochromatosis) in these patients. Aspects of the invention disclosed herein provide methods and compositions that are useful for upregulating HAMP for the treatment and/or prevention of diseases associated with reduced HAMP expression or function such as thalassemia.

### Lesch-Nyhan Disease—HPRT1

[0075] Lesch-Nyhan syndrome (LNS), also known as Nyhan's syndrome, Kelley-Seegmiller syndrome and Juvenile gout, is a rare inherited disorder caused by a deficiency of the enzyme hypoxanthine-guanine phosphoribosyltransferase (HGPRT), produced by mutations in the HPRT gene located on the X chromosome. LNS affects about one in 380,000 live births. The HGPRT deficiency causes a build-up of uric acid in all body fluids. This results in both hyperuricemia and hyperuricosuria, associated with severe gout and kidney problems. Neurological signs include poor muscle control and moderate mental retardation. Aspects of the invention disclosed herein provide methods and compositions that are useful for upregulating HPRT for the treatment and/or prevention of diseases associated with reduced HPRT expression or function such as Lesch-Nyhan syndrome.

### Delayed Growth—IGF-1

[0076] Delayed growth is poor or abnormally slow height or weight gains in a child typically younger than age 5. IGF-1, Insulin growth factor-1, is a hormone similar in molecular structure to insulin. IGF-1 plays an important role in childhood growth and continues to have anabolic effects in adults. IGF1 deficiency has been shown to be associated with delayed growth and short stature in humans. Aspects of the invention disclosed herein provide methods and compositions that are useful for upregulating IGF1 for the treatment and/or prevention of diseases associated with reduced IGF1 expression or function such as delayed growth.

### Dyslipidemias and Atherosclerosis—LDLR

[0077] Accumulation of lipids in the blood can cause a variety of conditions and diseases, e.g. dyslipidemia and atherosclerosis. Atherosclerosis in particular is the leading cause of death in industrialized societies, making prevention and treatment a high public health concern. Low-density lipoprotein (LDL) is a major transporter of fat molecules, e.g., cholesterol, in the blood stream that delivers fat molecules to cells. High-density lipoprotein (HDL) is another transporter of fat molecules that moves lipids, e.g. cholesterol, from cells to the liver. High levels of LDL are associated with health problems such as dyslipidemia and atherosclerosis, while HDL is protective against atherosclerosis and is involved in maintenance of cholesterol homeostasis.

[0078] Dyslipidemia generally describes a condition when an abnormal amount of lipids is present in the blood. Hyperlipidemia, which accounts for the majority of dyslipidemias, refers to an abnormally high amount of lipids in the blood. Hyperlipidemia is often associated with hormonal diseases such as diabetes, hypothyroidism, metabolic syndrome, and Cushing syndrome. Examples of common lipids in dyslipidemias include triglycerides like cholesterol and fat. Abnormal amounts lipids or lipoproteins in the blood can lead to atherosclerosis, heart disease, and stroke.

[0079] Atherosclerosic diseases, e.g. coronary artery disease (CAD) and myocardial infarction (MI), involve a thickening of artery walls caused by accumulation of fat in the blood, most commonly cholesterol. This thickening is thought to be the result of chronic inflammation of arteriole walls due to accumulation of LDLs in the vessel walls. LDL molecules can become oxidized once inside vessel walls, resulting in cell damage and recruitment of immune cells like macrophages to absorb the oxidized LDL. Once macrophages internalize oxidized LDL, they become saturated with cholesterol and are referred to as foam cells. Smooth muscle cells are then recruited and form a fibrous region. These processes eventually lead to formation of plaques block arteries and can cause heart attack and stroke. HDL is capable of transporting cholesterol from foam cells to the liver, which aids in inhibition of inflammation and plaque formation.

[0080] The LDLR gene encodes the Low-Density Lipoprotein (LDL) Receptor, which is a mosaic protein of ˜840 amino acids (after removal of signal peptide) that mediates the endocytosis of cholesterol-rich LDL. It is a cell-surface receptor that recognizes the apoprotein B 100 which is embedded in the phospholipid outer layer of LDL particles. LDL receptor complexes are present in clathrin-coated pits (or buds) on the cell surface, which when bound to LDL-cholesterol via adaptin, are pinched off to form clathrin-coated vesicles inside the cell. This allows LDL-cholesterol to be bound and internalized in a process known as endocytosis. This occurs in all nucleated cells (not erythrocytes), but mainly in the liver which removes ˜70% of LDL from the circulation. Aspects of the invention disclosed herein provide methods and compositions that are useful for upregulating LDLR for the treatment and/or prevention of diseases associated with reduced LDLR expression or function such as dyslipidemia or atherosclerosis.

### Tissue Regeneration—NANOG

[0081] Regeneration is the process of renewal, restoration, and growth of cells and organs in response to disturbance or damage. Strategies for regeneration of tissue include the rearrangement of pre-existing tissue, the use of adult somatic stem cells and the dedifferentiation and/or transdifferentiation of cells, and more than one mode can operate in different tissues of the same animal. During the developmental process genes are activated that serve to modify the properties of cells as they differentiate into different tissues. Development and regeneration involves the coordination and organization of populations cells into a blastema, which is a mound of stem cells from which regeneration begins. Dedifferentiation of cells means that they lose their tissue-specific characteristics as tissues remodel during the regeneration process. Transdifferentiation of cells occurs when they lose their tissue-specific characteristics during the regeneration process, and then re-differentiate to a different kind of cell. These strategies result in the re-establishment of appropriate tissue polarity, structure and form. NANOG is a transcription factor critically involved with self-renewal of undifferentiated embryonic stem cells through maintenance of pluripotency. Aspects of the invention disclosed herein provide methods and compositions that are useful for upregulating NANOG for tissue regeneration.

### Oxidative Stress/Antioxidative Pathway—SIRT6

[0082] Cells are protected against oxidative stress by an interacting network of antioxidant enzymes. Oxidation reactions can produce superoxides or free radicals. In turn, these radicals can start chain reactions. When the chain reaction occurs in a cell, it can cause damage or death to the cell. Antioxidants terminate these chain reactions by removing free radical intermediates, and inhibit other oxidation reactions. The superoxide released by processes such as oxidative phosphorylation is first converted to hydrogen peroxide and then further reduced to give water. This detoxification pathway is the result of multiple enzymes, with superoxide dismutases catalysing the first step and then catalases and various peroxidases removing hydrogen peroxide. As oxidative stress appears to be an important part of many human diseases, the use of antioxidants in pharmacology is highly attractive. Mono-ADP-ribosyltransferase sirtuin-6 is an enzyme that in humans is encoded by the SIRT6 gene. Sirtuin-6 has been shown to have a protective role against metabolic damage caused by a high fat diet. SIRT6 deficiency is associated with metabolic defects that lead to oxidative stress. Aspects of the invention disclosed herein provide methods and compositions that are useful for upregulating SIRT6 for tissue regeneration. Aspects of the invention disclosed herein provide methods and compositions that are useful for upregulating SIRT6 for the treatment and/or prevention of diseases associated with reduced SIRT6 expression or function such as oxidative stress.

### Choroidal Neovascularization—SERPINF1

[0083] Choroidal neovascularization (CNV) is the creation of new blood vessels in the choroid layer of the eye. This is a common symptom of the degenerative maculopathy wet AMD (age-related macular degeneration). Serpin F1 (SERPINF1), also known as Pigment epithelium-derived factor (PEDF), is a multifunctional secreted protein that has anti-angiogenic, anti-tumorigenic, and neurotrophic functions. The anti-angiogenic properties of SERPINF1 allow it to block new blood vessel formation. Aspects of the invention disclosed herein provide methods and compositions that are useful for upregulating SERPINF1 for the treatment and/or prevention of diseases associated with reduced SERPINF1 expression or function such as Choroidal neovascularization.

### Cardiovascular Disease—SERPINF1

[0084] Cardiovascular disease is a class of diseases that involve the heart or blood vessels (arteries and veins). Cardiovascular diseases remain the biggest cause of deaths worldwide. Types of cardiovascular disease include, Coronary heart disease, Cardiomyopathy, Hypertensive heart disease, Heart failure, Corpulmonale, Cardiac dysrhythmias, Inflammatory heart disease, Valvular heart disease, Stroke and Peripheral arterial disease. Serpin F1 (SERPINF1), also known as Pigment epithelium-derived factor (PEDF), is a multifunctional secreted protein that has anti-angiogenic, anti-tumorigenic, and neurotrophic functions. SERPINF1 has been shown to have a protective role in atherosclerosis, the main cause of coronary heart disease, myocardial infarction and heart failure due to its anti-inflammatory, antioxidant and antithrombotic effects in the vessel wall and platelets. Additionally SERPINF1 has strong antiangiogenic effects by inducing apoptosis in endothelial cells and by regulating the expression of other angiogenic factors. Aspects of the invention disclosed herein provide methods and compositions that are useful for upregulating SERPINF1 for the treatment and/or prevention of diseases associated with reduced SERPINF1 expression or function such as cardiovascular disease.

### Hyperimmunoglobulin E Syndrome—STAT3

[0085] Loss-of-function mutations in the STAT3 gene result in Hyperimmunoglobulin E syndrome, associated with recurrent infections as well as disordered bone and tooth development.

### Leber's Congenital Amaurosis (LCA), Bardet-Biedl Syndrome (BBS), Joubert Syndrome, Meckel Syndrome, Sior-Loken Syndrome—CEP290

[0086] Leber's congenital amaurosis (LCA) is a rare autosomal recessive eye disease resulting in a severe form of retinal dystrophy that is present from birth. LCA results in slow or non-existent pupillary responses, involuntary eye movement, and severe loss of vision. LCA is thought to be caused by abnormal photoreceptor cell development or degeneration. Bardet-Biedl syndrome (BBS) is characterized by retinal dystrophy and retinitis pigmentosa. Other manifestations include polydactyly and renal abnormalities. Both LCA and BBS are associated with mutations in Centrosomal protein 290 kDA (CEP290).

[0087] CEP290 is a large coiled-coil protein found in the centrosome and cilia of cells. CEP290 modulates ciliary formation and is involved in trafficking ciliary proteins between the cell body and the cilium of a cell. Reduction or abolishment of CEP290 activity, results in retinal and photoreceptor degeneration. This generation is thought to be the result of defects in ciliogenesis. CEP290 is also associated with Joubert syndrome, Meckel syndrome, and Sior-Loken syndrome. Aspects of the invention disclosed herein provide methods and compositions that are useful for upregulating CEP290 for the treatment and/or prevention of diseases associated with reduced CEP290 expression or function such as Leber's congenital amaurosis (LCA), Bardet-Biedl syndrome (BBS), Joubert syndrome, Meckel syndrome, Sior-Loken syndrome.

### Phenylketonuria—PAH

[0088] Phenylketonuria (PKU) is an autosomal recessive metabolic disease caused by elevated levels of Phenyalanine (Phe) in the blood. Phe is a large neutral amino acid (LNAA) that interacts with the LNAA transporter in order to cross the blood-brain barrier. When Phe is in excess in the blood, it saturates the LNAA transporter, prevent other essential LNAAs from crossing the blood-brain barrier. This results in depletion of these amino acids in the brain, leading to slowing of the development of the brain and mental retardation. PKU can be managed by strictly controlling and monitoring Phe levels in the diet in infants and children. However, if left untreated, severe mental retardation, irregular motor functions, and behavioral disorders result from Phe accumulation in the blood.

[0089] Phe accumulation in the blood is the result of mutations in the Phenylalanine hydroxylase (PAH) gene, which encodes phenylalanine hydroxylase protein. Phenylalanine hydroxylase is an enzyme that generates tyrosine through hydroxylation of the aromatic side-chain of Phe. Phenylalanine hydroxylase is the rate-limiting enzyme in the degradation of excess Phe. When phenylalanine hydroxylase levels are decreased or enzyme functionality is compromised, Phe begins to accumulate in the blood, resulting in PKU. Aspects of the invention disclosed herein provide methods and compositions that are useful for upregulating PAH for the treatment and/or prevention of diseases associated with reduced PAH expression or function such PKU.

### Congenital Bilateral Absence of Vas Deferens (CBAVD) and Cystic Fibrosis (CF)—CFTR

[0090] CFTR is a cyclic-AMP activated ATP-gated anion channel that transports ions across cell membranes. CFTR is predominantly found in epithelial cells in the lung, liver, pancreas, digestive tract, reproductive tract, and skin. A main function of CFTR is to move chloride and thiocyanate ions out of epithelial cells. In order to maintain electrical balance, sodium ions move with the chloride and thiocyanate ions, resulting in an increase of electrolytes outside of the cell. This increase results in movement of water out of the cell by osmosis, creating bodily fluids such as mucus, sweat, and digestive juices, depending on the organ. When CFTR activity is reduced or abolished, ion transport is affected, resulting in reduced water movement out of cells and abnormally viscous bodily fluids (e.g. sticky and viscous mucus, sweat, or digestives juices).

[0091] Mutations in CFTR are associated with congenital bilateral absence of vas deferens (CBAVD) and cystic fibrosis. Males with congenital bilateral absence of the vas deferens often have mutations that result in reduced CFTR activity. As a result of these mutations, the movement of water and salt into and out of cells is disrupted. This disturbance leads to the production of a large amount of thick mucus that blocks the developing vas deferens (a tube that carries sperm from the testes) and causes it to degenerate, resulting in infertility.

[0092] Cystic fibrosis (CF) is an autosomal recessive disease characterized by overly viscous secretions in the lungs, pancreas, liver, and intestine. In the lungs, difficulty breathing and frequent infection are common results of mucus build-up. Viscous secretions in the pancreas lead to scarring, fibrosis, and cyst formation which can subsequently lead to diabetes. Additionally, absorption of nutrients in the intestine is decreased due to a lack of digestive enzymes provided by the pancreas. Blockage of the intestine is also common due to thickening of the feces. Aspects of the invention disclosed herein provide methods and compositions that are useful for upregulating CFTR for the treatment and/or prevention of diseases associated with reduced CFTR expression or function such CBAVD or CF.

### Single Stranded Oligonucleotides for Modulating Expression of Target Genes

[0093] In one aspect of the invention, single stranded oligonucleotides complementary to the PRC2-associated regions are provided for modulating expression of a target gene in a cell. In some embodiments, expression of the target gene is upregulated or increased. In some embodiments, single stranded oligonucleotides complementary to these PRC2-associated regions inhibit the interaction of PRC2 with long RNA transcripts such that gene expression is upregulated or increased. In some embodiments, single stranded oligonucleotides complementary to these PRC2-associated regions inhibit the interaction of PRC2 with long RNA transcripts, resulting in reduced methylation of histone H3 and reduced gene inactivation, such that gene expression is upregulated or increased. In some embodiments, this interaction may be disrupted or inhibited due to a change in the structure of the long RNA that prevents or reduces binding to PRC2. The oligonucleotide may be selected using any of the methods disclosed herein for selecting a candidate oligonucleotide for activating expression of a target gene.

[0094] The single stranded oligonucleotide may comprise a region of complementarity that is complementary with a PRC2-associated region of a nucleotide sequence set forth in any one of SEQ ID NOS: 1 to 96. The region of complementarity of the single stranded oligonucleotide may be complementary with at least 6, e.g., at least 7, at least 8, at least 9, at least 10, at least 15 or more consecutive nucleotides of the PRC2-associated region.

[0095] The PRC2-associated region may map to a position in a chromosome between 50 kilobases upstream of a 5′-end of the target gene and 50 kilobases downstream of a 3′-end of the target gene. The PRC2-associated region may map to a position in a chromosome between 25 kilobases upstream of a 5′-end of the target gene and 25 kilobases downstream of a 3′-end of the target gene. The PRC2-associated region may map to a position in a chromosome between 12 kilobases upstream of a 5′-end of the target gene and 12 kilobases downstream of a 3′-end of the target gene. The PRC2-associated region may map to a position in a chromosome between 5 kilobases upstream of a 5′-end of the target gene and 5 kilobases downstream of a 3′-end of the target gene.

[0096] The genomic position of the selected PRC2-associated region relative to the target gene may vary. For example, the PRC2-associated region may be upstream of the 5′ end of the target gene. The PRC2-associated region may be downstream of the 3′ end of the target gene. The PRC2-associated region may be within an intron of the target gene. The PRC2-associated region may be within an exon of the target gene. The PRC2-associated region may traverse an intron-exon junction, a 5′-UTR-exon junction or a 3′-UTR-exon junction of the target gene.

[0097] The single stranded oligonucleotide may comprise a sequence having the formula X-Y-Z, in which X is any nucleotide, Y is a nucleotide sequence of 6 nucleotides in length that is not a human seed sequence of a microRNA, and Z is a nucleotide sequence of varying length. In some embodiments X is the 5′ nucleotide of the oligonucleotide. In some embodiments, when X is anchored at the 5′ end of the oligonucleotide, the oligonucleotide does not have any nucleotides or nucleotide analogs linked 5′ to X. In some embodiments, other compounds such as peptides or sterols may be linked at the 5′ end in this embodiment as long as they are not nucleotides or nucleotide analogs. In some embodiments, the single stranded oligonucleotide has a sequence 5′X-Y-Z and is 8-50 nucleotides in length. Oligonucleotides that have these sequence characteristics are predicted to avoid the miRNA pathway. Therefore, in some embodiments, oligonucleotides having these sequence characteristics are unlikely to have an unintended consequence of functioning in a cell as a miRNA molecule. The Y sequence may be a nucleotide sequence of 6 nucleotides in length set forth in Table 1.

[0098] The single stranded oligonucleotide may have a sequence that does not contain guanosine nucleotide stretches (e.g., 3 or more, 4 or more, 5 or more, 6 or more consecutive guanosine nucleotides). In some embodiments, oligonucleotides having guanosine nucleotide stretches have increased non-specific binding and/or off-target effects, compared with oligonucleotides that do not have guanosine nucleotide stretches.

[0099] The single stranded oligonucleotide may have a sequence that has less than a threshold level of sequence identity with every sequence of nucleotides, of equivalent length, that map to a genomic position encompassing or in proximity to an off-target gene. For example, an oligonucleotide may be designed to ensure that it does not have a sequence that maps to genomic positions encompassing or in proximity with all known genes (e.g., all known protein coding genes) other than the target gene. In a similar embodiment, an oligonucleotide may be designed to ensure that it does not have a sequence that maps to any other known PRC2-associated region, particularly PRC2-associated regions that are functionally related to any other known gene (e.g., any other known protein coding gene). In either case, the oligonucleotide is expected to have a reduced likelihood of having off-target effects. The threshold level of sequence identity may be 50%, 60%, 70%, 80%, 85%, 90%, 95%, 99% or 100% sequence identity.

[0100] The single stranded oligonucleotide may have a sequence that is complementary to a PRC2-associated region that encodes an RNA that forms a secondary structure comprising at least two single stranded loops. In has been discovered that, in some embodiments, oligonucleotides that are complementary to a PRC2-associated region that encodes an RNA that forms a secondary structure comprising one or more single stranded loops (e.g., at least two single stranded loops) have a greater likelihood of being active (e.g., of being capable of activating or enhancing expression of a target gene) than a randomly selected oligonucleotide. In some cases, the secondary structure may comprise a double stranded stem between the at least two single stranded loops. Accordingly, the region of complementarity between the oligonucleotide and the PRC2-associated region may be at a location of the PRC2-associated region that encodes at least a portion of at least one of the loops. In some cases, the region of complementarity between the oligonucleotide and the PRC2-associated region may be at a location of the PRC2-associated region that encodes at least a portion of at least two of the loops. In some cases, the region of complementarity between the oligonucleotide and the PRC2-associated region may be at a location of the PRC2 associated region that encodes at least a portion of the double stranded stem. In some embodiments, a PRC2-associated region (e.g., of an lncRNA) is identified (e.g., using RIP-Seq methodology or information derived therefrom). In some embodiments, the predicted secondary structure RNA (e.g., lncRNA) containing the PRC2-associated region is determined using RNA secondary structure prediction algorithms, e.g., RNAfold, mfold. In some embodiments, oligonucleotides are designed to target a region of the RNA that forms a secondary structure comprising one or more single stranded loop (e.g., at least two single stranded loops) structures which may comprise a double stranded stem between the at least two single stranded loops.

[0101] The single stranded oligonucleotide may have a sequence that is has greater than 30% G-C content, greater than 40% G-C content, greater than 50% G-C content, greater than 60% G-C content, greater than 70% G-C content, or greater than 80% G-C content. The single stranded oligonucleotide may have a sequence that has up to 100% G-C content, up to 95% G-C content, up to 90% G-C content, or up to 80% G-C content. In some embodiments in which the oligonucleotide is 8 to 10 nucleotides in length, all but 1, 2, 3, 4, or 5 of the nucleotides of the complementary sequence of the PRC2-associated region are cytosine or guanosine nucleotides. In some embodiments, the sequence of the PRC2-associated region to which the single stranded oligonucleotide is complementary comprises no more than 3 nucleotides selected from adenine and uracil.

[0102] The single stranded oligonucleotide may be complementary to a chromosome of a different species (e.g., a mouse, rat, rabbit, goat, monkey, etc.) at a position that encompasses or that is in proximity to that species' homolog of the target gene. The single stranded oligonucleotide may be complementary to a human genomic region encompassing or in proximity to the target gene and also be complementary to a mouse genomic region encompassing or in proximity to the mouse homolog of the target gene. For example, the single stranded oligonucleotide may be complementary to a sequence as set forth in SEQ ID NO: 1, 2, 5, 6, 9, 10, 13, 14, 17, 18, 21, 22, 25, 26, 29, 30, 33, 34, 37, 38, 43, 44, 45, 46, 49, 50, 53, 54, 57, 58, 61, 62, 65, 66, 69, 70, 73, 74, 77, 78, 81, 82, 85, 86, 89, 90, 93, 94, 815175, 815176, 868590, 868591, 899865, 899866, 962801, 962802, 981187, or 981188, which is a human genomic region encompassing or in proximity to the target gene, and also be complementary to a sequence as set forth in SEQ ID NO: 3, 4, 7, 8, 11, 12, 15, 16, 19, 20, 23, 24, 27, 28, 31, 32, 35, 36, 39, 40, 41, 42, 47, 48, 51, 52, 55, 56, 59, 60, 63, 64, 67, 68, 71, 72, 75, 76, 79, 80, 83, 84, 87, 88, 91, 92, 95, 96, 815177, 815178, 868592, 868593, 899867, 899868, 962803, 962804, 981189, or 981190, which is a mouse genomic region encompassing or in proximity to the mouse homolog of the target gene. Oligonucleotides having these characteristics may be tested in vivo or in vitro for efficacy in multiple species (e.g., human and mouse). This approach also facilitates development of clinical candidates for treating human disease by selecting a species in which an appropriate animal exists for the disease.

[0103] In some embodiments, the region of complementarity of the single stranded oligonucleotide is complementary with at least 8 to 15, 8 to 30, 8 to 40, or 10 to 50, or 5 to 50, or 5 to 40 bases, e.g., 5, 6, 7, 8, 9, 10, 11, 12, 13, 14, 15, 16, 17, 18, 19, 20, 21, 22, 23, 24, 25, 26, 27, 28, 29, 30, 31, 32, 33, 34, 35, 36, 37, 38, 39, 40, 41, 42, 43, 44, 45, 46, 47, 48, 49, or 50 consecutive nucleotides of a PRC2-associated region. In some embodiments, the region of complementarity is complementary with at least 8 consecutive nucleotides of a PRC2-associated region. In some embodiments the sequence of the single stranded oligonucleotide is based on an RNA sequence that binds to PRC2, or a portion thereof, said portion having a length of from 5 to 40 contiguous base pairs, or about 8 to 40 bases, or about 5 to 15, or about 5 to 30, or about 5 to 40 bases, or about 5 to 50 bases.

[0104] Complementary, as the term is used in the art, refers to the capacity for precise pairing between two nucleotides. For example, if a nucleotide at a certain position of an oligonucleotide is capable of hydrogen bonding with a nucleotide at the same position of PRC2-associated region, then the single stranded nucleotide and PRC2-associated region are considered to be complementary to each other at that position. The single stranded nucleotide and PRC2-associated region are complementary to each other when a sufficient number of corresponding positions in each molecule are occupied by nucleotides that can hydrogen bond with each other through their bases. Thus, “complementary” is a term which is used to indicate a sufficient degree of complementarity or precise pairing such that stable and specific binding occurs between the single stranded nucleotide and PRC2-associated region. For example, if a base at one position of a single stranded nucleotide is capable of hydrogen bonding with a base at the corresponding position of a PRC2-associated region, then the bases are considered to be complementary to each other at that position. 100% complementarity is not required.

[0105] The single stranded oligonucleotide may be at least 80% complementary to (optionally one of at least 85%, 90%, 91%, 92%, 93%, 94%, 95%, 96%, 97%, 98%, 99% or 100% complementary to) the consecutive nucleotides of a PRC2-associated region. In some embodiments the single stranded oligonucleotide may contain 1, 2 or 3 base mismatches compared to the portion of the consecutive nucleotides of a PRC2-associated region. In some embodiments the single stranded oligonucleotide may have up to 3 mismatches over 15 bases, or up to 2 mismatches over 10 bases.

[0106] It is understood in the art that a complementary nucleotide sequence need not be 100% complementary to that of its target to be specifically hybridizable. In some embodiments, a complementary nucleic acid sequence for purposes of the present disclosure is specifically hybridizable when binding of the sequence to the target molecule (e.g., lncRNA) interferes with the normal function of the target (e.g., lncRNA) to cause a loss of activity (e.g., inhibiting PRC2-associated repression with consequent up-regulation of gene expression) and there is a sufficient degree of complementarity to avoid non-specific binding of the sequence to non-target sequences under conditions in which avoidance of non-specific binding is desired, e.g., under physiological conditions in the case of in vivo assays or therapeutic treatment, and in the case of in vitro assays, under conditions in which the assays are performed under suitable conditions of stringency.

[0107] In some embodiments, the single stranded oligonucleotide is 7, 8, 9, 10, 11, 12, 13, 14, 15, 16, 17, 18, 19, 20, 21, 22, 23, 24, 25, 26, 27, 28, 29, 30, 35, 40, 45, 50 or more nucleotides in length. In a preferred embodiment, the oligonucleotide is 8 to 30 nucleotides in length.

[0108] In some embodiments, the PRC2-associated region occurs on the same DNA strand as a gene sequence (sense). In some embodiments, the PRC2-associated region occurs on the opposite DNA strand as a gene sequence (anti-sense). Oligonucleotides complementary to a PRC2-associated region can bind either sense or anti-sense sequences. Base pairings may include both canonical Watson-Crick base pairing and non-Watson-Crick base pairing (e.g., Wobble base pairing and Hoogsteen base pairing). It is understood that for complementary base pairings, adenosine-type bases (A) are complementary to thymidine-type bases (T) or uracil-type bases (U), that cytosine-type bases (C) are complementary to guanosine-type bases (G), and that universal bases such as 3-nitropyrrole or 5-nitroindole can hybridize to and are considered complementary to any A, C, U, or T. Inosine (I) has also been considered in the art to be a universal base and is considered complementary to any A, C, U or T.

[0109] In some embodiments, any one or more thymidine (T) nucleotides (or modified nucleotide thereof) or uridine (U) nucleotides (or a modified nucleotide thereof) in a sequence provided herein, including a sequence provided in the sequence listing, may be replaced with any other nucleotide suitable for base pairing (e.g., via a Watson-Crick base pair) with an adenosine nucleotide. In some embodiments, any one or more thymidine (T) nucleotides (or modified nucleotide thereof) or uridine (U) nucleotides (or a modified nucleotide thereof) in a sequence provided herein, including a sequence provided in the sequence listing, may be suitably replaced with a different pyrimidine nucleotide or vice versa. In some embodiments, any one or more thymidine (T) nucleotides (or modified nucleotide thereof) in a sequence provided herein, including a sequence provided in the sequence listing, may be suitably replaced with a uridine (U) nucleotide (or a modified nucleotide thereof) or vice versa.

[0110] In some embodiments, GC content of the single stranded oligonucleotide is preferably between about 30-60%. Contiguous runs of three or more Gs or Cs may not be preferable in some embodiments. Accordingly, in some embodiments, the oligonucleotide does not comprise a stretch of three or more guanosine nucleotides.

[0111] In some embodiments, the single stranded oligonucleotide specifically binds to, or is complementary to an RNA that is encoded in a genome (e.g., a human genome) as a single contiguous transcript (e.g., a non-spliced RNA). In some embodiments, the single stranded oligonucleotide specifically binds to, or is complementary to an RNA that is encoded in a genome (e.g., a human genome), in which the distance in the genome between the 5′ end of the coding region of the RNA and the 3′ end of the coding region of the RNA is less than 1 kb, less than 2 kb, less than 3 kb, less than 4 kb, less than 5 kb, less than 7 kb, less than 8 kb, less than 9 kb, less than 10 kb, or less than 20 kb.

It is to be understood that any oligonucleotide provided herein can be excluded. In some embodiments, a single stranded oligonucleotide is not complementary to any one or more of SEQ ID NOs: 989599 to 989617.

[0112] In some embodiments, it has been found that single stranded oligonucleotides disclosed herein may increase expression of mRNA corresponding to the gene by at least about 50% (i.e. 150% of normal or 1.5 fold), or by about 2 fold to about 5 fold. In some embodiments it is contemplated that expression may be increased by at least about 15 fold. 20 fold, 30 fold, 40 fold, 50 fold or 100 fold, or any range between any of the foregoing numbers. It has also been found that increased mRNA expression has been shown to correlate to increased protein expression.

[0113] In some or any of the embodiments of the oligonucleotides described herein, or processes for designing or synthesizing them, the oligonucleotides will upregulate gene expression and may specifically bind or specifically hybridize or be complementary to the PRC2 binding RNA that is transcribed from the same strand as a protein coding reference gene. The oligonucleotide may bind to a region of the PRC2 binding RNA that originates within or overlaps an intron, exon, intron exon junction, 5′ UTR, 3′ UTR, a translation initiation region, or a translation termination region of a protein coding sense strand of a reference gene (refGene).

[0114] In some or any of the embodiments of oligonucleotides described herein, or processes for designing or synthesizing them, the oligonucleotides will upregulate gene expression and may specifically bind or specifically hybridize or be complementary to a PRC2 binding RNA that transcribed from the opposite strand (the antisense strand) of a protein coding reference gene. The oligonucleotide may bind to a region of the PRC2 binding RNA that originates within or overlaps an intron, exon, intron exon junction, 5′ UTR, 3′ UTR, a translation initiation region, or a translation termination region of a protein coding antisense strand of a reference gene

[0115] The oligonucleotides described herein may be modified, e.g., comprise a modified sugar moiety, a modified internucleoside linkage, a modified nucleotide and/or combinations thereof. In addition, the oligonucleotides can exhibit one or more of the following properties: do not induce substantial cleavage or degradation of the target RNA; do not cause substantially complete cleavage or degradation of the target RNA; do not activate the RNAse H pathway; do not activate RISC; do not recruit any Argonaute family protein; are not cleaved by Dicer; do not mediate alternative splicing; are not immune stimulatory; are nuclease resistant; have improved cell uptake compared to unmodified oligonucleotides; are not toxic to cells or mammals; may have improved endosomal exit; do interfere with interaction of lncRNA with PRC2, preferably the Ezh2 subunit but optionally the Suz12, Eed, RbAp46/48 subunits or accessory factors such as Jarid2; do decrease histone H3 lysine27 methylation and/or do upregulate gene expression.

[0116] Oligonucleotides that are designed to interact with RNA to modulate gene expression are a distinct subset of base sequences from those that are designed to bind a DNA target (e.g., are complementary to the underlying genomic DNA sequence from which the RNA is transcribed).

[0117] Any of the oligonucleotides disclosed herein may be linked to one or more other oligonucleotides disclosed herein by a linker, e.g., a cleavable linker.

[0118] Method for Selecting Candidate Oligonucleotides for Activating Expression of a Target Gene

[0119] Methods are provided herein for selecting a candidate oligonucleotide for activating or enhancing expression of a target gene. The target selection methods may generally involve steps for selecting single stranded oligonucleotides having any of the structural and functional characteristics disclosed herein. Typically, the methods involve one or more steps aimed at identifying oligonucleotides that target a PRC2-associated region that is functionally related to the target gene, for example a PRC2-associated region of a lncRNA that regulates expression of the target gene by facilitating (e.g., in a cis-regulatory manner) the recruitment of PRC2 to the target gene. Such oligonucleotides are expected to be candidates for activating expression of the target gene because of their ability to hybridize with the PRC2-associated region of a nucleic acid (e.g., a lncRNA). In some embodiments, this hybridization event is understood to disrupt interaction of PRC2 with the nucleic acid (e.g., a lncRNA) and as a result disrupt recruitment of PRC2 and its associated co-repressors (e.g., chromatin remodeling factors) to the target gene locus.

[0120] Methods of selecting a candidate oligonucleotide may involve selecting a PRC2-associated region (e.g., a nucleotide sequence as set forth in any one of SEQ ID NOS: 97 to 1210, 815179 to 815208, 868594 to 868617, 899869 to 899932, 962805 to 962816, or 981191 to 981196) that maps to a chromosomal position encompassing or in proximity to the target gene (e.g., a chromosomal position having a sequence as set forth in any one of SEQ ID NOS: 1 to 96, 815175 to 815178, 868590 to 868593; 899865 to 899868, 962801 to 962804, or 981187 to 981190). The PRC2-associated region may map to the strand of the chromosome comprising the sense strand of the target gene, in which case the candidate oligonucleotide is complementary to the sense strand of the target gene (i.e., is antisense to the target gene). Alternatively, the PRC2-associated region may map to the strand of the first chromosome comprising the antisense strand of the target gene, in which case the oligonucleotide is complementary to the antisense strand (the template strand) of the target gene (i.e., is sense to the target gene).

[0121] Methods for selecting a set of candidate oligonucleotides that is enriched in oligonucleotides that activate expression of the target gene may involve selecting one or more PRC2-associated regions that map to a chromosomal position that encompasses or that is in proximity to the target gene and selecting a set of oligonucleotides, in which each oligonucleotide in the set comprises a nucleotide sequence that is complementary with the one or more PRC2-associated regions. As used herein, the phrase, “a set of oligonucleotides that is enriched in oligonucleotides that activate expression of” refers to a set of oligonucleotides that has a greater number of oligonucleotides that activate expression of a target gene (e.g., a gene listed in Table 4) compared with a random selection of oligonucleotides of the same physicochemical properties (e.g., the same GC content, Tₘ, length etc.) as the enriched set.

[0122] Where the design and/or synthesis of a single stranded oligonucleotide involves design and/or synthesis of a sequence that is complementary to a nucleic acid or PRC2-associated region described by such sequence information, the skilled person is readily able to determine the complementary sequence, e.g., through understanding of Watson Crick base pairing rules which form part of the common general knowledge in the field.

[0123] In some embodiments design and/or synthesis of a single stranded oligonucleotide involves manufacture of an oligonucleotide from starting materials by techniques known to those of skill in the art, where the synthesis may be based on a sequence of a PRC2-associated region, or portion thereof.

[0124] Methods of design and/or synthesis of a single stranded oligonucleotide may involve one or more of the steps of:

[0125] Identifying and/or selecting PRC2-associated region;

[0126] Designing a nucleic acid sequence having a desired degree of sequence identity or complementarity to a PRC2-associated region or a portion thereof;

[0127] Synthesizing a single stranded oligonucleotide to the designed sequence;

[0128] Purifying the synthesized single stranded oligonucleotide; and

[0129] Optionally mixing the synthesized single stranded oligonucleotide with at least one pharmaceutically acceptable diluent, carrier or excipient to form a pharmaceutical composition or medicament.

[0130] Single stranded oligonucleotides so designed and/or synthesized may be useful in method of modulating gene expression as described herein.

[0131] Preferably, single stranded oligonucleotides of the invention are synthesized chemically. Oligonucleotides used to practice this invention can be synthesized in vitro by well-known chemical synthesis techniques.

[0132] Oligonucleotides of the invention can be stabilized against nucleolytic degradation such as by the incorporation of a modification, e.g., a nucleotide modification. For example, nucleic acid sequences of the invention include a phosphorothioate at least the first, second, or third internucleotide linkage at the 5′ or 3′ end of the nucleotide sequence. As another example, the nucleic acid sequence can include a 2′-modified nucleotide, e.g., a 2′-deoxy, 2′-deoxy-2′-fluoro, 2′-O-methyl, 2′-O-methoxyethyl (2′-O-MOE), 2′-O-aminopropyl (2′-O-AP), 2′-O-dimethylaminoethyl (2′-O-DMAOE), 2′-O-dimethylaminopropyl (2′-O-DMAP), 2′-O-dimethylaminoethyloxyethyl (2′-O-DMAEOE), or 2′-O—N-methylacetamido (2′-O-NMA). As another example, the nucleic acid sequence can include at least one 2′-O-methyl-modified nucleotide, and in some embodiments, all of the nucleotides include a 2′-O-methyl modification. In some embodiments, the nucleic acids are “locked,” i.e., comprise nucleic acid analogues in which the ribose ring is “locked” by a methylene bridge connecting the 2′-O atom and the 4′-C atom.

[0133] It is understood that any of the modified chemistries or formats of single stranded oligonucleotides described herein can be combined with each other, and that one, two, three, four, five, or more different types of modifications can be included within the same molecule.

[0134] In some embodiments, the method may further comprise the steps of amplifying the synthesized single stranded oligonucleotide, and/or purifying the single stranded oligonucleotide (or amplified single stranded oligonucleotide), and/or sequencing the single stranded oligonucleotide so obtained.

[0135] As such, the process of preparing a single stranded oligonucleotide may be a process that is for use in the manufacture of a pharmaceutical composition or medicament for use in the treatment of disease, optionally wherein the treatment involves modulating expression of a gene associated with a PRC2-associated region.

[0136] In the methods described above a PRC2-associated region may be, or have been, identified, or obtained, by a method that involves identifying RNA that binds to PRC2.

[0137] Such methods may involve the following steps: providing a sample containing nuclear ribonucleic acids, contacting the sample with an agent that binds specifically to PRC2 or a subunit thereof, allowing complexes to form between the agent and protein in the sample, partitioning the complexes, synthesizing nucleic acid that is complementary to nucleic acid present in the complexes.

[0138] Where the single stranded oligonucleotide is based on a PRC2-associated region, or a portion of such a sequence, it may be based on information about that sequence, e.g., sequence information available in written or electronic form, which may include sequence information contained in publicly available scientific publications or sequence databases.

### Nucleotide Analogues

[0139] In some embodiments, the oligonucleotide may comprise at least one ribonucleotide, at least one deoxyribonucleotide, and/or at least one bridged nucleotide. In some embodiments, the oligonucleotide may comprise a bridged nucleotide, such as a locked nucleic acid (LNA) nucleotide, a constrained ethyl (cEt) nucleotide, or an ethylene bridged nucleic acid (ENA) nucleotide. Examples of such nucleotides are disclosed herein and known in the art. In some embodiments, the oligonucleotide comprises a nucleotide analog disclosed in one of the following United States patent or patent application Publications: U.S. Pat. No. 7,399,845, U.S. Pat. No. 7,741,457, U.S. Pat. No. 8,022,193, U.S. Pat. No. 7,569,686, U.S. Pat. No. 7,335,765, U.S. Pat. No. 7,314,923, U.S. Pat. No. 7,335,765, and U.S. Pat. No. 7,816,333, US 20110009471, the entire contents of each of which are incorporated herein by reference for all purposes. The oligonucleotide may have one or more 2′ O-methyl nucleotides. The oligonucleotide may consist entirely of 2′ O-methyl nucleotides.

[0140] Often the single stranded oligonucleotide has one or more nucleotide analogues. For example, the single stranded oligonucleotide may have at least one nucleotide analogue that results in an increase in Tₘ of the oligonucleotide in a range of 1° C., 2° C., 3° C., 4° C., or 5° C. compared with an oligonucleotide that does not have the at least one nucleotide analogue. The single stranded oligonucleotide may have a plurality of nucleotide analogues that results in a total increase in Tₘ of the oligonucleotide in a range of 2° C., 3° C., 4° C., 5° C., 6° C., 7° C., 8° C., 9° C., 10° C., 15° C., 20° C., 25° C., 30° C., 35° C., 40° C., 45° C. or more compared with an oligonucleotide that does not have the nucleotide analogue.

[0141] The oligonucleotide may be of up to 50 nucleotides in length in which 2 to 10, 2 to 15, 2 to 16, 2 to 17, 2 to 18, 2 to 19, 2 to 20, 2 to 25, 2 to 30, 2 to 40, 2 to 45, or more nucleotides of the oligonucleotide are nucleotide analogues. The oligonucleotide may be of 8 to 30 nucleotides in length in which 2 to 10, 2 to 15, 2 to 16, 2 to 17, 2 to 18, 2 to 19, 2 to 20, 2 to 25, 2 to 30 nucleotides of the oligonucleotide are nucleotide analogues. The oligonucleotide may be of 8 to 15 nucleotides in length in which 2 to 4, 2 to 5, 2 to 6, 2 to 7, 2 to 8, 2 to 9, 2 to 10, 2 to 11, 2 to 12, 2 to 13, 2 to 14 nucleotides of the oligonucleotide are nucleotide analogues. Optionally, the oligonucleotides may have every nucleotide except 1, 2, 3, 4, 5, 6, 7, 8, 9, or 10 nucleotides modified.

[0142] The oligonucleotide may consist entirely of bridged nucleotides (e.g., LNA nucleotides, cEt nucleotides, ENA nucleotides). The oligonucleotide may comprise alternating deoxyribonucleotides and 2′-fluoro-deoxyribonucleotides. The oligonucleotide may comprise alternating deoxyribonucleotides and 2′-O-methyl nucleotides. The oligonucleotide may comprise alternating deoxyribonucleotides and ENA nucleotide analogues. The oligonucleotide may comprise alternating deoxyribonucleotides and LNA nucleotides. The oligonucleotide may comprise alternating LNA nucleotides and 2′-O-methyl nucleotides. The oligonucleotide may have a 5′ nucleotide that is a bridged nucleotide (e.g., a LNA nucleotide, cEt nucleotide, ENA nucleotide). The oligonucleotide may have a 5′ nucleotide that is a deoxyribonucleotide.

[0143] The oligonucleotide may comprise deoxyribonucleotides flanked by at least one bridged nucleotide (e.g., a LNA nucleotide, cEt nucleotide, ENA nucleotide) on each of the 5′ and 3′ ends of the deoxyribonucleotides. The oligonucleotide may comprise deoxyribonucleotides flanked by 1, 2, 3, 4, 5, 6, 7, 8 or more bridged nucleotides (e.g., LNA nucleotides, cEt nucleotides, ENA nucleotides) on each of the 5′ and 3′ ends of the deoxyribonucleotides. The 3′ position of the oligonucleotide may have a 3′ hydroxyl group. The 3′ position of the oligonucleotide may have a 3′ thiophosphate.

[0144] The oligonucleotide may be conjugated with a label. For example, the oligonucleotide may be conjugated with a biotin moiety, cholesterol, Vitamin A, folate, sigma receptor ligands, aptamers, peptides, such as CPP, hydrophobic molecules, such as lipids, ASGPR or dynamic polyconjugates and variants thereof at its 5′ or 3′ end.

[0145] Preferably the single stranded oligonucleotide comprises one or more modifications comprising: a modified sugar moiety, and/or a modified internucleoside linkage, and/or a modified nucleotide and/or combinations thereof. It is not necessary for all positions in a given oligonucleotide to be uniformly modified, and in fact more than one of the modifications described herein may be incorporated in a single oligonucleotide or even at within a single nucleoside within an oligonucleotide.

[0146] In some embodiments, the single stranded oligonucleotides are chimeric oligonucleotides that contain two or more chemically distinct regions, each made up of at least one nucleotide. These oligonucleotides typically contain at least one region of modified nucleotides that confers one or more beneficial properties (such as, for example, increased nuclease resistance, increased uptake into cells, increased binding affinity for the target) and a region that is a substrate for enzymes capable of cleaving RNA:DNA or RNA:RNA hybrids. Chimeric single stranded oligonucleotides of the invention may be formed as composite structures of two or more oligonucleotides, modified oligonucleotides, oligonucleosides and/or oligonucleotide mimetics as described above. Such compounds have also been referred to in the art as hybrids or gapmers. Representative United States patents that teach the preparation of such hybrid structures comprise, but are not limited to, U.S. Pat. Nos. 5,013,830; 5,149,797; 5,220,007; 5,256,775; 5,366,878; 5,403,711; 5,491,133; 5,565,350; 5,623,065; 5,652,355; 5,652,356; and 5,700,922, each of which is herein incorporated by reference.

[0147] In some embodiments, the single stranded oligonucleotide comprises at least one nucleotide modified at the 2′ position of the sugar, most preferably a 2′-O-alkyl, 2′-O-alkyl-O-alkyl or 2′-fluoro-modified nucleotide. In other preferred embodiments, RNA modifications include 2′-fluoro, 2′-amino and 2′ O-methyl modifications on the ribose of pyrimidines, abasic residues or an inverted base at the 3′ end of the RNA. Such modifications are routinely incorporated into oligonucleotides and these oligonucleotides have been shown to have a higher Tm (i.e., higher target binding affinity) than 2′-deoxyoligonucleotides against a given target.

[0148] A number of nucleotide and nucleoside modifications have been shown to make the oligonucleotide into which they are incorporated more resistant to nuclease digestion than the native oligodeoxynucleotide; these modified oligos survive intact for a longer time than unmodified oligonucleotides. Specific examples of modified oligonucleotides include those comprising modified backbones, for example, phosphorothioates, phosphotriesters, methyl phosphonates, short chain alkyl or cycloalkyl intersugar linkages or short chain heteroatomic or heterocyclic intersugar linkages. Most preferred are oligonucleotides with phosphorothioate backbones and those with heteroatom backbones, particularly CH₂—NH—O—CH₂, CH, ˜N(CH₃)˜O˜CH₂ (known as a methylene(methylimino) or MMI backbone, CH₂—O—N(CH₃)—CH₂, CH₂—N(CH₃)—N(CH₃)—CH₂ and O—N(CH₃)—CH₂—CH₂ backbones, wherein the native phosphodiester backbone is represented as O—P—O—CH,); amide backbones (see De Mesmaeker et al. Ace. Chem. Res. 1995, 28:366-374); morpholino backbone structures (see Summerton and Weller, U.S. Pat. No. 5,034,506); peptide nucleic acid (PNA) backbone (wherein the phosphodiester backbone of the oligonucleotide is replaced with a polyamide backbone, the nucleotides being bound directly or indirectly to the aza nitrogen atoms of the polyamide backbone, see Nielsen et al., Science 1991, 254, 1497). Phosphorus-containing linkages include, but are not limited to, phosphorothioates, chiral phosphorothioates, phosphorodithioates, phosphotriesters, aminoalkylphosphotriesters, methyl and other alkyl phosphonates comprising 3′alkylene phosphonates and chiral phosphonates, phosphinates, phosphoramidates comprising 3′-amino phosphoramidate and aminoalkylphosphoramidates, thionophosphoramidates, thionoalkylphosphonates, thionoalkylphosphotriesters, and boranophosphates having normal 3′-5′ linkages, 2′-5′ linked analogs of these, and those having inverted polarity wherein the adjacent pairs of nucleoside units are linked 3′-5′ to 5′-3′ or 2′-5′ to 5′-2′; see U.S. Pat. Nos. 3,687,808; 4,469,863; 4,476,301; 5,023,243; 5,177,196; 5,188,897; 5,264,423; 5,276,019; 5,278,302; 5,286,717; 5,321,131; 5,399,676; 5,405,939; 5,453,496; 5,455, 233; 5,466,677; 5,476,925; 5,519,126; 5,536,821; 5,541,306; 5,550,111; 5,563, 253; 5,571,799; 5,587,361; and 5,625,050.

[0149] Morpholino-based oligomeric compounds are described in Dwaine A. Braasch and David R. Corey, Biochemistry, 2002, 41(14), 4503-4510); Genesis, volume 30, issue 3, 2001; Heasman, J., Dev. Biol., 2002, 243, 209-214; Nasevicius et al., Nat. Genet., 2000, 26, 216-220; Lacerra et al., Proc. Natl. Acad. Sci., 2000, 97, 9591-9596; and U.S. Pat. No. 5,034,506, issued Jul. 23, 1991. In some embodiments, the morpholino-based oligomeric compound is a phosphorodiamidate morpholino oligomer (PMO) (e.g., as described in Iverson, Curr. Opin. Mol. Ther., 3:235-238, 2001; and Wang et al., J. Gene Med., 12:354-364, 2010; the disclosures of which are incorporated herein by reference in their entireties).

[0150] Cyclohexenyl nucleic acid oligonucleotide mimetics are described in Wang et al., J. Am. Chem. Soc., 2000, 122, 8595-8602.

[0151] Modified oligonucleotide backbones that do not include a phosphorus atom therein have backbones that are formed by short chain alkyl or cycloalkyl internucleoside linkages, mixed heteroatom and alkyl or cycloalkyl internucleoside linkages, or one or more short chain heteroatomic or heterocyclic internucleoside linkages. These comprise those having morpholino linkages (formed in part from the sugar portion of a nucleoside); siloxane backbones; sulfide, sulfoxide and sulfone backbones; formacetyl and thioformacetyl backbones; methylene formacetyl and thioformacetyl backbones; alkene containing backbones; sulfamate backbones; methyleneimino and methylenehydrazino backbones; sulfonate and sulfonamide backbones; amide backbones; and others having mixed N, O, S and CH2 component parts; see U.S. Pat. Nos. 5,034,506; 5,166,315; 5,185,444; 5,214,134; 5,216,141; 5,235,033; 5,264, 562; 5, 264,564; 5,405,938; 5,434,257; 5,466,677; 5,470,967; 5,489,677; 5,541,307; 5,561,225; 5,596,086; 5,602,240; 5,610,289; 5,602,240; 5,608,046; 5,610,289; 5,618,704; 5,623,070; 5,663,312; 5,633,360; 5,677,437; and 5,677,439, each of which is herein incorporated by reference.

[0152] Modified oligonucleotides are also known that include oligonucleotides that are based on or constructed from arabinonucleotide or modified arabinonucleotide residues. Arabinonucleosides are stereoisomers of ribonucleosides, differing only in the configuration at the 2′-position of the sugar ring. In some embodiments, a 2′-arabino modification is 2′-F arabino. In some embodiments, the modified oligonucleotide is 2′-fluoro-D-arabinonucleic acid (FANA) (as described in, for example, Lon et al., Biochem., 41:3457-3467, 2002 and Min et al., Bioorg. Med. Chem. Lett., 12:2651-2654, 2002; the disclosures of which are incorporated herein by reference in their entireties). Similar modifications can also be made at other positions on the sugar, particularly the 3′ position of the sugar on a 3′ terminal nucleoside or in 2′-5′ linked oligonucleotides and the 5′ position of 5′ terminal nucleotide.

[0153] PCT Publication No. WO 99/67378 discloses arabinonucleic acids (ANA) oligomers and their analogues for improved sequence specific inhibition of gene expression via association to complementary messenger RNA.

[0154] Other preferred modifications include ethylene-bridged nucleic acids (ENAs) (e.g., International Patent Publication No. WO 2005/042777, Morita et al., Nucleic Acid Res., Suppl 1:241-242, 2001; Surono et al., Hum. Gene Ther., 15:749-757, 2004; Koizumi, Curr. Opin. Mol. Ther., 8:144-149, 2006 and Horie et al., Nucleic Acids Symp. Ser (Oxf), 49:171-172, 2005; the disclosures of which are incorporated herein by reference in their entireties). Preferred ENAs include, but are not limited to, 2′-O,4′-C-ethylene-bridged nucleic acids.

[0155] Examples of LNAs are described in WO/2008/043753 and include compounds of the following general formula.

[chemical structure]

[0156] where X and Y are independently selected among the groups —O—,

[0157] —S—, —N(H)—, N(R)—, —CH₂— or —CH— (if part of a double bond),

[0158] —CH₂—O—, —CH₂—S—, —CH₂—N(H)—, —CH₂—N(R)—, —CH₂—CH₂— or —CH₂—CH— (if part of a double bond),

[0159] —CH═CH—, where R is selected from hydrogen and C₁₋₄-alkyl; Z and Z* are independently selected among an internucleoside linkage, a terminal group or a protecting group; B constitutes a natural or non-natural nucleotide base moiety; and the asymmetric groups may be found in either orientation.

[0160] Preferably, the LNA used in the oligonucleotides described herein comprises at least one LNA unit according any of the formulas

[chemical structure]

[0161] wherein Y is —O—, —S—, —NH—, or N(R^{H}); Z and Z* are independently selected among an internucleoside linkage, a terminal group or a protecting group; B constitutes a natural or non-natural nucleotide base moiety, and RH is selected from hydrogen and C₁₋₄-alkyl.

[0162] In some embodiments, the Locked Nucleic Acid (LNA) used in the oligonucleotides described herein comprises a Locked Nucleic Acid (LNA) unit according any of the formulas shown in Scheme 2 of PCT/DK2006/000512.

[0163] In some embodiments, the LNA used in the oligomer of the invention comprises internucleoside linkages selected from 0-P(O)₂—O—, —O—P(O,S)—O—, -0-P(S)₂—O—, —S—P(O)₂—O—, —S—P(O,S)—O—, —S—P(S)₂—O—, -0-P(O)₂—S—, —O—P(O,S)—S—, —S—P(O)₂—S—, —O—PO(R^{H})—, O—PO(OCH₃)—O—, —O—PO(NR^{H})—O—, -0-PO(OCH₂CH₂S—R)—O—, —O—PO(BH₃)—O—, —O—PO(NHR^{H})—O—, —O—P(O)₂—NR^{H}—, —NR^{H}—P(O)₂—O—, —NR^{H}—CO—O—, where R^{H} is selected from hydrogen and C₁₋₄-alkyl.

[0164] Specifically preferred LNA units are shown in scheme 2:

[chemical structure]

[0165] The term “thio-LNA” comprises a locked nucleotide in which at least one of X or Y in the general formula above is selected from S or —CH₂—S—. Thio-LNA can be in both beta-D and alpha-L-configuration.

[0166] The term “amino-LNA” comprises a locked nucleotide in which at least one of X or Y in the general formula above is selected from —N(H)—, N(R)—, CH₂—N(H)—, and —CH₂—N(R)— where R is selected from hydrogen and C₁₋₄-alkyl. Amino-LNA can be in both beta-D and alpha-L-configuration.

[0167] The term “oxy-LNA” comprises a locked nucleotide in which at least one of X or Y in the general formula above represents —O— or —CH₂—O—. Oxy-LNA can be in both beta-D and alpha-L-configuration.

[0168] The term “ena-LNA” comprises a locked nucleotide in which Y in the general formula above is —CH₂—O— (where the oxygen atom of —CH₂—O— is attached to the 2′-position relative to the base B).

[0169] LNAs are described in additional detail herein.

[0170] One or more substituted sugar moieties can also be included, e.g., one of the following at the 2′ position: OH, SH, SCH₃, F, OCN, OCH₃OCH₃, OCH₃O(CH₂)n CH₃, O(CH₂)n NH₂ or O(CH₂)n CH₃ where n is from 1 to about 10; Ci to C10 lower alkyl, alkoxyalkoxy, substituted lower alkyl, alkaryl or aralkyl; Cl; Br; CN; CF₃; OCF₃; O—, S—, or N-alkyl; O—, S—, or N-alkenyl; SOCH₃; SO₂CH₃; ONO₂; NO₂; N₃; NH2; heterocycloalkyl; heterocycloalkaryl; aminoalkylamino; polyalkylamino; substituted silyl; an RNA cleaving group; a reporter group; an intercalator; a group for improving the pharmacokinetic properties of an oligonucleotide; or a group for improving the pharmacodynamic properties of an oligonucleotide and other substituents having similar properties. A preferred modification includes 2′-methoxyethoxy[2′-0-CH₂CH₂OCH₃, also known as 2′-O-(2-methoxyethyl)](Martin et al, HeIv. Chim. Acta, 1995, 78, 486). Other preferred modifications include 2′-methoxy (2′-0-CH₃), 2′-propoxy (2′-OCH₂CH₂CH₃) and 2′-fluoro (2′-F). Similar modifications may also be made at other positions on the oligonucleotide, particularly the 3′ position of the sugar on the 3′ terminal nucleotide and the 5′ position of 5′ terminal nucleotide. Oligonucleotides may also have sugar mimetics such as cyclobutyls in place of the pentofuranosyl group.

[0171] Single stranded oligonucleotides can also include, additionally or alternatively, nucleobase (often referred to in the art simply as “base”) modifications or substitutions. As used herein, “unmodified” or “natural” nucleobases include adenine (A), guanine (G), thymine (T), cytosine (C) and uracil (U). Modified nucleobases include nucleobases found only infrequently or transiently in natural nucleic acids, e.g., hypoxanthine, 6-methyladenine, 5-Me pyrimidines, particularly 5-methylcytosine (also referred to as 5-methyl-2′ deoxycytosine and often referred to in the art as 5-Me-C), 5-hydroxymethylcytosine (HMC), glycosyl HMC and gentobiosyl HMC, isocytosine, pseudoisocytosine, as well as synthetic nucleobases, e.g., 2-aminoadenine, 2-(methylamino)adenine, 2-(imidazolylalkyl)adenine, 2-(aminoalklyamino)adenine or other heterosubstituted alkyladenines, 2-thiouracil, 2-thiothymine, 5-bromouracil, 5-hydroxymethyluracil, 5-propynyluracil, 8-azaguanine, 7-deazaguanine, N6 (6-aminohexyl)adenine, 6-aminopurine, 2-aminopurine, 2-chloro-6-aminopurine and 2,6-diaminopurine or other diaminopurines. See, e.g., Kornberg, “DNA Replication,” W. H. Freeman & Co., San Francisco, 1980, pp 75-77; and Gebeyehu, G., et al. Nucl. Acids Res., 15:4513 (1987)). A “universal” base known in the art, e.g., inosine, can also be included. 5-Me-C substitutions have been shown to increase nucleic acid duplex stability by 0.6-1.2° C. (Sanghvi, in Crooke, and Lebleu, eds., Antisense Research and Applications, CRC Press, Boca Raton, 1993, pp. 276-278) and may be used as base substitutions.

[0172] It is not necessary for all positions in a given oligonucleotide to be uniformly modified, and in fact more than one of the modifications described herein may be incorporated in a single oligonucleotide or even at within a single nucleoside within an oligonucleotide.

[0173] In some embodiments, both a sugar and an internucleoside linkage, i.e., the backbone, of the nucleotide units are replaced with novel groups. The base units are maintained for hybridization with an appropriate nucleic acid target compound. One such oligomeric compound, an oligonucleotide mimetic that has been shown to have excellent hybridization properties, is referred to as a peptide nucleic acid (PNA). In PNA compounds, the sugar-backbone of an oligonucleotide is replaced with an amide containing backbone, for example, an aminoethylglycine backbone. The nucleobases are retained and are bound directly or indirectly to aza nitrogen atoms of the amide portion of the backbone. Representative United States patents that teach the preparation of PNA compounds include, but are not limited to, U.S. Pat. Nos. 5,539,082; 5,714,331; and 5,719,262, each of which is herein incorporated by reference. Further teaching of PNA compounds can be found in Nielsen et al, Science, 1991, 254, 1497-1500.

[0174] Single stranded oligonucleotides can also include one or more nucleobase (often referred to in the art simply as “base”) modifications or substitutions. As used herein, “unmodified” or “natural” nucleobases comprise the purine bases adenine (A) and guanine (G), and the pyrimidine bases thymine (T), cytosine (C) and uracil (U). Modified nucleobases comprise other synthetic and natural nucleobases such as 5-methylcytosine (5-me-C), 5-hydroxymethyl cytosine, xanthine, hypoxanthine, 2-aminoadenine, 6-methyl and other alkyl derivatives of adenine and guanine, 2-propyl and other alkyl derivatives of adenine and guanine, 2-thiouracil, 2-thiothymine and 2-thiocytosine, 5-halouracil and cytosine, 5-propynyl uracil and cytosine, 6-azo uracil, cytosine and thymine, 5-uracil (pseudo-uracil), 4-thiouracil, 8-halo, 8-amino, 8-thiol, 8-thioalkyl, 8-hydroxyl and other 8-substituted adenines and guanines, 5-halo particularly 5-bromo, 5-trifluoromethyl and other 5-substituted uracils and cytosines, 7-methylquanine and 7-methyladenine, 8-azaguanine and 8-azaadenine, 7-deazaguanine and 7-deazaadenine and 3-deazaguanine and 3-deazaadenine.

[0175] Further, nucleobases comprise those disclosed in U.S. Pat. No. 3,687,808, those disclosed in “The Concise Encyclopedia of Polymer Science And Engineering”, pages 858-859, Kroschwitz, ed. John Wiley & Sons, 1990; those disclosed by Englisch et al., Angewandle Chemie, International Edition, 1991, 30, page 613, and those disclosed by Sanghvi, Chapter 15, Antisense Research and Applications,” pages 289-302, Crooke, and Lebleu, eds., CRC Press, 1993. Certain of these nucleobases are particularly useful for increasing the binding affinity of the oligomeric compounds of the invention. These include 5-substituted pyrimidines, 6-azapyrimidines and N-2, N-6 and 0-6 substituted purines, comprising 2-aminopropyladenine, 5-propynyluracil and 5-propynylcytosine. 5-methylcytosine substitutions have been shown to increase nucleic acid duplex stability by 0.6-1.2<0>C (Sanghvi, et al., eds, “Antisense Research and Applications,” CRC Press, Boca Raton, 1993, pp. 276-278) and are presently preferred base substitutions, even more particularly when combined with 2′-O-methoxyethyl sugar modifications. Modified nucleobases are described in U.S. Pat. No. 3,687,808, as well as U.S. Pat. Nos. 4,845,205; 5,130,302; 5,134,066; 5,175,273; 5,367,066; 5,432,272; 5,457,187; 5,459,255; 5,484,908; 5,502,177; 5,525,711; 5,552,540; 5,587,469; 5,596,091; 5,614,617; 5,750,692, and 5,681,941, each of which is herein incorporated by reference.

[0176] In some embodiments, the single stranded oligonucleotides are chemically linked to one or more moieties or conjugates that enhance the activity, cellular distribution, or cellular uptake of the oligonucleotide. For example, one or more single stranded oligonucleotides, of the same or different types, can be conjugated to each other; or single stranded oligonucleotides can be conjugated to targeting moieties with enhanced specificity for a cell type or tissue type. Such moieties include, but are not limited to, lipid moieties such as a cholesterol moiety (Letsinger et al., Proc. Natl. Acad. Sci. USA, 1989, 86, 6553-6556), cholic acid (Manoharan et al., Bioorg. Med. Chem. Let., 1994, 4, 1053-1060), a thioether, e.g., hexyl-S-tritylthiol (Manoharan et al, Ann. N. Y. Acad. Sci., 1992, 660, 306-309; Manoharan et al., Bioorg. Med. Chem. Let., 1993, 3, 2765-2770), a thiocholesterol (Oberhauser et al., Nucl. Acids Res., 1992, 20, 533-538), an aliphatic chain, e.g., dodecandiol or undecyl residues (Kabanov et al., FEBS Lett., 1990, 259, 327-330; Svinarchuk et al., Biochimie, 1993, 75, 49-54), a phospholipid, e.g., di-hexadecyl-rac-glycerol or triethylammonium 1,2-di-O-hexadecyl-rac-glycero-3-H-phosphonate (Manoharan et al., Tetrahedron Lett., 1995, 36, 3651-3654; Shea et al., Nucl. Acids Res., 1990, 18, 3777-3783), a polyamine or a polyethylene glycol chain (Mancharan et al., Nucleosides & Nucleotides, 1995, 14, 969-973), or adamantane acetic acid (Manoharan et al., Tetrahedron Lett., 1995, 36, 3651-3654), a palmityl moiety (Mishra et al., Biochim. Biophys. Acta, 1995, 1264, 229-237), or an octadecylamine or hexylamino-carbonyl-t oxycholesterol moiety (Crooke et al., J. Pharmacol. Exp. Ther., 1996, 277, 923-937). See also U.S. Pat. Nos. 4,828,979; 4,948,882; 5,218,105; 5,525,465; 5,541,313; 5,545,730; 5,552,538; 5,578,717, 5,580,731; 5,580,731; 5,591,584; 5,109,124; 5,118,802; 5,138,045; 5,414,077; 5,486,603; 5,512,439; 5,578,718; 5,608,046; 4,587,044; 4,605,735; 4,667,025; 4,762,779; 4,789,737; 4,824,941; 4,835,263; 4,876,335; 4,904,582; 4,958,013; 5,082,830; 5,112,963; 5,214,136; 5,082,830; 5,112,963; 5,214,136; 5,245,022; 5,254,469; 5,258,506; 5,262,536; 5,272,250; 5,292,873; 5,317,098; 5,371,241, 5,391,723; 5,416,203, 5,451,463; 5,510,475; 5,512,667; 5,514,785; 5,565,552; 5,567,810; 5,574,142; 5,585,481; 5,587,371; 5,595,726; 5,597,696; 5,599,923; 5,599,928 and 5,688,941, each of which is herein incorporated by reference.

[0177] These moieties or conjugates can include conjugate groups covalently bound to functional groups such as primary or secondary hydroxyl groups. Conjugate groups of the invention include intercalators, reporter molecules, polyamines, polyamides, polyethylene glycols, polyethers, groups that enhance the pharmacodynamic properties of oligomers, and groups that enhance the pharmacokinetic properties of oligomers. Typical conjugate groups include cholesterols, lipids, phospholipids, biotin, phenazine, folate, phenanthridine, anthraquinone, acridine, fluoresceins, rhodamines, coumarins, and dyes. Groups that enhance the pharmacodynamic properties, in the context of this invention, include groups that improve uptake, enhance resistance to degradation, and/or strengthen sequence-specific hybridization with the target nucleic acid. Groups that enhance the pharmacokinetic properties, in the context of this invention, include groups that improve uptake, distribution, metabolism or excretion of the compounds of the present invention. Representative conjugate groups are disclosed in International Patent Application No. PCT/US92/09196, filed Oct. 23, 1992, and U.S. Pat. No. 6,287,860, which are incorporated herein by reference. Conjugate moieties include, but are not limited to, lipid moieties such as a cholesterol moiety, cholic acid, a thioether, e.g., hexyl-5-tritylthiol, a thiocholesterol, an aliphatic chain, e.g., dodecandiol or undecyl residues, a phospholipid, e.g., di-hexadecyl-rac-glycerol or triethylammonium 1,2-di-O-hexadecyl-rac-glycero-3-H-phosphonate, a polyamine or a polyethylene glycol chain, or adamantane acetic acid, a palmityl moiety, or an octadecylamine or hexylamino-carbonyl-oxy cholesterol moiety. See, e.g., U.S. Pat. Nos. 4,828,979; 4,948,882; 5,218,105; 5,525,465; 5,541,313; 5,545,730; 5,552,538; 5,578,717, 5,580,731; 5,580,731; 5,591,584; 5,109,124; 5,118,802; 5,138,045; 5,414,077; 5,486,603; 5,512,439; 5,578,718; 5,608,046; 4,587,044; 4,605,735; 4,667,025; 4,762,779; 4,789,737; 4,824,941; 4,835,263; 4,876,335; 4,904,582; 4,958,013; 5,082,830; 5,112,963; 5,214,136; 5,082,830; 5,112,963; 5,214,136; 5,245,022; 5,254,469; 5,258,506; 5,262,536; 5,272,250; 5,292,873; 5,317,098; 5,371,241, 5,391,723; 5,416,203, 5,451,463; 5,510,475; 5,512,667; 5,514,785; 5,565,552; 5,567,810; 5,574,142; 5,585,481; 5,587,371; 5,595,726; 5,597,696; 5,599,923; 5,599,928 and 5,688,941.

[0178] In some embodiments, single stranded oligonucleotide modification include modification of the 5′ or 3′ end of the oligonucleotide. In some embodiments, the 3′ end of the oligonucleotide comprises a hydroxyl group or a thiophosphate. It should be appreciated that additional molecules (e.g. a biotin moiety or a fluorophor) can be conjugated to the 5′ or 3′ end of the single stranded oligonucleotide. In some embodiments, the single stranded oligonucleotide comprises a biotin moiety conjugated to the 5′ nucleotide.

[0179] In some embodiments, the single stranded oligonucleotide comprises locked nucleic acids (LNA), ENA modified nucleotides, 2′-O-methyl nucleotides, or 2′-fluoro-deoxyribonucleotides. In some embodiments, the single stranded oligonucleotide comprises alternating deoxyribonucleotides and 2′-fluoro-deoxyribonucleotides. In some embodiments, the single stranded oligonucleotide comprises alternating deoxyribonucleotides and 2′-O-methyl nucleotides. In some embodiments, the single stranded oligonucleotide comprises alternating deoxyribonucleotides and ENA modified nucleotides. In some embodiments, the single stranded oligonucleotide comprises alternating deoxyribonucleotides and locked nucleic acid nucleotides. In some embodiments, the single stranded oligonucleotide comprises alternating locked nucleic acid nucleotides and 2′-O-methyl nucleotides.

[0180] In some embodiments, the 5′ nucleotide of the oligonucleotide is a deoxyribonucleotide. In some embodiments, the 5′ nucleotide of the oligonucleotide is a locked nucleic acid nucleotide. In some embodiments, the nucleotides of the oligonucleotide comprise deoxyribonucleotides flanked by at least one locked nucleic acid nucleotide on each of the 5′ and 3′ ends of the deoxyribonucleotides. In some embodiments, the nucleotide at the 3′ position of the oligonucleotide has a 3′ hydroxyl group or a 3′ thiophosphate.

[0181] In some embodiments, the single stranded oligonucleotide comprises phosphorothioate internucleotide linkages. In some embodiments, the single stranded oligonucleotide comprises phosphorothioate internucleotide linkages between at least two nucleotides. In some embodiments, the single stranded oligonucleotide comprises phosphorothioate internucleotide linkages between all nucleotides.

[0182] It should be appreciated that the single stranded oligonucleotide can have any combination of modifications as described herein.

[0183] The oligonucleotide may comprise a nucleotide sequence having one or more of the following modification patterns.

[0184] (a) (X)Xxxxxx, (X)xXxxxx, (X)xxXxxx, (X)xxxXxx, (X)xxxxXx and (X)xxxxxX,

[0185] (b) (X)XXxxxx, (X)XxXxxx, (X)XxxXxx, (X)XxxxXx, (X)XxxxxX, (X)xXXxxx, (X)xXxXxx, (X)xXxxXx, (X)xXxxxX, (X)xxXXxx, (X)xxXxXx, (X)xxXxxX, (X)xxxXXx, (X)xxxXxX and (X)xxxxXX,

[0186] (c) (X)XXXxxx, (X)xXXXxx, (X)xxXXXx, (X)xxxXXX, (X)XXxXxx, (X)XXxxXx, (X)XXxxxX, (X)xXXxXx, (X)xXXxxX, (X)xxXXxX, (X)XxXXxx, (X)XxxXXx (X)XxxxXX, (X)xXxXXx, (X)xXxxXX, (X)xxXxXX, (X)xXxXxX and (X)XxXxXx,

[0187] (d) (X)xxXXX, (X)xXxXXX, (X)xXXxXX, (X)xXXXxX, (X)xXXXXx, (X)XxxXXXX, (X)XxXxXX, (X)XxXXxX, (X)XxXXx, (X)XXxxXX, (X)XXxXxX, (X)XXxXXx, (X)XXXxxX, (X)XXXxXx, and (X)XXXXxx,

[0188] (e) (X)xXXXXX, (X)XxXXXX, (X)XXxXXX, (X)XXXxXX, (X)XXXXxX and (X)XXXXXx, and

[0189] (f) XXXXXX, XxXXXXX, XXxXXXX, XXXxXXX, XXXXxXX, XXXXXxX and XXXXXXx, in which “X” denotes a nucleotide analogue, (X) denotes an optional nucleotide analogue, and “x” denotes a DNA or RNA nucleotide unit. Each of the above listed patterns may appear one or more times within an oligonucleotide, alone or in combination with any of the other disclosed modification patterns.

### Methods for Modulating Gene Expression

[0190] In one aspect, the invention relates to methods for modulating gene expression in a cell (e.g., a cell for which levels of a target gene are reduced) for research purposes (e.g., to study the function of the gene in the cell). In another aspect, the invention relates to methods for modulating gene expression in a cell (e.g., a cell for which levels of a target gene are reduced) for gene or epigenetic therapy. The cells can be in vitro, ex vivo, or in vivo (e.g., in a subject who has a disease resulting from reduced expression or activity of the target gene. In some embodiments methods for modulating gene expression in a cell comprise delivering a single stranded oligonucleotide as described herein. In some embodiments, delivery of the single stranded oligonucleotide to the cell results in a level of expression of gene that is at least 5%, 10%, 20%, 30%, 40%, 50%, 60%, 70%, 80%, 90%, 100%, 200% or more greater than a level of expression of gene in a control cell to which the single stranded oligonucleotide has not been delivered. In certain embodiments, delivery of the single stranded oligonucleotide to the cell results in a level of expression of gene that is at least 50% greater than a level of expression of gene in a control cell to which the single stranded oligonucleotide has not been delivered.

[0191] In another aspect of the invention, methods comprise administering to a subject (e.g. a human) a composition comprising a single stranded oligonucleotide as described herein to increase protein levels in the subject. In some embodiments, the increase in protein levels is at least 5%, 10%, 20%, 30%, 40%, 50%, 60%, 70%, 80%, 90%, 100%, 200%, or more, higher than the amount of a protein in the subject before administering.

[0192] As another example, to increase expression of the target gene in a cell, the methods include introducing into the cell a single stranded oligonucleotide that is sufficiently complementary to a PRC2-associated region (e.g., of a long non-coding RNA) that maps to a genomic position encompassing or in proximity to the target gene.

[0193] In another aspect of the invention provides methods of treating a condition (e.g., a disease listed in Table 4) associated with decreased levels of expression of a target gene in a subject, the method comprising administering a single stranded oligonucleotide as described herein.

[0194] A subject can include a non-human mammal, e.g. mouse, rat, guinea pig, rabbit, cat, dog, goat, cow, or horse. In preferred embodiments, a subject is a human. Single stranded oligonucleotides have been employed as therapeutic moieties in the treatment of disease states in animals, including humans. Single stranded oligonucleotides can be useful therapeutic modalities that can be configured to be useful in treatment regimes for the treatment of cells, tissues and animals, especially humans.

[0195] For therapeutics, an animal, preferably a human, suspected of having a disease associated with reduced expression levels of the target gene is treated by administering single stranded oligonucleotide in accordance with this invention. For example, in one non-limiting embodiment, the methods comprise the step of administering to the animal in need of treatment, a therapeutically effective amount of a single stranded oligonucleotide as described herein.

### Formulation, Delivery, and Dosing

[0196] The oligonucleotides described herein can be formulated for administration to a subject for treating a condition (e.g., a disease of Table 4 or otherwise disclosed herein) associated with decreased levels of a target gene. It should be understood that the formulations, compositions and methods can be practiced with any of the oligonucleotides disclosed herein.

[0197] The formulations may conveniently be presented in unit dosage form and may be prepared by any methods well known in the art of pharmacy. The amount of active ingredient (e.g., an oligonucleotide or compound of the invention) which can be combined with a carrier material to produce a single dosage form will vary depending upon the host being treated, the particular mode of administration, e.g., intradermal or inhalation. The amount of active ingredient which can be combined with a carrier material to produce a single dosage form will generally be that amount of the compound which produces a therapeutic effect, e.g. tumor regression.

[0198] Pharmaceutical formulations of this invention can be prepared according to any method known to the art for the manufacture of pharmaceuticals. Such formulations can contain sweetening agents, flavoring agents, coloring agents and preserving agents. A formulation can be admixtured with nontoxic pharmaceutically acceptable excipients which are suitable for manufacture. Formulations may comprise one or more diluents, emulsifiers, preservatives, buffers, excipients, etc. and may be provided in such forms as liquids, powders, emulsions, lyophilized powders, sprays, creams, lotions, controlled release formulations, tablets, pills, gels, on patches, in implants, etc.

[0199] A formulated single stranded oligonucleotide composition can assume a variety of states. In some examples, the composition is at least partially crystalline, uniformly crystalline, and/or anhydrous (e.g., less than 80, 50, 30, 20, or 10% water). In another example, the single stranded oligonucleotide is in an aqueous phase, e.g., in a solution that includes water. The aqueous phase or the crystalline compositions can, e.g., be incorporated into a delivery vehicle, e.g., a liposome (particularly for the aqueous phase) or a particle (e.g., a microparticle as can be appropriate for a crystalline composition). Generally, the single stranded oligonucleotide composition is formulated in a manner that is compatible with the intended method of administration.

[0200] In some embodiments, the composition is prepared by at least one of the following methods: spray drying, lyophilization, vacuum drying, evaporation, fluid bed drying, or a combination of these techniques; or sonication with a lipid, freeze-drying, condensation and other self-assembly.

[0201] A single stranded oligonucleotide preparation can be formulated or administered (together or separately) in combination with another agent, e.g., another therapeutic agent or an agent that stabilizes a single stranded oligonucleotide, e.g., a protein that complexes with single stranded oligonucleotide. Still other agents include chelators, e.g., EDTA (e.g., to remove divalent cations such as Mg²⁺), salts, RNAse inhibitors (e.g., a broad specificity RNAse inhibitor such as RNAsin) and so forth.

[0202] In one embodiment, the single stranded oligonucleotide preparation includes another single stranded oligonucleotide, e.g., a second single stranded oligonucleotide that modulates expression of a second gene or a second single stranded oligonucleotide that modulates expression of the first gene. Still other preparation can include at least 3, 5, ten, twenty, fifty, or a hundred or more different single stranded oligonucleotide species. Such single stranded oligonucleotides can mediated gene expression with respect to a similar number of different genes. In one embodiment, the single stranded oligonucleotide preparation includes at least a second therapeutic agent (e.g., an agent other than an oligonucleotide).

### Route of Delivery

[0203] A composition that includes a single stranded oligonucleotide can be delivered to a subject by a variety of routes. Exemplary routes include: intravenous, intradermal, topical, rectal, parenteral, anal, intravaginal, intranasal, pulmonary, ocular. The term “therapeutically effective amount” is the amount of oligonucleotide present in the composition that is needed to provide the desired level of target gene expression in the subject to be treated to give the anticipated physiological response. The term “physiologically effective amount” is that amount delivered to a subject to give the desired palliative or curative effect. The term “pharmaceutically acceptable carrier” means that the carrier can be administered to a subject with no significant adverse toxicological effects to the subject.

[0204] The single stranded oligonucleotide molecules of the invention can be incorporated into pharmaceutical compositions suitable for administration. Such compositions typically include one or more species of single stranded oligonucleotide and a pharmaceutically acceptable carrier. As used herein the language “pharmaceutically acceptable carrier” is intended to include any and all solvents, dispersion media, coatings, antibacterial and antifungal agents, isotonic and absorption delaying agents, and the like, compatible with pharmaceutical administration. The use of such media and agents for pharmaceutically active substances is well known in the art. Except insofar as any conventional media or agent is incompatible with the active compound, use thereof in the compositions is contemplated. Supplementary active compounds can also be incorporated into the compositions.

[0205] The pharmaceutical compositions of the present invention may be administered in a number of ways depending upon whether local or systemic treatment is desired and upon the area to be treated. Administration may be topical (including ophthalmic, vaginal, rectal, intranasal, transdermal), oral or parenteral. Parenteral administration includes intravenous drip, subcutaneous, intraperitoneal or intramuscular injection, or intrathecal or intraventricular administration.

[0206] The route and site of administration may be chosen to enhance targeting. For example, to target muscle cells, intramuscular injection into the muscles of interest would be a logical choice. Lung cells might be targeted by administering the single stranded oligonucleotide in aerosol form. The vascular endothelial cells could be targeted by coating a balloon catheter with the single stranded oligonucleotide and mechanically introducing the oligonucleotide.

[0207] Topical administration refers to the delivery to a subject by contacting the formulation directly to a surface of the subject. The most common form of topical delivery is to the skin, but a composition disclosed herein can also be directly applied to other surfaces of the body, e.g., to the eye, a mucous membrane, to surfaces of a body cavity or to an internal surface. As mentioned above, the most common topical delivery is to the skin. The term encompasses several routes of administration including, but not limited to, topical and transdermal. These modes of administration typically include penetration of the skin's permeability barrier and efficient delivery to the target tissue or stratum. Topical administration can be used as a means to penetrate the epidermis and dermis and ultimately achieve systemic delivery of the composition. Topical administration can also be used as a means to selectively deliver oligonucleotides to the epidermis or dermis of a subject, or to specific strata thereof, or to an underlying tissue.

[0208] Formulations for topical administration may include transdermal patches, ointments, lotions, creams, gels, drops, suppositories, sprays, liquids and powders. Conventional pharmaceutical carriers, aqueous, powder or oily bases, thickeners and the like may be necessary or desirable. Coated condoms, gloves and the like may also be useful.

[0209] Transdermal delivery is a valuable route for the administration of lipid soluble therapeutics. The dermis is more permeable than the epidermis and therefore absorption is much more rapid through abraded, burned or denuded skin. Inflammation and other physiologic conditions that increase blood flow to the skin also enhance transdermal adsorption. Absorption via this route may be enhanced by the use of an oily vehicle (inunction) or through the use of one or more penetration enhancers. Other effective ways to deliver a composition disclosed herein via the transdermal route include hydration of the skin and the use of controlled release topical patches. The transdermal route provides a potentially effective means to deliver a composition disclosed herein for systemic and/or local therapy. In addition, iontophoresis (transfer of ionic solutes through biological membranes under the influence of an electric field), phonophoresis or sonophoresis (use of ultrasound to enhance the absorption of various therapeutic agents across biological membranes, notably the skin and the cornea), and optimization of vehicle characteristics relative to dose position and retention at the site of administration may be useful methods for enhancing the transport of topically applied compositions across skin and mucosal sites.

[0210] Both the oral and nasal membranes offer advantages over other routes of administration. For example, oligonucleotides administered through these membranes may have a rapid onset of action, provide therapeutic plasma levels, avoid first pass effect of hepatic metabolism, and avoid exposure of the oligonucleotides to the hostile gastrointestinal (GI) environment. Additional advantages include easy access to the membrane sites so that the oligonucleotide can be applied, localized and removed easily.

[0211] In oral delivery, compositions can be targeted to a surface of the oral cavity, e.g., to sublingual mucosa which includes the membrane of ventral surface of the tongue and the floor of the mouth or the buccal mucosa which constitutes the lining of the cheek. The sublingual mucosa is relatively permeable thus giving rapid absorption and acceptable bioavailability of many agents. Further, the sublingual mucosa is convenient, acceptable and easily accessible.

[0212] A pharmaceutical composition of single stranded oligonucleotide may also be administered to the buccal cavity of a human being by spraying into the cavity, without inhalation, from a metered dose spray dispenser, a mixed micellar pharmaceutical formulation as described above and a propellant. In one embodiment, the dispenser is first shaken prior to spraying the pharmaceutical formulation and propellant into the buccal cavity.

[0213] Compositions for oral administration include powders or granules, suspensions or solutions in water, syrups, slurries, emulsions, elixirs or non-aqueous media, tablets, capsules, lozenges, or troches. In the case of tablets, carriers that can be used include lactose, sodium citrate and salts of phosphoric acid. Various disintegrants such as starch, and lubricating agents such as magnesium stearate, sodium lauryl sulfate and talc, are commonly used in tablets. For oral administration in capsule form, useful diluents are lactose and high molecular weight polyethylene glycols. When aqueous suspensions are required for oral use, the nucleic acid compositions can be combined with emulsifying and suspending agents. If desired, certain sweetening and/or flavoring agents can be added.

[0214] Parenteral administration includes intravenous drip, subcutaneous, intraperitoneal or intramuscular injection, intrathecal or intraventricular administration. In some embodiments, parental administration involves administration directly to the site of disease (e.g. injection into a tumor).

[0215] Formulations for parenteral administration may include sterile aqueous solutions which may also contain buffers, diluents and other suitable additives. Intraventricular injection may be facilitated by an intraventricular catheter, for example, attached to a reservoir. For intravenous use, the total concentration of solutes should be controlled to render the preparation isotonic.

[0216] Any of the single stranded oligonucleotides described herein can be administered to ocular tissue. For example, the compositions can be applied to the surface of the eye or nearby tissue, e.g., the inside of the eyelid. For ocular administration, ointments or droppable liquids may be delivered by ocular delivery systems known to the art such as applicators or eye droppers. Such compositions can include mucomimetics such as hyaluronic acid, chondroitin sulfate, hydroxypropyl methylcellulose or poly(vinyl alcohol), preservatives such as sorbic acid, EDTA or benzylchronium chloride, and the usual quantities of diluents and/or carriers. The single stranded oligonucleotide can also be administered to the interior of the eye, and can be introduced by a needle or other delivery device which can introduce it to a selected area or structure.

[0217] Pulmonary delivery compositions can be delivered by inhalation by the patient of a dispersion so that the composition, preferably single stranded oligonucleotides, within the dispersion can reach the lung where it can be readily absorbed through the alveolar region directly into blood circulation. Pulmonary delivery can be effective both for systemic delivery and for localized delivery to treat diseases of the lungs.

[0218] Pulmonary delivery can be achieved by different approaches, including the use of nebulized, aerosolized, micellular and dry powder-based formulations. Delivery can be achieved with liquid nebulizers, aerosol-based inhalers, and dry powder dispersion devices. Metered-dose devices are preferred. One of the benefits of using an atomizer or inhaler is that the potential for contamination is minimized because the devices are self-contained. Dry powder dispersion devices, for example, deliver agents that may be readily formulated as dry powders. A single stranded oligonucleotide composition may be stably stored as lyophilized or spray-dried powders by itself or in combination with suitable powder carriers. The delivery of a composition for inhalation can be mediated by a dosing timing element which can include a timer, a dose counter, time measuring device, or a time indicator which when incorporated into the device enables dose tracking, compliance monitoring, and/or dose triggering to a patient during administration of the aerosol medicament.

[0219] The term “powder” means a composition that consists of finely dispersed solid particles that are free flowing and capable of being readily dispersed in an inhalation device and subsequently inhaled by a subject so that the particles reach the lungs to permit penetration into the alveoli. Thus, the powder is said to be “respirable.” Preferably the average particle size is less than about 10 μm in diameter preferably with a relatively uniform spheroidal shape distribution. More preferably the diameter is less than about 7.5 μm and most preferably less than about 5.0 μm. Usually the particle size distribution is between about 0.1 μm and about 5 μm in diameter, particularly about 0.3 μm to about 5 μm.

[0220] The term “dry” means that the composition has a moisture content below about 10% by weight (% w) water, usually below about 5% w and preferably less it than about 3% w. A dry composition can be such that the particles are readily dispersible in an inhalation device to form an aerosol.

[0221] The types of pharmaceutical excipients that are useful as carrier include stabilizers such as human serum albumin (HSA), bulking agents such as carbohydrates, amino acids and polypeptides; pH adjusters or buffers; salts such as sodium chloride; and the like. These carriers may be in a crystalline or amorphous form or may be a mixture of the two.

[0222] Suitable pH adjusters or buffers include organic salts prepared from organic acids and bases, such as sodium citrate, sodium ascorbate, and the like; sodium citrate is preferred. Pulmonary administration of a micellar single stranded oligonucleotide formulation may be achieved through metered dose spray devices with propellants such as tetrafluoroethane, heptafluoroethane, dimethylfluoropropane, tetrafluoropropane, butane, isobutane, dimethyl ether and other non-CFC and CFC propellants.

[0223] Exemplary devices include devices which are introduced into the vasculature, e.g., devices inserted into the lumen of a vascular tissue, or which devices themselves form a part of the vasculature, including stents, catheters, heart valves, and other vascular devices. These devices, e.g., catheters or stents, can be placed in the vasculature of the lung, heart, or leg.

[0224] Other devices include non-vascular devices, e.g., devices implanted in the peritoneum, or in organ or glandular tissue, e.g., artificial organs. The device can release a therapeutic substance in addition to a single stranded oligonucleotide, e.g., a device can release insulin.

[0225] In one embodiment, unit doses or measured doses of a composition that includes single stranded oligonucleotide are dispensed by an implanted device. The device can include a sensor that monitors a parameter within a subject. For example, the device can include pump, e.g., and, optionally, associated electronics.

[0226] Tissue, e.g., cells or organs can be treated with a single stranded oligonucleotide, ex vivo and then administered or implanted in a subject. The tissue can be autologous, allogeneic, or xenogeneic tissue. E.g., tissue can be treated to reduce graft v. host disease. In other embodiments, the tissue is allogeneic and the tissue is treated to treat a disorder characterized by unwanted gene expression in that tissue. E.g., tissue, e.g., hematopoietic cells, e.g., bone marrow hematopoietic cells, can be treated to inhibit unwanted cell proliferation. Introduction of treated tissue, whether autologous or transplant, can be combined with other therapies. In some implementations, the single stranded oligonucleotide treated cells are insulated from other cells, e.g., by a semi-permeable porous barrier that prevents the cells from leaving the implant, but enables molecules from the body to reach the cells and molecules produced by the cells to enter the body. In one embodiment, the porous barrier is formed from alginate.

[0227] In one embodiment, a contraceptive device is coated with or contains a single stranded oligonucleotide. Exemplary devices include condoms, diaphragms, IUD (implantable uterine devices, sponges, vaginal sheaths, and birth control devices.

### Dosage

[0228] In one aspect, the invention features a method of administering a single stranded oligonucleotide (e.g., as a compound or as a component of a composition) to a subject (e.g., a human subject). In one embodiment, the unit dose is between about 10 mg and 25 mg per kg of bodyweight. In one embodiment, the unit dose is between about 1 mg and 100 mg per kg of bodyweight. In one embodiment, the unit dose is between about 0.1 mg and 500 mg per kg of bodyweight. In some embodiments, the unit dose is more than 0.001, 0.005, 0.01, 0.05, 0.1, 0.5, 1, 2, 5, 10, 25, 50 or 100 mg per kg of bodyweight.

[0229] The defined amount can be an amount effective to treat or prevent a disease or disorder, e.g., a disease or disorder associated with the target gene. The unit dose, for example, can be administered by injection (e.g., intravenous or intramuscular), an inhaled dose, or a topical application.

[0230] In some embodiments, the unit dose is administered daily. In some embodiments, less frequently than once a day, e.g., less than every 2, 4, 8 or 30 days. In another embodiment, the unit dose is not administered with a frequency (e.g., not a regular frequency). For example, the unit dose may be administered a single time. In some embodiments, the unit dose is administered more than once a day, e.g., once an hour, two hours, four hours, eight hours, twelve hours, etc.

[0231] In one embodiment, a subject is administered an initial dose and one or more maintenance doses of a single stranded oligonucleotide. The maintenance dose or doses are generally lower than the initial dose, e.g., one-half less of the initial dose. A maintenance regimen can include treating the subject with a dose or doses ranging from 0.0001 to 100 mg/kg of body weight per day, e.g., 100, 10, 1, 0.1, 0.01, 0.001, or 0.0001 mg per kg of bodyweight per day. The maintenance doses may be administered no more than once every 1, 5, 10, or 30 days. Further, the treatment regimen may last for a period of time which will vary depending upon the nature of the particular disease, its severity and the overall condition of the patient. In some embodiments the dosage may be delivered no more than once per day, e.g., no more than once per 24, 36, 48, or more hours, e.g., no more than once for every 5 or 8 days. Following treatment, the patient can be monitored for changes in his condition and for alleviation of the symptoms of the disease state. The dosage of the oligonucleotide may either be increased in the event the patient does not respond significantly to current dosage levels, or the dose may be decreased if an alleviation of the symptoms of the disease state is observed, if the disease state has been ablated, or if undesired side-effects are observed.

[0232] The effective dose can be administered in a single dose or in two or more doses, as desired or considered appropriate under the specific circumstances. If desired to facilitate repeated or frequent infusions, implantation of a delivery device, e.g., a pump, semi-permanent stent (e.g., intravenous, intraperitoneal, intracisternal or intracapsular), or reservoir may be advisable.

[0233] In some embodiments, the oligonucleotide pharmaceutical composition includes a plurality of single stranded oligonucleotide species. In another embodiment, the single stranded oligonucleotide species has sequences that are non-overlapping and non-adjacent to another species with respect to a naturally occurring target sequence (e.g., a PRC2-associated region). In another embodiment, the plurality of single stranded oligonucleotide species is specific for different PRC2-associated regions. In another embodiment, the single stranded oligonucleotide is allele specific. In some cases, a patient is treated with a single stranded oligonucleotide in conjunction with other therapeutic modalities.

[0234] Following successful treatment, it may be desirable to have the patient undergo maintenance therapy to prevent the recurrence of the disease state, wherein the compound of the invention is administered in maintenance doses, ranging from 0.0001 mg to 100 mg per kg of body weight.

[0235] The concentration of the single stranded oligonucleotide composition is an amount sufficient to be effective in treating or preventing a disorder or to regulate a physiological condition in humans. The concentration or amount of single stranded oligonucleotide administered will depend on the parameters determined for the agent and the method of administration, e.g. nasal, buccal, pulmonary. For example, nasal formulations may tend to require much lower concentrations of some ingredients in order to avoid irritation or burning of the nasal passages. It is sometimes desirable to dilute an oral formulation up to 10-100 times in order to provide a suitable nasal formulation.

[0236] Certain factors may influence the dosage required to effectively treat a subject, including but not limited to the severity of the disease or disorder, previous treatments, the general health and/or age of the subject, and other diseases present. Moreover, treatment of a subject with a therapeutically effective amount of a single stranded oligonucleotide can include a single treatment or, preferably, can include a series of treatments. It will also be appreciated that the effective dosage of a single stranded oligonucleotide used for treatment may increase or decrease over the course of a particular treatment. For example, the subject can be monitored after administering a single stranded oligonucleotide composition. Based on information from the monitoring, an additional amount of the single stranded oligonucleotide composition can be administered.

[0237] Dosing is dependent on severity and responsiveness of the disease condition to be treated, with the course of treatment lasting from several days to several months, or until a cure is effected or a diminution of disease state is achieved. Optimal dosing schedules can be calculated from measurements of target gene expression levels in the body of the patient. Persons of ordinary skill can easily determine optimum dosages, dosing methodologies and repetition rates. Optimum dosages may vary depending on the relative potency of individual compounds, and can generally be estimated based on EC50s found to be effective in in vitro and in vivo animal models. In some embodiments, the animal models include transgenic animals that express a human target gene. In another embodiment, the composition for testing includes a single stranded oligonucleotide that is complementary, at least in an internal region, to a sequence that is conserved between a target gene in the animal model and the target gene in a human.

[0238] In one embodiment, the administration of the single stranded oligonucleotide composition is parenteral, e.g. intravenous (e.g., as a bolus or as a diffusible infusion), intradermal, intraperitoneal, intramuscular, intrathecal, intraventricular, intracranial, subcutaneous, transmucosal, buccal, sublingual, endoscopic, rectal, oral, vaginal, topical, pulmonary, intranasal, urethral or ocular. Administration can be provided by the subject or by another person, e.g., a health care provider. The composition can be provided in measured doses or in a dispenser which delivers a metered dose. Selected modes of delivery are discussed in more detail below.

### Kits

[0239] In certain aspects of the invention, kits are provided, comprising a container housing a composition comprising a single stranded oligonucleotide. In some embodiments, the composition is a pharmaceutical composition comprising a single stranded oligonucleotide and a pharmaceutically acceptable carrier. In some embodiments, the individual components of the pharmaceutical composition may be provided in one container. Alternatively, it may be desirable to provide the components of the pharmaceutical composition separately in two or more containers, e.g., one container for single stranded oligonucleotides, and at least another for a carrier compound. The kit may be packaged in a number of different configurations such as one or more containers in a single box. The different components can be combined, e.g., according to instructions provided with the kit. The components can be combined according to a method described herein, e.g., to prepare and administer a pharmaceutical composition. The kit can also include a delivery device.

[0240] The present invention is further illustrated by the following Examples, which in no way should be construed as further limiting. The entire contents of all of the references (including literature references, issued patents, published patent applications, and co-pending patent applications) cited throughout this application are hereby expressly incorporated by reference.

### Examples

[0241] The invention is further described in the following examples, which do not limit the scope of the invention described in the claims.

### Materials and Methods:

### Real Time PCR

[0242] RNA was harvested from the cells using Promega SV 96 Total RNA Isolation system or Trizol omitting the DNAse step. In separate pilot experiments, 50 ng of RNA was determined to be sufficient template for the reverse transcriptase reaction. RNA harvested from cells was normalized so that 50 ng of RNA was input to each reverse transcription reaction. For the few samples that were too dilute to reach this limit, the maximum input volume was added. Reverse transcriptase reaction was performed using the Superscript II kit and real time PCR performed on cDNA samples using icycler SYBR green chemistry (Biorad). A baseline level of mRNA expression for each target gene was determined through quantitative PCR as outlined above. Baseline levels were also determined for mRNA of various housekeeping genes which are constitutively expressed. A “control” housekeeping gene with approximately the same level of baseline expression as the target gene was chosen for comparison purposes.

### ELISA

[0243] An ELISA assay using a commercially available kit [DEP00, RnD Systems] was used according to the manufacturer's instructions to determine secreted protein present in cellular supernatant. Fold induction of protein was determined by normalizing protein levels induced by oligonucleotides to the protein levels induced by control (Lipofectamine alone).

### Cell Culture

[0244] Human hepatocyte Hep3B, human hepatocyte HepG2 cells, mouse hepatoma Hepa1-6 cells, and human renal proximal tubule epithelial cells (RPTEC) were cultured using conditions known in the art (see, e.g. Current Protocols in Cell Biology). Details of the cell lines used in the experiments described herein are provided in Table 7.

TABLE 7
Cell lines

| Cell | | | | | | | Culture |
|---|---|---|---|---|---|---|---|
| line | Source | Species | Gender | Cell Type | Tissue | Status | Conditions |
| Hep3B | ATCC | human | M | hepatocytes | liver | immortalized | Eagle's MEM + |
| | | | | | | | 10% FBS |
| RPTEC | Lonza | human | N/A | proximal | kidney | primary | Clonetics ™ |
| | | | | tubule | | | REGM ™ |
| | | | | epithelial | | | BulletKit ™ |
| | | | | cells | | | (CC-3190) |

### Oligonucleotide Design

[0245] Oligonucleotides were designed within PRC2-interacting regions in order to upregulate target genes listed in Table 4. The sequence and structure of each oligonucleotide is shown in Table 2 or Table 6. The following table provides a description of the nucleotide analogs, modifications and intranucleotide linkages used for certain oligonucleotides tested and described in Table 2 or Table 6.

TABLE 3
Oligonucleotide Modifications

| Symbol | Feature Description |
|---|---|
| bio | 5′ biotin |
| dAs | DNA w/3′ thiophosphate |
| dCs | DNA w/3′ thiophosphate |
| dGs | DNA w/3′ thiophosphate |
| dTs | DNA w/3′ thiophosphate |
| dG | DNA |
| enaAs | ENA w/3′ thiophosphate |
| enaCs | ENA w/3′ thiophosphate |
| enaGs | ENA w/3′ thiophosphate |
| enaTs | ENA w/3′ thiophosphate |
| fluAs | 2′-fluoro w/3′ thiophosphate |
| fluCs | 2′-fluoro w/3′ thiophosphate |
| fluGs | 2′-fluoro w/3′ thiophosphate |
| fluUs | 2′-fluoro w/3′ thiophosphate |
| lnaAs | LNA w/3′ thiophosphate |
| lnaCs | LNA w/3′ thiophosphate |
| lnaGs | LNA w/3′ thiophosphate |
| lnaTs | LNA w/3′ thiophosphate |
| omeAs | 2′-OMe w/3′ thiophosphate |
| omeCs | 2′-OMe w/3′ thiophosphate |
| omeGs | 2′-OMe w/3′ thiophosphate |
| omeTs | 2′-OMe w/3′ thiophosphate |
| lnaAs-Sup | LNA w/3′ thiophosphate at 3′ terminus |
| lnaCs-Sup | LNA w/3′ thiophosphate at 3′ terminus |
| lnaGs-Sup | LNA w/3′ thiophosphate at 3′ terminus |
| lnaTs-Sup | LNA w/3′ thiophosphate at 3′ terminus |
| lnaA-Sup | LNA w/3′ OH at 3′ terminus |
| lnaC-Sup | LNA w/3′ OH at 3′ terminus |
| lnaG-Sup | LNA w/3′ OH at 3′ terminus |
| lnaT-Sup | LNA w/3′ OH at 3′ terminus |
| omeA-Sup | 2′-OMe w/3′ OH at 3′ terminus |
| omeC-Sup | 2′-OMe w/3′ OH at 3′ terminus |
| omeG-Sup | 2′-OMe w/3′ OH at 3′ terminus |
| omeU-Sup | 2′-OMe w/3′ OH at 3′ terminus |
| dAs-Sup | DNA w/3′ thiophosphate at 3′ terminus |
| dCs-Sup | DNA w/3′ thiophosphate at 3′ terminus |
| dGs-Sup | DNA w/3′ thiophosphate at 3′ terminus |
| dTs-Sup | DNA w/3′ thiophosphate at 3′ terminus |
| dA-Sup | DNA w/3′ OH at 3′ terminus |
| dC-Sup | DNA w/3′ OH at 3′ terminus |
| dG-Sup | DNA w/3′ OH at 3′ terminus |
| dT-Sup | DNA w/3′ OH at 3′ terminus |

In Vitro Transfection of Cells with Oligonucleotides

[0246] Cells were seeded into each well of 24-well plates at a density of 25,000 cells per 500 uL and transfections were performed with Lipofectamine and the single stranded oligonucleotides. Control wells contained Lipofectamine alone. At 48 hours post-transfection, approximately 200 uL of cell culture supernatants were stored at −80 C for ELISA. At 48 hours post-transfection, RNA was harvested from the cells and quantitative PCR was carried out as outlined above. The percent induction of target mRNA expression by each oligonucleotide was determined by normalizing mRNA levels in the presence of the oligonucleotide to the mRNA levels in the presence of control (Lipofectamine alone). This was compared side-by-side with the increase in mRNA expression of the “control” housekeeping gene.

### Results:

### In Vitro Delivery of Single Stranded Oligonucleotides Upregulated Gene Expression

[0247] Oligonucleotides were designed as candidates for upregulating gene expression of target genes listed in Table 4. Single stranded oligonucleotides were designed to be complementary to a PRC2-interacting region. The oligonucleotides were tested in at least duplicate. The sequence and structural features of the oligonucleotides are set forth in Table 2 or Table 6. Briefly, cells were transfected in vitro with the oligonucleotides as described above. Gene or expression in cells or protein levels following treatment was evaluated by qRT-PCR or ELISA. Oligonucleotides that upregulated expression of target genes listed in Table 4 were identified. Further details are outlined in Table 2 and Table 6.

### Tables

Lengthy table referenced here
US20150232836A1-20150820-T00001
Please refer to the end of the specification for access instructions.

Lengthy table referenced here
US20150232836A1-20150820-T00002
Please refer to the end of the specification for access instructions.

Lengthy table referenced here
US20150232836A1-20150820-T00003
Please refer to the end of the specification for access instructions.

Lengthy table referenced here
US20150232836A1-20150820-T00004
Please refer to the end of the specification for access instructions.

### BRIEF DESCRIPTION OF THE SEQUENCE LISTING

| SEQ | | | | | |
|---|---|---|---|---|---|
| ID | Chrom | Gene | Chr. Start | Chr. End | Strand |
| 1 | chr2 | BCL2L11 | 111866490 | 111938022 | + |
| 2 | chr2 | BCL2L11 | 111866490 | 111938022 | − |
| 3 | chr2 | Bcl2l11 | 127939773 | 128000283 | + |
| 4 | chr2 | Bcl2l11 | 127939773 | 128000283 | − |
| 5 | chr17 | BRCA1 | 41184311 | 41289340 | − |
| 6 | chr17 | BRCA1 | 41184311 | 41289340 | + |
| 7 | chr11 | Brca1 | 101338077 | 101425269 | − |
| 8 | chr11 | Brca1 | 101338077 | 101425269 | + |
| 9 | chrX | F8 | 154052063 | 154126577 | − |
| 10 | chrX | F8 | 154052063 | 154126577 | + |
| 11 | chrX | F8 | 72406055 | 72637380 | − |
| 12 | chrX | F8 | 72406055 | 72637380 | + |
| 13 | chr11 | FLI1 | 128551812 | 128695162 | + |
| 14 | chr11 | FLI1 | 128551812 | 128695162 | − |
| 15 | chr9 | Fli1 | 32217792 | 32360953 | − |
| 16 | chr9 | Fli1 | 32217792 | 32360953 | + |
| 17 | chrX | FMR1 | 146981468 | 147044647 | + |
| 18 | chrX | FMR1 | 146981468 | 147044647 | − |
| 19 | chrX | Fmr1 | 65919729 | 65983136 | + |
| 20 | chrX | Fmr1 | 65919729 | 65983136 | − |
| 21 | chr1 | FNDC5 | 33315868 | 33348414 | − |
| 22 | chr1 | FNDC5 | 33315868 | 33348414 | + |
| 23 | chr4 | Fndc5 | 128802303 | 128833837 | + |
| 24 | chr4 | Fndc5 | 128802303 | 128833837 | − |
| 25 | chr7 | GCK | 44171869 | 44210887 | − |
| 26 | chr7 | GCK | 44171869 | 44210887 | + |
| 27 | chr11 | Gck | 5788825 | 5861602 | − |
| 28 | chr11 | Gck | 5788825 | 5861602 | + |
| 29 | chr6 | GLP1R | 39004556 | 39067520 | + |
| 30 | chr6 | GLP1R | 39004556 | 39067520 | − |
| 31 | chr17 | Glp1r | 31026811 | 31085455 | + |
| 32 | chr17 | Glp1r | 31026811 | 31085455 | − |
| 33 | chr17 | GRN | 42410490 | 42442470 | + |
| 34 | chr17 | GRN | 42410490 | 42442470 | − |
| 35 | chr11 | Grn | 102279635 | 102310123 | + |
| 36 | chr11 | Grn | 102279635 | 102310123 | − |
| 37 | chr19 | HAMP | 35761409 | 35788045 | + |
| 38 | chr19 | HAMP | 35761409 | 35788045 | − |
| 39 | chr7 | Hamp | 31715387 | 31741036 | − |
| 40 | chr7 | Hamp | 31715387 | 31741036 | + |
| 41 | chrX | Hprt | 50329254 | 50386837 | + |
| 42 | chrX | Hprt | 50329254 | 50386837 | − |
| 43 | chrX | HPRT1 | 133582174 | 133646698 | + |
| 44 | chrX | HPRT1 | 133582174 | 133646698 | − |
| 45 | chr8 | IDO1 | 39759327 | 39798309 | + |
| 46 | chr8 | IDO1 | 39759327 | 39798309 | − |
| 47 | chr8 | Ido1 | 25682612 | 25719481 | − |
| 48 | chr8 | Ido1 | 25682612 | 25719481 | + |
| 49 | chr12 | IGF1 | 102799453 | 102886378 | − |
| 50 | chr12 | IGF1 | 102799453 | 102886378 | + |
| 51 | chr10 | Igf1 | 87311855 | 87390515 | + |
| 52 | chr10 | Igf1 | 87311855 | 87390515 | − |
| 53 | chr1 | IL10 | 206928947 | 206957839 | − |
| 54 | chr1 | IL10 | 206928947 | 206957839 | + |
| 55 | chr1 | Il10 | 132904421 | 132933547 | + |
| 56 | chr1 | Il10 | 132904421 | 132933547 | − |
| 57 | chr19 | LDLR | 11188037 | 11256505 | + |
| 58 | chr19 | LDLR | 11188037 | 11256505 | − |
| 59 | chr9 | Ldlr | 21516037 | 21566362 | + |
| 60 | chr9 | Ldlr | 21516037 | 21566362 | − |
| 61 | chr12 | NANOG | 7929994 | 7960655 | + |
| 62 | chr12 | NANOG | 7929994 | 7960655 | − |
| 63 | chr6 | Nanog | 122645585 | 122675796 | + |
| 64 | chr6 | Nanog | 122645585 | 122675796 | − |
| 65 | chr1 | PTGS2 | 186628943 | 186661559 | − |
| 66 | chr1 | PTGS2 | 186628943 | 186661559 | + |
| 67 | chr1 | Ptgs2 | 151935253 | 151967142 | + |
| 68 | chr1 | Ptgs2 | 151935253 | 151967142 | − |
| 69 | chr13 | RB1 | 48865882 | 49068026 | + |
| 70 | chr13 | RB1 | 48865882 | 49068026 | − |
| 71 | chr14 | Rb1 | 73583308 | 73737598 | − |
| 72 | chr14 | Rb1 | 73583308 | 73737598 | + |
| 73 | chr17 | SERPINF1 | 1653258 | 1692859 | + |
| 74 | chr17 | SERPINF1 | 1653258 | 1692859 | − |
| 75 | chr11 | Serpinf1 | 75211530 | 75248125 | − |
| 76 | chr11 | Serpinf1 | 75211530 | 75248125 | + |
| 77 | chr10 | SIRT1 | 69632426 | 69690147 | + |
| 78 | chr10 | SIRT1 | 69632426 | 69690147 | − |
| 79 | chr10 | Sirt1 | 62769752 | 62813780 | − |
| 80 | chr10 | Sirt1 | 62769752 | 62813780 | + |
| 81 | chr19 | SIRT6 | 4162105 | 4194596 | − |
| 82 | chr19 | SIRT6 | 4162105 | 4194596 | + |
| 83 | chr10 | Sirt6 | 81072530 | 81102353 | − |
| 84 | chr10 | Sirt6 | 81072530 | 81102353 | + |
| 85 | chr18 | SMAD7 | 46434222 | 46489081 | − |
| 86 | chr18 | SMAD7 | 46434222 | 46489081 | + |
| 87 | chr18 | Smad7 | 75515018 | 75567588 | + |
| 88 | chr18 | Smad7 | 75515018 | 75567588 | − |
| 89 | chr7 | ST7 | 116581380 | 116875961 | + |
| 90 | chr7 | ST7 | 116581380 | 116875961 | − |
| 91 | chr6 | St7 | 17687215 | 17905022 | + |
| 92 | chr6 | St7 | 17687215 | 17905022 | − |
| 93 | chr17 | STAT3 | 40453342 | 40552405 | − |
| 94 | chr17 | STAT3 | 40453342 | 40552405 | + |
| 95 | chr11 | Stat3 | 100736123 | 100812825 | − |
| 96 | chr11 | Stat3 | 100736123 | 100812825 | + |
| 815175 | chr7 | CFTR | 117108016 | 117320718 | + |
| 815176 | chr7 | CFTR | 117108016 | 117320718 | − |
| 815177 | chr6 | Cftr | 18108686 | 18284769 | + |
| 815178 | chr6 | Cftr | 18108686 | 18284769 | − |
| 868590 | chr12 | PAH | 103220103 | 103323381 | − |
| 868591 | chr12 | PAH | 103220103 | 103323381 | + |
| 868592 | chr10 | Pah | 86972539 | 87058882 | + |
| 868593 | chr10 | Pah | 86972539 | 87058882 | − |
| 899865 | chr12 | CEP290 | 88430789 | 88547993 | − |
| 899866 | chr12 | CEP290 | 88430789 | 88547993 | + |
| 899867 | chr10 | Cep290 | 99938922 | 100048289 | + |
| 899868 | chr10 | Cep290 | 99938922 | 100048289 | − |
| 962801 | chr9 | CD274 | 5438502 | 5482567 | + |
| 962802 | chr9 | CD274 | 5438502 | 5482567 | − |
| 962803 | chr19 | Cd274 | 29429927 | 29474584 | + |
| 962804 | chr19 | Cd274 | 29429927 | 29474584 | − |
| 981187 | ADIPOQ | chr3 | 186548463 | 186588252 | + |
| 981188 | ADIPOQ | chr3 | 186548463 | 186588252 | − |
| 981189 | Adipoq | chr16 | 23134609 | 23170041 | + |
| 981190 | Adipoq | chr16 | 23134609 | 23170041 | − |

### PRC2 Associated Regions and Target Genes

| | | | | Target Gene (same strand | Target Gene (opposite strand |
|---|---|---|---|---|---|
| SeqID | Chrom | Chr. Start | Chr. End | match) | match) |
| 97 | chr1 | 33321540 | 33321585 | FNDC5(252995)[−6283] | S100PBP(64766)[45] |
| 98 | chr1 | 33327956 | 33328002 | FNDC5(252995)[46] | S100PBP(64766)[−3480] |
| 99 | chr1 | 33333728 | 33333780 | FNDC5(252995)[52] | S100PBP(64766)[−9252] |
| 100 | chr1 | 33336337 | 33336421 | FNDC5(252995)[84] | |
| 101 | chr1 | 186641043 | 186641090 | PTGS2(5743)[47] | |
| 102 | chr1 | 186641447 | 186641494 | PTGS2(5743)[47] | |
| 103 | chr1 | 186641571 | 186641616 | PTGS2(5743)[45] | |
| 104 | chr1 | 186641730 | 186641783 | PTGS2(5743)[53] | |
| 105 | chr1 | 186641798 | 186641842 | PTGS2(5743)[44] | |
| 106 | chr1 | 186642310 | 186642358 | PTGS2(5743)[48] | |
| 107 | chr1 | 186642568 | 186642614 | PTGS2(5743)[46] | |
| 108 | chr1 | 186643025 | 186643073 | PTGS2(5743)[48] | |
| 109 | chr1 | 186643197 | 186643247 | PTGS2(5743)[50] | |
| 110 | chr1 | 186643588 | 186643635 | PTGS2(5743)[47] | |
| 111 | chr1 | 186643651 | 186643697 | PTGS2(5743)[46] | |
| 112 | chr1 | 186643756 | 186643844 | PTGS2(5743)[88] | |
| 113 | chr1 | 186644457 | 186644492 | PTGS2(5743)[35] | |
| 114 | chr1 | 186645239 | 186645287 | PTGS2(5743)[48] | |
| 115 | chr1 | 186645959 | 186646004 | PTGS2(5743)[45] | |
| 116 | chr1 | 186646852 | 186646898 | PTGS2(5743)[46] | |
| 117 | chr1 | 186646902 | 186646950 | PTGS2(5743)[48] | |
| 118 | chr1 | 186647483 | 186647534 | PTGS2(5743)[51] | |
| 119 | chr1 | 206945495 | 206945527 | IL10(3586)[32] | |
| 120 | chr10 | 69643788 | 69643834 | SIRT1(23411)[−592], | |
| | | | | RPL12P8(645161)[−9139] | |
| 121 | chr10 | 69644430 | 69644474 | SIRT1(23411)[44], | |
| | | | | RPL12P8(645161)[−9781] | |
| 122 | chr10 | 69645138 | 69645179 | SIRT1(23411)[41] | |
| 123 | chr10 | 69648720 | 69648798 | SIRT1(23411)[78] | |
| 124 | chr10 | 69651156 | 69651201 | SIRT1(23411)[45] | |
| 125 | chr10 | 69651247 | 69651292 | SIRT1(23411)[45] | |
| 126 | chr10 | 69666351 | 69666408 | SIRT1(23411)[57] | |
| 127 | chr10 | 69666574 | 69666606 | SIRT1(23411)[32] | |
| 128 | chr10 | 69672728 | 69672777 | SIRT1(23411)[49] | HERC4(26091)[−8878] |
| 129 | chr10 | 69677033 | 69677081 | SIRT1(23411)[48] | HERC4(26091)[−4574] |
| 130 | chr11 | 128554928 | 128554974 | FLI1(2313)[−8836] | LOC100507392(100507392)[−6592] |
| 131 | chr11 | 128557815 | 128557845 | FLI1(2313)[−5965] | LOC100507392(100507392)[−3721] |
| 132 | chr11 | 128562433 | 128562475 | FLI1(2313)[−1335] | LOC100507392(100507392)[42] |
| 133 | chr11 | 128563529 | 128563575 | FLI1(2313)[−235] | LOC100507392(100507392)[46] |
| 134 | chr11 | 128563795 | 128563845 | FLI1(2313)[35] | LOC100507392(100507392)[50] |
| 135 | chr11 | 128564848 | 128564903 | FLI1(2313)[55] | LOC100507392(100507392)[55] |
| 136 | chr11 | 128586909 | 128586943 | FLI1(2313)[34] | |
| 137 | chr11 | 128590789 | 128590827 | FLI1(2313)[38] | |
| 138 | chr11 | 128614877 | 128614917 | FLI1(2313)[40] | |
| 139 | chr11 | 128617946 | 128617991 | FLI1(2313)[45] | |
| 140 | chr11 | 128653829 | 128653891 | FLI1(2313)[62] | |
| 141 | chr11 | 128670605 | 128670650 | FLI1(2313)[45] | |
| 142 | chr11 | 128681526 | 128681572 | FLI1(2313)[46] | |
| 143 | chr12 | 7942097 | 7942135 | NANOG(79923)[38] | |
| 144 | chr12 | 7942251 | 7942298 | NANOG(79923)[47] | |
| 145 | chr12 | 7947518 | 7947563 | NANOG(79923)[45] | |
| 146 | chr12 | 102807122 | 102807162 | IGF1(3479)[40] | |
| 147 | chr12 | 102833633 | 102833675 | IGF1(3479)[42] | |
| 148 | chr12 | 102833864 | 102833896 | IGF1(3479)[32] | |
| 149 | chr12 | 102877198 | 102877238 | IGF1(3479)[−2820] | |
| 150 | chr13 | 48878529 | 48878560 | RB1(5925)[31] | |
| 151 | chr13 | 48884097 | 48884143 | RB1(5925)[46] | PPP1R26P1(100418740)[−6851] |
| 152 | chr13 | 48902095 | 48902117 | RB1(5925)[22] | PCNPP5(100507361)[22], |
| | | | | | PPP1R26P1(100418740)[−7485] |
| 153 | chr13 | 48902671 | 48902710 | RB1(5925)[39] | PCNPP5(100507361)[39], |
| | | | | | PPP1R26P1(100418740)[−8061] |
| 154 | chr13 | 48914793 | 48914835 | RB1(5925)[42] | |
| 155 | chr13 | 48933249 | 48933270 | RB1(5925)[21] | |
| 156 | chr13 | 48933319 | 48933350 | RB1(5925)[31] | |
| 157 | chr13 | 48933383 | 48933428 | RB1(5925)[45] | |
| 158 | chr13 | 48933786 | 48933829 | RB1(5925)[43] | |
| 159 | chr13 | 48942430 | 48942480 | RB1(5925)[50] | |
| 160 | chr13 | 48945786 | 48945886 | RB1(5925)[100] | |
| 161 | chr13 | 48945901 | 48946294 | RB1(5925)[393] | |
| 162 | chr13 | 48966237 | 48966563 | RB1(5925)[326] | |
| 163 | chr13 | 48966646 | 48966696 | RB1(5925)[50] | |
| 164 | chr13 | 48967853 | 48967895 | RB1(5925)[42] | |
| 165 | chr13 | 48975772 | 48975818 | RB1(5925)[46] | LPAR6(10161)[−9363] |
| 166 | chr13 | 48976287 | 48976339 | RB1(5925)[52] | LPAR6(10161)[−8842] |
| 167 | chr13 | 48977888 | 48977941 | RB1(5925)[53] | LPAR6(10161)[−7240] |
| 168 | chr13 | 49010203 | 49010249 | RB1(5925)[46] | LPAR6(10161)[46] |
| 169 | chr13 | 49030430 | 49030476 | RB1(5925)[46] | |
| 170 | chr13 | 49055892 | 49055939 | RB1(5925)[47] | RCBTB2(1102)[−7159] |
| 171 | chr17 | 1666284 | 1666323 | SERPINF1(5176)[39], | |
| | | | | SERPINF2(5345)[−7725] | |
| 172 | chr17 | 1670235 | 1670277 | SERPINF1(5176)[42] | |
| 173 | chr17 | 1674355 | 1674437 | SERPINF1(5176)[82] | SMYD4(114826)[−8391] |
| 174 | chr17 | 1675185 | 1675255 | SERPINF1(5176)[70] | SMYD4(114826)[−7573] |
| 175 | chr17 | 1675312 | 1675358 | SERPINF1(5176)[46] | SMYD4(114826)[−7470] |
| 176 | chr17 | 1678374 | 1678420 | SERPINF1(5176)[46] | SMYD4(114826)[−4408] |
| 177 | chr17 | 1678449 | 1678495 | SERPINF1(5176)[46] | SMYD4(114826)[−4333] |
| 178 | chr17 | 1679184 | 1679241 | SERPINF1(5176)[57] | SMYD4(114826)[−3587] |
| 179 | chr17 | 1679860 | 1679952 | SERPINF1(5176)[92] | SMYD4(114826)[−2876] |
| 180 | chr17 | 1680411 | 1680447 | SERPINF1(5176)[36] | SMYD4(114826)[−2381] |
| 181 | chr17 | 1680537 | 1680660 | SERPINF1(5176)[123] | SMYD4(114826)[−2168] |
| 182 | chr17 | 1680674 | 1680717 | SERPINF1(5176)[43] | SMYD4(114826)[−2111] |
| 183 | chr17 | 1680770 | 1680832 | SERPINF1(5176)[62] | SMYD4(114826)[−1996] |
| 184 | chr17 | 1686489 | 1686539 | SERPINF1(5176)[−5630] | SMYD4(114826)[50] |
| 185 | chr17 | 1690784 | 1690829 | SERPINF1(5176)[−9925] | SMYD4(114826)[45] |
| 186 | chr17 | 40458254 | 40458299 | STAT3(6774)[−7043] | STAT5A(6776)[45] |
| 187 | chr17 | 40458587 | 40458634 | STAT3(6774)[−6708] | STAT5A(6776)[47] |
| 188 | chr17 | 40462644 | 40462690 | STAT3(6774)[−2652] | STAT5A(6776)[46] |
| 189 | chr17 | 40467685 | 40467729 | STAT3(6774)[44] | STAT5A(6776)[−3725] |
| 190 | chr17 | 40467751 | 40467796 | STAT3(6774)[45] | STAT5A(6776)[−3791] |
| 191 | chr17 | 40469121 | 40469156 | STAT3(6774)[35] | STAT5A(6776)[−5161] |
| 192 | chr17 | 40471938 | 40472007 | STAT3(6774)[69] | STAT5A(6776)[−7978] |
| 193 | chr17 | 40473573 | 40473627 | STAT3(6774)[54] | STAT5A(6776)[−9613] |
| 194 | chr17 | 40474301 | 40474392 | STAT3(6774)[91] | |
| 195 | chr17 | 40475018 | 40475062 | STAT3(6774)[44] | |
| 196 | chr17 | 40478110 | 40478142 | STAT3(6774)[32] | |
| 197 | chr17 | 40481557 | 40481595 | STAT3(6774)[38] | |
| 198 | chr17 | 40483477 | 40483503 | STAT3(6774)[26] | |
| 199 | chr17 | 40485939 | 40485980 | STAT3(6774)[41] | |
| 200 | chr17 | 40489494 | 40489536 | STAT3(6774)[42] | |
| 201 | chr17 | 40490756 | 40490801 | STAT3(6774)[45] | |
| 202 | chr17 | 40491345 | 40491391 | STAT3(6774)[46] | |
| 203 | chr17 | 40500426 | 40500468 | STAT3(6774)[42] | |
| 204 | chr17 | 40501605 | 40501650 | STAT3(6774)[45] | |
| 205 | chr17 | 40506887 | 40506937 | STAT3(6774)[50] | |
| 206 | chr17 | 40514881 | 40514946 | STAT3(6774)[65] | |
| 207 | chr17 | 40531595 | 40531657 | STAT3(6774)[62] | |
| 208 | chr17 | 40535596 | 40535704 | STAT3(6774)[108] | |
| 209 | chr17 | 40535736 | 40535778 | STAT3(6774)[42] | |
| 210 | chr17 | 40537565 | 40537603 | STAT3(6774)[38] | |
| 211 | chr17 | 40539000 | 40539044 | STAT3(6774)[44] | |
| 212 | chr17 | 40540181 | 40540233 | STAT3(6774)[52] | |
| 213 | chr17 | 41196483 | 41196519 | BRCA1(672)[36] | |
| 214 | chr17 | 41197661 | 41197730 | BRCA1(672)[69] | |
| 215 | chr17 | 41197911 | 41198817 | BRCA1(672)[906] | |
| 216 | chr17 | 41202966 | 41203009 | BRCA1(672)[43] | |
| 217 | chr17 | 41211738 | 41211793 | BRCA1(672)[55] | |
| 218 | chr17 | 41213401 | 41213478 | BRCA1(672)[77] | |
| 219 | chr17 | 41214577 | 41215228 | BRCA1(672)[651] | |
| 220 | chr17 | 41217147 | 41217193 | BRCA1(672)[46] | |
| 221 | chr17 | 41218773 | 41219139 | BRCA1(672)[366] | |
| 222 | chr17 | 41221904 | 41222301 | BRCA1(672)[397] | RPL21P4(140660)[−8976] |
| 223 | chr17 | 41222949 | 41222991 | BRCA1(672)[42] | RPL21P4(140660)[−8286] |
| 224 | chr17 | 41228584 | 41228629 | BRCA1(672)[45] | RPL21P4(140660)[−2648] |
| 225 | chr17 | 41229105 | 41229149 | BRCA1(672)[44] | RPL21P4(140660)[−2128] |
| 226 | chr17 | 41234824 | 41234884 | BRCA1(672)[60] | RPL21P4(140660)[−2991] |
| 227 | chr17 | 41243483 | 41243524 | BRCA1(672)[41] | |
| 228 | chr17 | 41243934 | 41243963 | BRCA1(672)[29] | |
| 229 | chr17 | 41244287 | 41244331 | BRCA1(672)[44] | |
| 230 | chr17 | 41244494 | 41244540 | BRCA1(672)[46] | |
| 231 | chr17 | 41244814 | 41244865 | BRCA1(672)[51] | |
| 232 | chr17 | 41245007 | 41245056 | BRCA1(672)[49] | |
| 233 | chr17 | 41245122 | 41245168 | BRCA1(672)[46] | |
| 234 | chr17 | 41245261 | 41245289 | BRCA1(672)[28] | |
| 235 | chr17 | 41245362 | 41245408 | BRCA1(672)[46] | |
| 236 | chr17 | 41245484 | 41245549 | BRCA1(672)[65] | |
| 237 | chr17 | 41245606 | 41245652 | BRCA1(672)[46] | |
| 238 | chr17 | 41245726 | 41245768 | BRCA1(672)[42] | |
| 239 | chr17 | 41245883 | 41245913 | BRCA1(672)[30] | |
| 240 | chr17 | 41246073 | 41246124 | BRCA1(672)[51] | |
| 241 | chr17 | 41251844 | 41251892 | BRCA1(672)[48] | |
| 242 | chr17 | 41256224 | 41256269 | BRCA1(672)[45] | |
| 243 | chr17 | 42428434 | 42428480 | GRN(2896)[46] | FAM171A2(284069)[−2620] |
| 244 | chr17 | 42428931 | 42428977 | GRN(2896)[46] | FAM171A2(284069)[−2123] |
| 245 | chr17 | 42429010 | 42429056 | GRN(2896)[46] | FAM171A2(284069)[−2044] |
| 246 | chr17 | 42429408 | 42429453 | GRN(2896)[45] | FAM171A2(284069)[−1647] |
| 247 | chr17 | 42430115 | 42430161 | GRN(2896)[46] | FAM171A2(284069)[−939] |
| 248 | chr17 | 42430242 | 42430293 | GRN(2896)[51] | FAM171A2(284069)[−807] |
| 249 | chr17 | 42431151 | 42431193 | GRN(2896)[−681] | FAM171A2(284069)[42] |
| 250 | chr17 | 42435098 | 42435129 | GRN(2896)[−4628] | FAM171A2(284069)[31], |
| | | | | | RPL7L1P5(390800)[−7255] |
| 251 | chr18 | 46446327 | 46446370 | SMAD7(4092)[43] | |
| 252 | chr18 | 46446538 | 46446584 | SMAD7(4092)[46] | |
| 253 | chr18 | 46447045 | 46447088 | SMAD7(4092)[43] | |
| 254 | chr18 | 46448077 | 46448141 | SMAD7(4092)[64] | |
| 255 | chr18 | 46448226 | 46448271 | SMAD7(4092)[45] | |
| 256 | chr18 | 46448491 | 46448539 | SMAD7(4092)[48] | |
| 257 | chr18 | 46448944 | 46448981 | SMAD7(4092)[37] | |
| 258 | chr18 | 46449786 | 46449831 | SMAD7(4092)[45] | |
| 259 | chr18 | 46450423 | 46450538 | SMAD7(4092)[115] | |
| 260 | chr18 | 46450886 | 46450923 | SMAD7(4092)[37] | |
| 261 | chr18 | 46451155 | 46451213 | SMAD7(4092)[58] | |
| 262 | chr18 | 46451355 | 46451402 | SMAD7(4092)[47] | |
| 263 | chr18 | 46455352 | 46455392 | SMAD7(4092)[40] | |
| 264 | chr18 | 46455564 | 46455605 | SMAD7(4092)[41] | |
| 265 | chr18 | 46455678 | 46455723 | SMAD7(4092)[45] | |
| 266 | chr18 | 46455988 | 46456026 | SMAD7(4092)[38] | |
| 267 | chr18 | 46456321 | 46456365 | SMAD7(4092)[44] | |
| 268 | chr18 | 46456495 | 46456544 | SMAD7(4092)[49] | |
| 269 | chr18 | 46458464 | 46458511 | SMAD7(4092)[47] | |
| 270 | chr18 | 46458614 | 46458638 | SMAD7(4092)[24] | |
| 271 | chr18 | 46458872 | 46458926 | SMAD7(4092)[54] | |
| 272 | chr18 | 46459269 | 46459310 | SMAD7(4092)[41] | |
| 273 | chr18 | 46461123 | 46461227 | SMAD7(4092)[104] | |
| 274 | chr18 | 46461237 | 46461307 | SMAD7(4092)[70] | |
| 275 | chr18 | 46461371 | 46461429 | SMAD7(4092)[58] | |
| 276 | chr18 | 46461518 | 46461557 | SMAD7(4092)[39] | |
| 277 | chr18 | 46461579 | 46461693 | SMAD7(4092)[114] | |
| 278 | chr18 | 46464744 | 46464809 | SMAD7(4092)[65] | |
| 279 | chr18 | 46465648 | 46465694 | SMAD7(4092)[46] | |
| 280 | chr18 | 46466370 | 46466424 | SMAD7(4092)[54] | |
| 281 | chr18 | 46466536 | 46466582 | SMAD7(4092)[46] | |
| 282 | chr18 | 46467360 | 46467384 | SMAD7(4092)[24] | |
| 283 | chr18 | 46467488 | 46467525 | SMAD7(4092)[37] | |
| 284 | chr18 | 46468211 | 46468285 | SMAD7(4092)[74] | |
| 285 | chr18 | 46469650 | 46469693 | SMAD7(4092)[43] | |
| 286 | chr18 | 46469752 | 46469801 | SMAD7(4092)[49] | |
| 287 | chr18 | 46469838 | 46469883 | SMAD7(4092)[45] | |
| 288 | chr18 | 46469956 | 46470022 | SMAD7(4092)[66] | |
| 289 | chr18 | 46470181 | 46470229 | SMAD7(4092)[48] | |
| 290 | chr18 | 46470289 | 46470370 | SMAD7(4092)[81] | |
| 291 | chr18 | 46470511 | 46470573 | SMAD7(4092)[62] | |
| 292 | chr18 | 46470595 | 46470667 | SMAD7(4092)[72] | |
| 293 | chr18 | 46471007 | 46471074 | SMAD7(4092)[67] | |
| 294 | chr18 | 46471422 | 46471919 | SMAD7(4092)[497] | |
| 295 | chr18 | 46471976 | 46472031 | SMAD7(4092)[55] | |
| 296 | chr18 | 46472475 | 46472519 | SMAD7(4092)[44] | |
| 297 | chr18 | 46472920 | 46472966 | SMAD7(4092)[46] | - |
| 298 | chr18 | 46473058 | 46473103 | SMAD7(4092)[45] | |
| 299 | chr18 | 46473468 | 46473512 | SMAD7(4092)[44] | |
| 300 | chr18 | 46473917 | 46473968 | SMAD7(4092)[51] | |
| 301 | chr18 | 46474400 | 46474446 | SMAD7(4092)[46] | |
| 302 | chr18 | 46476824 | 46476866 | SMAD7(4092)[42] | |
| 303 | chr18 | 46477311 | 46477380 | SMAD7(4092)[−230] | |
| 304 | chr18 | 46477380 | 46477448 | SMAD7(4092)[−299] | |
| 305 | chr18 | 46477565 | 46477612 | SMAD7(4092)[−484] | |
| 306 | chr18 | 46477641 | 46477689 | SMAD7(4092)[−560] | |
| 307 | chr18 | 46477743 | 46477810 | SMAD7(4092)[−662] | |
| 308 | chr18 | 46478765 | 46478861 | SMAD7(4092)[−1684] | |
| 309 | chr19 | 4171996 | 4172038 | SIRT6(51548)[−2067] | CREB3L3(84699)[42] |
| 310 | chr19 | 4175106 | 4175148 | SIRT6(51548)[42] | CREB3L3(84699)[−2058], |
| | | | | | ANKRD24(170961)[−8202] |
| 311 | chr19 | 4177081 | 4177127 | SIRT6(51548)[46] | CREB3L3(84699)[−4033], |
| | | | | | ANKRD24(170961)[−6223] |
| 312 | chr19 | 11200245 | 11200291 | LDLR(3949)[46] | |
| 313 | chr19 | 11200383 | 11200486 | LDLR(3949)[103] | |
| 314 | chr19 | 11203622 | 11203668 | LDLR(3949)[46] | |
| 315 | chr19 | 11210902 | 11210935 | LDLR(3949)[33] | |
| 316 | chr19 | 11210970 | 11211012 | LDLR(3949)[42] | |
| 317 | chr19 | 11218034 | 11218089 | LDLR(3949)[55] | |
| 318 | chr19 | 11221381 | 11221426 | LDLR(3949)[45] | |
| 319 | chr19 | 11224284 | 11224326 | LDLR(3949)[42] | |
| 320 | chr19 | 11230020 | 11230046 | LDLR(3949)[26] | |
| 321 | chr19 | 11231073 | 11231115 | LDLR(3949)[42] | |
| 322 | chr19 | 11231140 | 11231182 | LDLR(3949)[42] | |
| 323 | chr19 | 11242210 | 11242295 | LDLR(3949)[85] | |
| 324 | chr19 | 11242349 | 11242411 | LDLR(3949)[62] | |
| 325 | chr19 | 11243907 | 11243955 | LDLR(3949)[48] | |
| 326 | chr19 | 11244132 | 11244210 | LDLR(3949)[78] | |
| 327 | chr19 | 11244409 | 11244455 | LDLR(3949)[46] | |
| 328 | chr19 | 35763523 | 35763579 | USF2(7392)[56], | |
| | | | | LSR(51599)[−4656], | |
| | | | | HAMP(57817)[−9830] | |
| 329 | chr19 | 35763599 | 35763742 | USF2(7392)[143], | |
| | | | | LSR(51599)[−4732], | |
| | | | | HAMP(57817)[−9667] | |
| 330 | chr19 | 35763775 | 35763810 | USF2(7392)[35], | |
| | | | | LSR(51599)[−4908], | |
| | | | | HAMP(57817)[−9599] | |
| 331 | chr19 | 35764216 | 35764283 | USF2(7392)[67], | |
| | | | | LSR(51599)[−5349], | |
| | | | | HAMP(57817)[−9126] | |
| 332 | chr19 | 35769783 | 35769850 | USF2(7392)[67], | |
| | | | | HAMP(57817)[−3559] | |
| 333 | chr19 | 35770630 | 35770680 | USF2(7392)[50], | |
| | | | | HAMP(57817)[−2729] | |
| 334 | chr19 | 35780408 | 35780440 | MAG(4099)[−2548], | |
| | | | | HAMP(57817)[−4363], | |
| | | | | USF2(7392)[−9690] | |
| 335 | chr2 | 111874741 | 111874800 | ACOXL(55289)[59], | FLJ44006(400997)[−2979] |
| | | | | BCL2L11(10018)[−3690] | |
| 336 | chr2 | 111875484 | 111875526 | ACOXL(55289)[42], | FLJ44006(400997)[−3722] |
| | | | | BCL2L11(10018)[−2964] | |
| 337 | chr2 | 111876570 | 111876609 | ACOXL(55289)[−771], | FLJ44006(400997)[−4808] |
| | | | | BCL2L11(10018)[−1881] | |
| 338 | chr2 | 111884760 | 111884814 | BCL2L11(10018)[54], | |
| | | | | ACOXL(55289)[−8961] | |
| 339 | chr2 | 111900874 | 111900919 | BCL2L11(10018)[45] | |
| 340 | chr2 | 111901576 | 111901618 | BCL2L11(10018)[42] | |
| 341 | chr2 | 111909725 | 111909767 | BCL2L11(10018)[42] | |
| 342 | chr2 | 111912202 | 111912286 | BCL2L11(10018)[84] | |
| 343 | chr2 | 111913452 | 111913475 | BCL2L11(10018)[23] | |
| 344 | chr2 | 111913810 | 111913867 | BCL2L11(10018)[57] | |
| 345 | chr2 | 111918896 | 111918926 | BCL2L11(10018)[30] | |
| 346 | chr2 | 111919307 | 111919329 | BCL2L11(10018)[22] | |
| 347 | chr2 | 111921357 | 111921435 | BCL2L11(10018)[78] | |
| 348 | chr2 | 111921782 | 111921828 | BCL2L11(10018)[46] | |
| 349 | chr2 | 111921983 | 111922029 | BCL2L11(10018)[46] | |
| 350 | chr2 | 111922061 | 111922112 | BCL2L11(10018)[51] | |
| 351 | chr2 | 111923184 | 111923229 | BCL2L11(10018)[45] | |
| 352 | chr2 | 111923480 | 111923533 | BCL2L11(10018)[53] | |
| 353 | chr2 | 111924148 | 111924178 | BCL2L11(10018)[30] | |
| 354 | chr6 | 39019719 | 39019758 | GLP1R(2740)[39] | |
| 355 | chr6 | 39026997 | 39027047 | GLP1R(2740)[50] | |
| 356 | chr6 | 39027295 | 39027329 | GLP1R(2740)[34] | |
| 357 | chr6 | 39028068 | 39028124 | GLP1R(2740)[56] | |
| 358 | chr6 | 39028771 | 39028817 | GLP1R(2740)[46] | |
| 359 | chr6 | 39047993 | 39048028 | GLP1R(2740)[35] | |
| 360 | chr6 | 39054054 | 39054101 | GLP1R(2740)[47] | |
| 361 | chr6 | 39056381 | 39056477 | GLP1R(2740)[−861] | |
| 362 | chr7 | 44178060 | 44178114 | MYL7(58498)[−348], | |
| | | | | GCK(2645)[−5755] | |
| 363 | chr7 | 44179962 | 44180004 | MYL7(58498)[42], | |
| | | | | GCK(2645)[−3865] | |
| 364 | chr7 | 44180335 | 44180381 | MYL7(58498)[46], | |
| | | | | GCK(2645)[−3488] | |
| 365 | chr7 | 44183576 | 44183600 | GCK(2645)[−269], | |
| | | | | MYL7(58498)[−2660] | |
| 366 | chr7 | 44190023 | 44190065 | GCK(2645)[42], | |
| | | | | MYL7(58498)[−9107] | |
| 367 | chr7 | 44191933 | 44191978 | GCK(2645)[45] | |
| 368 | chr7 | 44196261 | 44196302 | GCK(2645)[41] | |
| 369 | chr7 | 44228529 | 44228580 | GCK(2645)[51] | |
| 370 | chr7 | 116595999 | 116596037 | ST7(7982)[38], | ST7-AS1(93653)[−1611] |
| | | | | ST7-OT4(338069)[38] | |
| 371 | chr7 | 116624638 | 116624690 | ST7(7982)[52] | |
| 372 | chr7 | 116625757 | 116625802 | ST7(7982)[45] | |
| 373 | chr7 | 116650635 | 116650688 | ST7(7982)[53] | |
| 374 | chr7 | 116660757 | 116660806 | ST7(7982)[49] | |
| 375 | chr7 | 116662866 | 116662927 | ST7(7982)[61] | |
| 376 | chr7 | 116676974 | 116677010 | ST7(7982)[36] | |
| 377 | chr7 | 116686722 | 116686769 | ST7(7982)[47] | |
| 378 | chr7 | 116707400 | 116707483 | ST7(7982)[83] | |
| 379 | chr7 | 116720624 | 116720666 | ST7(7982)[42] | |
| 380 | chr7 | 116724345 | 116724391 | ST7(7982)[46] | |
| 381 | chr7 | 116725722 | 116725775 | ST7(7982)[53] | |
| 382 | chr7 | 116726550 | 116726589 | ST7(7982)[39] | |
| 383 | chr7 | 116726815 | 116726855 | ST7(7982)[40] | |
| 384 | chr7 | 116756048 | 116756092 | ST7(7982)[44] | ST7-AS2(93654)[44] |
| 385 | chr7 | 116764078 | 116764126 | ST7(7982)[48] | ST7-AS2(93654)[48] |
| 386 | chr7 | 116769409 | 116769434 | ST7(7982)[25] | ST7-AS2(93654)[25] |
| 387 | chr7 | 116770594 | 116770635 | ST7(7982)[41] | ST7-AS2(93654)[41] |
| 388 | chr7 | 116774356 | 116774402 | ST7(7982)[46] | ST7-AS2(93654)[46] |
| 389 | chr7 | 116774449 | 116774493 | ST7(7982)[44] | ST7-AS2(93654)[44] |
| 390 | chr7 | 116774569 | 116774629 | ST7(7982)[60] | ST7-AS2(93654)[60] |
| 391 | chr7 | 116774725 | 116774770 | ST7(7982)[45] | ST7-AS2(93654)[45] |
| 392 | chr7 | 116775116 | 116775168 | ST7(7982)[52] | ST7-AS2(93654)[52] |
| 393 | chr7 | 116776217 | 116776269 | ST7(7982)[52] | ST7-AS2(93654)[52] |
| 394 | chr7 | 116778263 | 116778308 | ST7(7982)[45] | ST7-AS2(93654)[45] |
| 395 | chr7 | 116778487 | 116778584 | ST7(7982)[97] | ST7-AS2(93654)[97] |
| 396 | chr7 | 116813917 | 116813961 | ST7(7982)[44], | |
| | | | | ST7-OT3(93655)[−8773] | |
| 397 | chr7 | 116818961 | 116819012 | ST7(7982)[51], | |
| | | | | ST7-OT3(93655)[−3722] | |
| 398 | chr7 | 116820336 | 116820397 | ST7(7982)[61], | |
| | | | | ST7-OT3(93655)[−2337] | |
| 399 | chr7 | 116821346 | 116821386 | ST7(7982)[40], | |
| | | | | ST7-OT3(93655)[−1348] | |
| 400 | chr7 | 116830139 | 116830185 | ST7(7982)[46], | |
| | | | | ST7-OT3(93655)[46] | |
| 401 | chr7 | 116847544 | 116847586 | ST7(7982)[42], | |
| | | | | ST7-OT3(93655)[42] | |
| 402 | chr7 | 116862145 | 116862183 | ST7(7982)[38] | |
| 403 | chr7 | 116862240 | 116862284 | ST7(7982)[44] | |
| 404 | chr7 | 116865552 | 116865593 | ST7(7982)[41] | |
| 405 | chr8 | 39778542 | 39778579 | IDO1(3620)[37] | |
| 406 | chrX | 133597598 | 133597645 | HPRT1(3251)[47] | |
| 407 | chrX | 133609331 | 133609378 | HPRT1(3251)[47] | |
| 408 | chrX | 133621494 | 133621542 | HPRT1(3251)[48] | |
| 409 | chrX | 133621803 | 133621843 | HPRT1(3251)[40] | |
| 410 | chrX | 133624277 | 133624349 | HPRT1(3251)[72] | |
| 411 | chrX | 133627514 | 133627603 | HPRT1(3251)[89] | |
| 412 | chrX | 133628177 | 133628202 | HPRT1(3251)[25] | |
| 413 | chrX | 133628358 | 133628403 | HPRT1(3251)[45] | |
| 414 | chrX | 133634063 | 133634112 | HPRT1(3251)[49] | |
| 415 | chrX | 133634219 | 133634273 | HPRT1(3251)[54] | |
| 416 | chrX | 133634349 | 133634419 | HPRT1(3251)[70] | |
| 417 | chrX | 146994273 | 146994317 | FMR1(2332)[44] | FMR1-AS1(100126270)[44] |
| 418 | chrX | 146994340 | 146994407 | FMR1(2332)[67] | FMR1-AS1(100126270)[67] |
| 419 | chrX | 146994536 | 146994651 | FMR1(2332)[115] | FMR1-AS1(100126270)[115] |
| 420 | chrX | 146994704 | 146994754 | FMR1(2332)[50] | FMR1-AS1(100126270)[50] |
| 421 | chrX | 146994910 | 146994962 | FMR1(2332)[52] | FMR1-AS1(100126270)[52] |
| 422 | chrX | 146995057 | 146995114 | FMR1(2332)[57] | FMR1-AS1(100126270)[57] |
| 423 | chrX | 146995153 | 146995247 | FMR1(2332)[94] | FMR1-AS1(100126270)[94] |
| 424 | chrX | 146995834 | 146995880 | FMR1(2332)[46] | FMR1-AS1(100126270)[46] |
| 425 | chrX | 146997285 | 146997332 | FMR1(2332)[47] | FMR1-AS1(100126270)[47] |
| 426 | chrX | 146999318 | 146999381 | FMR1(2332)[63] | FMR1-AS1(100126270)[63] |
| 427 | chrX | 146999780 | 146999822 | FMR1(2332)[42] | FMR1-AS1(100126270)[42] |
| 428 | chrX | 147003704 | 147003762 | FMR1(2332)[58] | FMR1-AS1(100126270)[−28] |
| 429 | chrX | 147006583 | 147006630 | FMR1(2332)[47] | FMR1-AS1(100126270)[−2907] |
| 430 | chrX | 147007061 | 147007111 | FMR1(2332)[50] | FMR1-AS1(100126270)[−3385] |
| 431 | chrX | 147009255 | 147009307 | FMR1(2332)[52] | FMR1-AS1(100126270)[−5579] |
| 432 | chrX | 147009866 | 147009911 | FMR1(2332)[45] | FMR1-AS1(100126270)[−6190] |
| 433 | chrX | 147014001 | 147014047 | FMR1(2332)[46] | |
| 434 | chrX | 147016764 | 147016808 | FMR1(2332)[44] | |
| 435 | chrX | 147018028 | 147018101 | FMR1(2332)[73] | |
| 436 | chrX | 147020266 | 147020312 | FMR1(2332)[46] | |
| 437 | chrX | 147020375 | 147020450 | FMR1(2332)[75] | |
| 438 | chrX | 147022776 | 147022871 | FMR1(2332)[95] | |
| 439 | chrX | 147023821 | 147023867 | FMR1(2332)[46] | |
| 440 | chrX | 147024122 | 147024162 | FMR1(2332)[40] | |
| 441 | chrX | 147024653 | 147024741 | FMR1(2332)[88] | |
| 442 | chrX | 147024859 | 147024904 | FMR1(2332)[45] | |
| 443 | chrX | 147025738 | 147025821 | FMR1(2332)[83] | |
| 444 | chrX | 147025910 | 147025956 | FMR1(2332)[46] | |
| 445 | chrX | 147026054 | 147026120 | FMR1(2332)[66] | |
| 446 | chrX | 147026148 | 147026223 | FMR1(2332)[75] | |
| 447 | chrX | 147026308 | 147026380 | FMR1(2332)[72] | |
| 448 | chrX | 147026455 | 147026506 | FMR1(2332)[51] | |
| 449 | chrX | 147030397 | 147030443 | FMR1(2332)[46] | |
| 450 | chrX | 147030600 | 147030644 | FMR1(2332)[44] | |
| 451 | chrX | 147030762 | 147030809 | FMR1(2332)[47] | |
| 452 | chrX | 147030873 | 147030925 | FMR1(2332)[52] | |
| 453 | chrX | 147031114 | 147031160 | FMR1(2332)[46] | |
| 454 | chrX | 147032022 | 147032068 | FMR1(2332)[46] | |
| 455 | chrX | 147032538 | 147032587 | FMR1(2332)[49] | |
| 456 | chrX | 154124781 | 154124812 | F8(2157)[31] | |
| 457 | chrX | 154197368 | 154197405 | F8(2157)[37] | |
| 458 | chrX | 154255514 | 154255559 | F8(2157)[−4516] | FUNDC2(65991)[45] |
| 459 | chrX | 154255647 | 154255679 | F8(2157)[−4649] | FUNDC2(65991)[32] |
| 460 | chr1 | 33319540 | 33323585 | FNDC5(252995)[−6283] | S100PBP(64766)[45] |
| 461 | chr1 | 33325956 | 33330002 | FNDC5(252995)[46] | S100PBP(64766)[−3480] |
| 462 | chr1 | 33331728 | 33335780 | FNDC5(252995)[52] | S100PBP(64766)[−9252] |
| 463 | chr1 | 33334337 | 33338421 | FNDC5(252995)[84] | |
| 464 | chr1 | 186639043 | 186643090 | PTGS2(5743)[47] | |
| 465 | chr1 | 186639447 | 186643494 | PTGS2(5743)[47] | |
| 466 | chr1 | 186639571 | 186643616 | PTGS2(5743)[45] | |
| 467 | chr1 | 186639730 | 186643783 | PTGS2(5743)[53] | |
| 468 | chr1 | 186639798 | 186643842 | PTGS2(5743)[44] | |
| 469 | chr1 | 186640310 | 186644358 | PTGS2(5743)[48] | |
| 470 | chr1 | 186640568 | 186644614 | PTGS2(5743)[46] | |
| 471 | chr1 | 186641025 | 186645073 | PTGS2(5743)[48] | |
| 472 | chr1 | 186641197 | 186645247 | PTGS2(5743)[50] | |
| 473 | chr1 | 186641588 | 186645635 | PTGS2(5743)[47] | |
| 474 | chr1 | 186641651 | 186645697 | PTGS2(5743)[46] | |
| 475 | chr1 | 186641756 | 186645844 | PTGS2(5743)[88] | |
| 476 | chr1 | 186642457 | 186646492 | PTGS2(5743)[35] | |
| 477 | chr1 | 186643239 | 186647287 | PTGS2(5743)[48] | |
| 478 | chr1 | 186643959 | 186648004 | PTGS2(5743)[45] | |
| 479 | chr1 | 186644852 | 186648898 | PTGS2(5743)[46] | |
| 480 | chr1 | 186644902 | 186648950 | PTGS2(5743)[48] | |
| 481 | chr1 | 186645483 | 186649534 | PTGS2(5743)[51] | |
| 482 | chr1 | 206943495 | 206947527 | IL10(3586)[32] | |
| 483 | chr10 | 69641788 | 69645834 | SIRT1(23411)[−592], | |
| | | | | RPL12P8(645161)[−9139] | |
| 484 | chr10 | 69642430 | 69646474 | SIRT1(23411)[44], | |
| | | | | RPL12P8(645161)[−9781] | |
| 485 | chr10 | 69643138 | 69647179 | SIRT1(23411)[41] | |
| 486 | chr10 | 69646720 | 69650798 | SIRT1(23411)[78] | |
| 487 | chr10 | 69649156 | 69653201 | SIRT1(23411)[45] | |
| 488 | chr10 | 69649247 | 69653292 | SIRT1(23411)[45] | |
| 489 | chr10 | 69664351 | 69668408 | SIRT1(23411)[57] | |
| 490 | chr10 | 69664574 | 69668606 | SIRT1(23411)[32] | |
| 491 | chr10 | 69670728 | 69674777 | SIRT1(23411)[49] | HERC4(26091)[−8878] |
| 492 | chr10 | 69675033 | 69679081 | SIRT1(23411)[48] | HERC4(26091)[−4574] |
| 493 | chr11 | 128552928 | 128556974 | FLI1(2313)[−8836] | LOC100507392(100507392)[−6592] |
| 494 | chr11 | 128555815 | 128559845 | FLI1(2313)[−5965] | LOC100507392(100507392)[−3721] |
| 495 | chr11 | 128560433 | 128564475 | FLI1(2313)[−1335] | LOC100507392(100507392)[42] |
| 496 | chr11 | 128561529 | 128565575 | FLI1(2313)[−235] | LOC100507392(100507392)[46] |
| 497 | chr11 | 128561795 | 128565845 | FLI1(2313)[35] | LOC100507392(100507392)[50] |
| 498 | chr11 | 128562848 | 128566903 | FLI1(2313)[55] | LOC100507392(100507392)[55] |
| 499 | chr11 | 128584909 | 128588943 | FLI1(2313)[34] | |
| 500 | chr11 | 128588789 | 128592827 | FLI1(2313)[38] | |
| 501 | chr11 | 128612877 | 128616917 | FLI1(2313)[40] | |
| 502 | chr11 | 128615946 | 128619991 | FLI1(2313)[45] | |
| 503 | chr11 | 128651829 | 128655891 | FLI1(2313)[62] | |
| 504 | chr11 | 128668605 | 128672650 | FLI1(2313)[45] | |
| 505 | chr11 | 128679526 | 128683572 | FLI1(2313)[46] | |
| 506 | chr12 | 7940097 | 7944135 | NANOG(79923)[38] | |
| 507 | chr12 | 7940251 | 7944298 | NANOG(79923)[47] | |
| 508 | chr12 | 7945518 | 7949563 | NANOG(79923)[45] | |
| 509 | chr12 | 102805122 | 102809162 | IGF1(3479)[40] | |
| 510 | chr12 | 102831633 | 102835675 | IGF1(3479)[42] | |
| 511 | chr12 | 102831864 | 102835896 | IGF1(3479)[32] | |
| 512 | chr12 | 102875198 | 102879238 | IGF1(3479)[−2820] | |
| 513 | chr13 | 48876529 | 48880560 | RB1(5925)[31] | |
| 514 | chr13 | 48882097 | 48886143 | RB1(5925)[46] | PPP1R26P1(100418740)[−6851] |
| 515 | chr13 | 48900095 | 48904117 | RB1(5925)[22] | PCNPP5(100507361)[22], |
| | | | | | PPP1R26P1(100418740)[−7485] |
| 516 | chr13 | 48900671 | 48904710 | RB1(5925)[39] | PCNPP5(100507361)[39], |
| | | | | | PPP1R26P1(100418740)[−8061] |
| 517 | chr13 | 48912793 | 48916835 | RB1(5925)[42] | |
| 518 | chr13 | 48931249 | 48935270 | RB1(5925)[21] | |
| 519 | chr13 | 48931319 | 48935350 | RB1(5925)[31] | |
| 520 | chr13 | 48931383 | 48935428 | RB1(5925)[45] | |
| 521 | chr13 | 48931786 | 48935829 | RB1(5925)[43] | |
| 522 | chr13 | 48940430 | 48944480 | RB1(5925)[50] | |
| 523 | chr13 | 48943786 | 48947886 | RB1(5925)[100] | |
| 524 | chr13 | 48943901 | 48948294 | RB1(5925)[393] | |
| 525 | chr13 | 48964237 | 48968563 | RB1(5925)[326] | |
| 526 | chr13 | 48964646 | 48968696 | RB1(5925)[50] | |
| 527 | chr13 | 48965853 | 48969895 | RB1(5925)[42] | |
| 528 | chr13 | 48973772 | 48977818 | RB1(5925)[46] | LPAR6(10161)[−9363] |
| 529 | chr13 | 48974287 | 48978339 | RB1(5925)[52] | LPAR6(10161)[−8842] |
| 530 | chr13 | 48975888 | 48979941 | RB1(5925)[53] | LPAR6(10161)[−7240] |
| 531 | chr13 | 49008203 | 49012249 | RB1(5925)[46] | LPAR6(10161)[46] |
| 532 | chr13 | 49028430 | 49032476 | RB1(5925)[46] | |
| 533 | chr13 | 49053892 | 49057939 | RB1(5925)[47] | RCBTB2(1102)[−7159] |
| 534 | chr17 | 1664284 | 1668323 | SERPINF1(5176)[39], | |
| | | | | SERPINF2(5345)[−7725] | |
| 535 | chr17 | 1668235 | 1672277 | SERPINF1(5176)[42] | |
| 536 | chr17 | 1672355 | 1676437 | SERPINF1(5176)[82] | SMYD4(114826)[−8391] |
| 537 | chr17 | 1673185 | 1677255 | SERPINF1(5176)[70] | SMYD4(114826)[−7573] |
| 538 | chr17 | 1673312 | 1677358 | SERPINF1(5176)[46] | SMYD4(114826)[−7470] |
| 539 | chr17 | 1676374 | 1680420 | SERPINF1(5176)[46] | SMYD4(114826)[−4408] |
| 540 | chr17 | 1676449 | 1680495 | SERPINF1(5176)[46] | SMYD4(114826)[−4333] |
| 541 | chr17 | 1677184 | 1681241 | SERPINF1(5176)[57] | SMYD4(114826)[−3587] |
| 542 | chr17 | 1677860 | 1681952 | SERPINF1(5176)[92] | SMYD4(114826)[−2876] |
| 543 | chr17 | 1678411 | 1682447 | SERPINF1(5176)[36] | SMYD4(114826)[−2381] |
| 544 | chr17 | 1678537 | 1682660 | SERPINF1(5176)[123] | SMYD4(114826)[−2168] |
| 545 | chr17 | 1678674 | 1682717 | SERPINF1(5176)[43] | SMYD4(114826)[−2111] |
| 546 | chr17 | 1678770 | 1682832 | SERPINF1(5176)[62] | SMYD4(114826)[−1996] |
| 547 | chr17 | 1684489 | 1688539 | SERPINF1(5176)[−5630] | SMYD4(114826)[50] |
| 548 | chr17 | 1688784 | 1692829 | SERPINF1(5176)[−9925] | SMYD4(114826)[45] |
| 549 | chr17 | 40456254 | 40460299 | STAT3(6774)[−7043] | STAT5A(6776)[45] |
| 550 | chr17 | 40456587 | 40460634 | STAT3(6774)[−6708] | STAT5A(6776)[47] |
| 551 | chr17 | 40460644 | 40464690 | STAT3(6774)[−2652] | STAT5A(6776)[46] |
| 552 | chr17 | 40465685 | 40469729 | STAT3(6774)[44] | STAT5A(6776)[−3725] |
| 553 | chr17 | 40465751 | 40469796 | STAT3(6774)[45] | STAT5A(6776)[−3791] |
| 554 | chr17 | 40467121 | 40471156 | STAT3(6774)[35] | STAT5A(6776)[−5161] |
| 555 | chr17 | 40469938 | 40474007 | STAT3(6774)[69] | STAT5A(6776)[−7978] |
| 556 | chr17 | 40471573 | 40475627 | STAT3(6774)[54] | STAT5A(6776)[−9613] |
| 557 | chr17 | 40472301 | 40476392 | STAT3(6774)[91] | |
| 558 | chr17 | 40473018 | 40477062 | STAT3(6774)[44] | |
| 559 | chr17 | 40476110 | 40480142 | STAT3(6774)[32] | |
| 560 | chr17 | 40479557 | 40483595 | STAT3(6774)[38] | |
| 561 | chr17 | 40481477 | 40485503 | STAT3(6774)[26] | |
| 562 | chr17 | 40483939 | 40487980 | STAT3(6774)[41] | |
| 563 | chr17 | 40487494 | 40491536 | STAT3(6774)[42] | |
| 564 | chr17 | 40488756 | 40492801 | STAT3(6774)[45] | |
| 565 | chr17 | 40489345 | 40493391 | STAT3(6774)[46] | |
| 566 | chr17 | 40498426 | 40502468 | STAT3(6774)[42] | |
| 567 | chr17 | 40499605 | 40503650 | STAT3(6774)[45] | |
| 568 | chr17 | 40504887 | 40508937 | STAT3(6774)[50] | |
| 569 | chr17 | 40512881 | 40516946 | STAT3(6774)[65] | |
| 570 | chr17 | 40529595 | 40533657 | STAT3(6774)[62] | |
| 571 | chr17 | 40533596 | 40537704 | STAT3(6774)[108] | |
| 572 | chr17 | 40533736 | 40537778 | STAT3(6774)[42] | |
| 573 | chr17 | 40535565 | 40539603 | STAT3(6774)[38] | |
| 574 | chr17 | 40537000 | 40541044 | STAT3(6774)[44] | |
| 575 | chr17 | 40538181 | 40542233 | STAT3(6774)[52] | |
| 576 | chr17 | 41194483 | 41198519 | BRCA1(672)[36] | |
| 577 | chr17 | 41195661 | 41199730 | BRCA1(672)[69] | |
| 578 | chr17 | 41195911 | 41200817 | BRCA1(672)[906] | |
| 579 | chr17 | 41200966 | 41205009 | BRCA1(672)[43] | |
| 580 | chr17 | 41209738 | 41213793 | BRCA1(672)[55] | |
| 581 | chr17 | 41211401 | 41215478 | BRCA1(672)[77] | |
| 582 | chr17 | 41212577 | 41217228 | BRCA1(672)[651] | |
| 583 | chr17 | 41215147 | 41219193 | BRCA1(672)[46] | |
| 584 | chr17 | 41216773 | 41221139 | BRCA1(672)[366] | |
| 585 | chr17 | 41219904 | 41224301 | BRCA1(672)[397] | RPL21P4(140660)[−8976] |
| 586 | chr17 | 41220949 | 41224991 | BRCA1(672)[42] | RPL21P4(140660)[−8286] |
| 587 | chr17 | 41226584 | 41230629 | BRCA1(672)[45] | RPL21P4(140660)[−2648] |
| 588 | chr17 | 41227105 | 41231149 | BRCA1(672)[44] | RPL21P4(140660)[−2128] |
| 589 | chr17 | 41232824 | 41236884 | BRCA1(672)[60] | RPL21P4(140660)[−2991] |
| 590 | chr17 | 41241483 | 41245524 | BRCA1(672)[41] | |
| 591 | chr17 | 41241934 | 41245963 | BRCA1(672)[29] | |
| 592 | chr17 | 41242287 | 41246331 | BRCA1(672)[44] | |
| 593 | chr17 | 41242494 | 41246540 | BRCA1(672)[46] | |
| 594 | chr17 | 41242814 | 41246865 | BRCA1(672)[51] | |
| 595 | chr17 | 41243007 | 41247056 | BRCA1(672)[49] | |
| 596 | chr17 | 41243122 | 41247168 | BRCA1(672)[46] | |
| 597 | chr17 | 41243261 | 41247289 | BRCA1(672)[28] | |
| 598 | chr17 | 41243362 | 41247408 | BRCA1(672)[46] | |
| 599 | chr17 | 41243484 | 41247549 | BRCA1(672)[65] | |
| 600 | chr17 | 41243606 | 41247652 | BRCA1(672)[46] | |
| 601 | chr17 | 41243726 | 41247768 | BRCA1(672)[42] | |
| 602 | chr17 | 41243883 | 41247913 | BRCA1(672)[30] | |
| 603 | chr17 | 41244073 | 41248124 | BRCA1(672)[51] | |
| 604 | chr17 | 41249844 | 41253892 | BRCA1(672)[48] | |
| 605 | chr17 | 41254224 | 41258269 | BRCA1(672)[45] | |
| 606 | chr17 | 42426434 | 42430480 | GRN(2896)[46] | FAM171A2(284069)[−2620] |
| 607 | chr17 | 42426931 | 42430977 | GRN(2896)[46] | FAM171A2(284069)[−2123] |
| 608 | chr17 | 42427010 | 42431056 | GRN(2896)[46] | FAM171A2(284069)[−2044] |
| 609 | chr17 | 42427408 | 42431453 | GRN(2896)[45] | FAM171A2(284069)[−1647] |
| 610 | chr17 | 42428115 | 42432161 | GRN(2896)[46] | FAM171A2(284069)[−939] |
| 611 | chr17 | 42428242 | 42432293 | GRN(2896)[51] | FAM171A2(284069)[−807] |
| 612 | chr17 | 42429151 | 42433193 | GRN(2896)[−681] | FAM171A2(284069)[42] |
| 613 | chr17 | 42433098 | 42437129 | GRN(2896)[−4628] | FAM171A2(284069)[31], |
| | | | | | RPL7L1P5(390800)[−7255] |
| 614 | chr18 | 46444327 | 46448370 | SMAD7(4092)[43] | |
| 615 | chr18 | 46444538 | 46448584 | SMAD7(4092)[46] | |
| 616 | chr18 | 45445045 | 46449088 | SMAD7(4092)[43] | |
| 617 | chr18 | 46446077 | 46450141 | SMAD7(4092)[64] | |
| 618 | chr18 | 46446226 | 46450271 | SMAD7(4092)[45] | |
| 619 | chr18 | 46446491 | 46450539 | SMAD7(4092)[48] | |
| 620 | chr18 | 46446944 | 46450981 | SMAD7(4092)[37] | |
| 621 | chr18 | 46447786 | 46451831 | SMAD7(4092)[45] | |
| 622 | chr18 | 46448423 | 46452538 | SMAD7(4092)[115] | |
| 623 | chr18 | 46448886 | 46452923 | SMAD7(4092)[37] | |
| 624 | chr18 | 46449155 | 46453213 | SMAD7(4092)[58) | |
| 625 | chr18 | 46449355 | 46453402 | SMAD7(4092)[47] | |
| 626 | chr18 | 46453352 | 46457392 | SMAD7(4092)[40] | |
| 627 | chr18 | 46453564 | 46457605 | SMAD7(4092)[41] | |
| 628 | chr18 | 46453678 | 46457723 | SMAD7(4092)[45] | |
| 629 | chr18 | 46453988 | 46458026 | SMAD7(4092)[38] | |
| 630 | chr18 | 46454321 | 46458365 | SMAD7(4092)[44] | |
| 631 | chr18 | 46454495 | 46458544 | SMAD7(4092)[49] | |
| 632 | chr18 | 46456464 | 46460511 | SMAD7(4092)[47] | |
| 633 | chr18 | 46456614 | 46460638 | SMAD7(4092)[24] | |
| 634 | chr18 | 46456872 | 46460926 | SMAD7(4092)[54] | |
| 635 | chr18 | 46457269 | 46461310 | SMAD7(4092)[41] | |
| 636 | chr18 | 46459123 | 46463227 | SMAD7(4092)[104] | |
| 637 | chr18 | 46459237 | 46463307 | SMAD7(4092)[70] | |
| 638 | chr18 | 46459371 | 46463429 | SMAD7(4092)[58] | |
| 639 | chr18 | 46459518 | 46463557 | SMAD7(4092)[39] | |
| 640 | chr18 | 46459579 | 46463693 | SMAD7(4092)[114] | |
| 641 | chr18 | 46462744 | 46466809 | SMAD7(4092)[65] | |
| 642 | chr18 | 46463648 | 46467694 | SMAD7(4092)[46] | |
| 643 | chr18 | 46464370 | 46468424 | SMAD7(4092)[54] | |
| 644 | chr18 | 46464536 | 46468582 | SMAD7(4092)[46] | |
| 645 | chr18 | 46465360 | 46469384 | SMAD7(4092)[24] | |
| 646 | chr18 | 46465488 | 46469525 | SMAD7(4092)[37] | |
| 647 | chr18 | 46466211 | 46470285 | SMAD7(4092)[74] | |
| 648 | chr18 | 46467650 | 46471693 | SMAD7(4092)[43] | |
| 649 | chr18 | 46467752 | 46471801 | SMAD7(4092)[49] | |
| 650 | chr18 | 46467838 | 46471883 | SMAD7(4092)[45] | |
| 651 | chr18 | 46467956 | 46472022 | SMAD7(4092)[66] | |
| 652 | chr18 | 46468181 | 46472229 | SMAD7(4092)[48] | |
| 653 | chr18 | 46468289 | 46472370 | SMAD7(4092)[81] | |
| 654 | chr18 | 46468511 | 46472573 | SMAD7(4092)[62] | |
| 655 | chr18 | 46468595 | 46472667 | SMAD7(4092)[72] | |
| 656 | chr18 | 46469007 | 46473074 | SMAD7(4092)[67] | |
| 657 | chr18 | 46469422 | 46473919 | SMAD7(4092)[497] | |
| 658 | chr18 | 46469976 | 46474031 | SMAD7(4092)[55] | |
| 659 | chr18 | 46470475 | 46474519 | SMAD7(4092)[44] | |
| 660 | chr18 | 46470920 | 46474966 | SMAD7(4092)[46] | |
| 661 | chr18 | 46471058 | 46475103 | SMAD7(4092)[45] | |
| 662 | chr18 | 46471468 | 46475512 | SMAD7(4092)[44] | |
| 663 | chr18 | 46471917 | 46475968 | SMAD7(4092)[51] | |
| 664 | chr18 | 46472400 | 46476446 | SMAD7(4092)[46] | |
| 665 | chr18 | 46474824 | 46478866 | SMAD7(4092)[42] | |
| 666 | chr18 | 46475311 | 46479380 | SMAD7(4092)[−230] | |
| 667 | chr18 | 46475380 | 46479448 | SMAD7(4092)[−299] | |
| 668 | chr18 | 46475565 | 46479612 | SMAD7(4092)[−484] | |
| 669 | chr18 | 46475641 | 46479689 | SMAD7(4092)[−560] | |
| 670 | chr18 | 46475743 | 46479810 | SMAD7(4092)[−662] | |
| 671 | chr18 | 46476765 | 46480861 | SMAD7(4092)[−1684] | |
| 672 | chr19 | 4169996 | 4174038 | SIRT6(51548)[−2067] | CREB3L3(84699)[42] |
| 673 | chr19 | 4173106 | 4177148 | SIRT6(51548)[42] | CREB3L3(84699)[−2058], |
| | | | | | ANKRD24(170961)[−8202] |
| 674 | chr19 | 4175081 | 4179127 | SIRT6(51548)[46] | CREB3L3(84699)[−4033], |
| | | | | | ANKRD24(170961)[−6223] |
| 675 | chr19 | 11198245 | 11202291 | LDLR(3949)[46] | |
| 676 | chr19 | 11198383 | 11202486 | LDLR(3949)[103] | |
| 677 | chr19 | 11201622 | 11205668 | LDLR(3949)[46] | |
| 678 | chr19 | 11208902 | 11212935 | LDLR(3949)[33] | |
| 679 | chr19 | 11208970 | 11213012 | LDLR(3949)[42] | |
| 680 | chr19 | 11216034 | 11220089 | LDLR(3949)[55] | |
| 681 | chr19 | 11219381 | 11223426 | LDLR(3949)[45] | |
| 682 | chr19 | 11222284 | 11226326 | LDLR(3949)[42] | |
| 683 | chr19 | 11228020 | 11232046 | LDLR(3949)[26] | |
| 684 | chr19 | 11229073 | 11233115 | LDLR(3949)[42] | |
| 685 | chr19 | 11229140 | 11233182 | LDLR(3949)[42] | |
| 686 | chr19 | 11240210 | 11244295 | LDLR(3949)[85] | |
| 687 | chr19 | 11240349 | 11244411 | LDLR(3949)[62] | |
| 688 | chr19 | 11241907 | 11245955 | LDLR(3949)[48] | |
| 689 | chr19 | 11242132 | 11246210 | LDLR(3949)[78] | |
| 690 | chr19 | 11242409 | 11246455 | LDLR(3949)[46] | |
| 691 | chr19 | 35761523 | 35765579 | USF2(7392)[56], | |
| | | | | LSR(51599)[−4656], | |
| | | | | HAMP(57817)[−9830] | |
| 692 | chr19 | 35761599 | 35765742 | USF2(7392)[143], | |
| | | | | LSR(51599)[−4732], | |
| | | | | HAMP(57817)[−9667] | |
| 693 | chr19 | 35761775 | 35765810 | USF2(7392)[35], | |
| | | | | LSR(51599)[−4908], | |
| | | | | HAMP(57817)[−9599] | |
| 694 | chr19 | 35762216 | 35766283 | USF2(7392)[67], | |
| | | | | LSR(51599)[−5349], | |
| | | | | HAMP(57817)[−9126] | |
| 695 | chr19 | 35767783 | 35771850 | USF2(7392)[67], | |
| | | | | HAMP(57817)[−3559] | |
| 696 | chr19 | 35768630 | 35772680 | USF2(7392)[50], | |
| | | | | HAMP(57817)[−2729] | |
| 697 | chr19 | 35778408 | 35782440 | MAG(4099)[−2548], | |
| | | | | HAMP(57817)[−4363], | |
| | | | | USF2(7392)[−9690] | |
| 698 | chr2 | 111872741 | 111876800 | ACOXL(55289)[59], | FLJ44006(400997)[−2979] |
| | | | | BCL2L11(10018)[−3690] | |
| 699 | chr2 | 111873484 | 111877526 | ACOXL(55289)[42], | FLJ44006(400997)[−3722] |
| | | | | BCL2L11(10018)[−2964] | |
| 700 | chr2 | 111874570 | 111878609 | ACOXL(55289)[−771], | FLJ44006(400997)[−4808] |
| | | | | BCL2L11(10018)[−1881] | |
| 701 | chr2 | 111882760 | 111886814 | BCL2L11(10018)[54], | |
| | | | | ACOXL(55289)[−8961] | |
| 702 | chr2 | 111898874 | 111902919 | BCL2L11(10018)[45] | |
| 703 | chr2 | 111899576 | 111903618 | BCL2L11(10018)[42] | |
| 704 | chr2 | 111907725 | 111911767 | BCL2L11(10018)[42] | |
| 705 | chr2 | 111910202 | 111914286 | BCL2L11(10018)[84] | |
| 706 | chr2 | 111911452 | 111915475 | BCL2L11(10018)[23] | |
| 707 | chr2 | 111911810 | 111915867 | BCL2L11(10018)[57] | |
| 708 | chr2 | 111916896 | 111920926 | BCL2L11(10018)[30] | |
| 709 | chr2 | 111917307 | 111921329 | BCL2L11(10018)[22] | |
| 710 | chr2 | 111919357 | 111923435 | BCL2L11(10018)[78] | |
| 711 | chr2 | 111919782 | 111923828 | BCL2L11(10018)[46] | |
| 712 | chr2 | 111919983 | 111924029 | BCL2L11(10018)[46] | |
| 713 | chr2 | 111920061 | 111924112 | BCL2L11(10018)[51] | |
| 714 | chr2 | 111921184 | 111925229 | BCL2L11(10018)[45] | |
| 715 | chr2 | 111921480 | 111925533 | BCL2L11(10018)[53] | |
| 716 | chr2 | 111922148 | 111926178 | BCL2L11(10018)[30] | |
| 717 | chr6 | 39017719 | 39021758 | GLP1R(2740)[39] | |
| 718 | chr6 | 39024997 | 39029047 | GLP1R(2740)[50] | |
| 719 | chr6 | 39025295 | 39029329 | GLP1R(2740)[34] | |
| 720 | chr6 | 39026068 | 39030124 | GLP1R(2740)[56] | |
| 721 | chr6 | 39026771 | 39030817 | GLP1R(2740)[46] | |
| 722 | chr6 | 39045993 | 39050028 | GLP1R(2740)[35] | |
| 723 | chr6 | 39052054 | 39056101 | GLP1R(2740)[47] | |
| 724 | chr6 | 39054381 | 39058477 | GLP1R(2740)[−861] | |
| 725 | chr7 | 44176060 | 44180114 | MYL7(58498)[−348], | |
| | | | | GCK(2645)[−5755] | |
| 726 | chr7 | 44177962 | 44182004 | MYL7(58498)[42], | |
| | | | | GCK(2645)[−3865] | |
| 727 | chr7 | 44178335 | 44182381 | MYL7(58498)[46], | |
| | | | | GCK(2645)[−3488] | |
| 728 | chr7 | 44181576 | 44185600 | GCK(2645)[−269], | |
| | | | | MYL7(58498)[−2660] | |
| 729 | chr7 | 44188023 | 44192065 | GCK(2645)[42], | |
| | | | | MYL7(58498)[−9107] | |
| 730 | chr7 | 44189933 | 44193978 | GCK(2645)[45] | |
| 731 | chr7 | 44194261 | 44198302 | GCK(2645)[41] | |
| 732 | chr7 | 44226529 | 44230580 | GCK(2645)[51] | |
| 733 | chr7 | 116593999 | 116598037 | ST7(7982)[38], | ST7-AS1(93653)[−1611] |
| | | | | ST7-OT4(338069)[38] | |
| 734 | chr7 | 116622638 | 116626690 | ST7(7982)[52] | |
| 735 | chr7 | 116623757 | 116627802 | ST7(7982)[45] | |
| 736 | chr7 | 116648635 | 116652688 | ST7(7982)[53] | |
| 737 | chr7 | 116658757 | 116662806 | ST7(7982)[49] | |
| 738 | chr7 | 116660866 | 116664927 | ST7(7982)[61] | |
| 739 | chr7 | 116674974 | 116679010 | ST7(7982)[36] | |
| 740 | chr7 | 116684722 | 116688769 | ST7(7982)[47] | |
| 741 | chr7 | 116705400 | 116709483 | ST7(7982)[83] | |
| 742 | chr7 | 116718624 | 116722666 | ST7(7982)[42] | |
| 743 | chr7 | 116722345 | 116726391 | ST7(7982)[46] | |
| 744 | chr7 | 116723722 | 116727775 | ST7(7982)[53] | |
| 745 | chr7 | 116724550 | 116728589 | ST7(7982)[39] | |
| 746 | chr7 | 116724815 | 116728855 | ST7(7982)[40] | |
| 747 | chr7 | 116754048 | 116758092 | ST7(7982)[44] | ST7-AS2(93654)[44] |
| 748 | chr7 | 116762078 | 116766126 | ST7(7982)[48] | ST7-AS2(93654)[48] |
| 749 | chr7 | 116767409 | 116771434 | ST7(7982)[25] | ST7-AS2(93654)[25] |
| 750 | chr7 | 116768594 | 116772635 | ST7(7982)[41] | ST7-AS2(93654)[41] |
| 751 | chr7 | 116772356 | 116776402 | ST7(7982)[46] | ST7-AS2(93654)[46] |
| 752 | chr7 | 116772449 | 116776493 | ST7(7982)[44] | ST7-AS2(93654)[44] |
| 753 | chr7 | 116772569 | 116776629 | ST7(7982)[60] | ST7-AS2(93654)[60] |
| 754 | chr7 | 116772725 | 116776770 | ST7(7982)[45] | ST7-AS2(93654)[45] |
| 755 | chr7 | 116773116 | 116777168 | ST7(7982)[52] | ST7-AS2(93654)[52] |
| 756 | chr7 | 116774217 | 116778269 | ST7(7982)[52] | ST7-AS2(93654)[52] |
| 757 | chr7 | 116776263 | 116780308 | ST7(7982)[45] | ST7-AS2(93654)[45] |
| 758 | chr7 | 116776487 | 116780584 | ST7(7982)[97] | ST7-AS2(93654)[97] |
| 759 | chr7 | 116811917 | 116815961 | ST7(7982)[44], | |
| | | | | ST7-OT3(93655)[−8773] | |
| 760 | chr7 | 116816961 | 116821012 | ST7(7982)[51], | |
| | | | | ST7-OT3(93655)[−3722] | |
| 761 | chr7 | 116818336 | 116822397 | ST7(7982)[61], | |
| | | | | ST7-OT3(93655)[−2337] | |
| 762 | chr7 | 116819346 | 116823386 | ST7(7982)[40], | |
| | | | | ST7-OT3(93655)[−1348] | |
| 763 | chr7 | 116828139 | 116832185 | ST7(7982)[46], | |
| | | | | ST7-OT3(93655)[46] | |
| 764 | chr7 | 116845544 | 116849586 | ST7(7982)[42], | |
| | | | | ST7-OT3(93655)[42] | |
| 765 | chr7 | 116860145 | 116864183 | ST7(7982)[38] | |
| 766 | chr7 | 116860240 | 116864284 | ST7(7982)[44] | |
| 767 | chr7 | 116863552 | 116867593 | ST7(7982)[41] | |
| 768 | chr8 | 39776542 | 39780579 | IDO1(3620)[37] | |
| 769 | chrX | 133595598 | 133599645 | HPRT1(3251)[47] | |
| 770 | chrX | 133607331 | 133611378 | HPRT1(3251)[47] | |
| 771 | chrX | 133619494 | 133623542 | HPRT1(3251)[48] | |
| 772 | chrX | 133619803 | 133623843 | HPRT1(3251)[40] | |
| 773 | chrX | 133622277 | 133626349 | HPRT1(3251)[72] | |
| 774 | chrX | 133625514 | 133629603 | HPRT1(3251)[89] | |
| 775 | chrX | 133626177 | 133630202 | HPRT1(3251)[25] | |
| 776 | chrX | 133626358 | 133630403 | HPRT1(3251)[45] | |
| 777 | chrX | 133632063 | 133636112 | HPRT1(3251)[49] | |
| 778 | chrX | 133632219 | 133636273 | HPRT1(3251)[54] | |
| 779 | chrX | 133632349 | 133636419 | HPRT1(3251)[70] | |
| 780 | chrX | 146992273 | 146996317 | FMR1(2332)[44] | FMR1-AS1(100126270)[44] |
| 781 | chrX | 146992340 | 146996407 | FMR1(2332)[67] | FMR1-AS1(100126270)[67] |
| 782 | chrX | 146992536 | 146996651 | FMR1(2332)[115] | FMR1-AS1(100126270)[115] |
| 783 | chrX | 146992704 | 146996754 | FMR1(2332)[50] | FMR1-AS1(100126270)[50] |
| 784 | chrX | 146992910 | 146996962 | FMR1(2332)[52] | FMR1-AS1(100126270)[52] |
| 785 | chrX | 146993057 | 146997114 | FMR1(2332)[57] | FMR1-AS1(100126270)[57] |
| 786 | chrX | 146993153 | 146997247 | FMR1(2332)[94] | FMR1-AS1(100126270)[94] |
| 787 | chrX | 146993834 | 146997880 | FMR1(2332)[46] | FMR1-AS1(100126270)[46] |
| 788 | chrX | 146995285 | 146999332 | FMR1(2332)[47] | FMR1-AS1(100126270)[47] |
| 789 | chrX | 146997318 | 147001381 | FMR1(2332)[63] | FMR1-AS1(100126270)[63] |
| 790 | chrX | 146997780 | 147001822 | FMR1(2332)[42] | FMR1-AS1(100126270)[42] |
| 791 | chrX | 147001704 | 147005762 | FMR1(2332)[58] | FMR1-AS1(100126270)[−28] |
| 792 | chrX | 147004583 | 147008630 | FMR1(2332)[47] | FMR1-AS1(100126270)[−2907] |
| 793 | chrX | 147005061 | 147009111 | FMR1(2332)[50] | FMR1-AS1(100126270)[−3385] |
| 794 | chrX | 147007255 | 147011307 | FMR1(2332)[52] | FMR1-AS1(100126270)[−5579] |
| 795 | chrX | 147007866 | 147011911 | FMR1(2332)[45] | FMR1-AS1(100126270)[−6190] |
| 796 | chrX | 147012001 | 147016047 | FMR1(2332)[46] | |
| 797 | chrX | 147014764 | 147018808 | FMR1(2332)[44] | |
| 798 | chrX | 147016028 | 147020101 | FMR1(2332)[73] | |
| 799 | chrX | 147018266 | 147022312 | FMR1(2332)[46] | |
| 800 | chrX | 147018375 | 147022450 | FMR1(2332)[75] | |
| 801 | chrX | 147020776 | 147024871 | FMR1(2332)[95] | |
| 802 | chrX | 147021821 | 147025867 | FMR1(2332)[46] | |
| 803 | chrX | 147022122 | 147026162 | FMR1(2332)[40] | |
| 804 | chrX | 147022653 | 147026741 | FMR1(2332)[88] | |
| 805 | chrX | 147022859 | 147026904 | FMR1(2332)[45] | |
| 806 | chrX | 147023738 | 147027821 | FMR1(2332)[83] | |
| 807 | chrX | 147023910 | 147027956 | FMR1(2332)[46] | |
| 808 | chrX | 147024054 | 147028120 | FMR1(2332)[66] | |
| 809 | chrX | 147024148 | 147028223 | FMR1(2332)[75] | |
| 810 | chrX | 147024308 | 147028380 | FMR1(2332)[72] | |
| 811 | chrX | 147024455 | 147028506 | FMR1(2332)[51] | |
| 812 | chrX | 147028397 | 147032443 | FMR1(2332)[46] | |
| 813 | chrX | 147028600 | 147032644 | FMR1(2332)[44] | |
| 814 | chrX | 147028762 | 147032809 | FMR1(2332)[47] | |
| 815 | chrX | 147028873 | 147032925 | FMR1(2332)[52] | |
| 816 | chrX | 147029114 | 147033160 | FMR1(2332)[46] | |
| 817 | chrX | 147030022 | 147034068 | FMR1(2332)[46] | |
| 818 | chrX | 147030538 | 147034587 | FMR1(2332)[49) | |
| 819 | chrX | 154122781 | 154126812 | F8(2157)[31] | |
| 820 | chrX | 154195368 | 154199405 | F8(2157)[37] | |
| 821 | chrX | 154253514 | 154257559 | F8(2157)[−4516] | FUNDC2(65991)[45] |
| 822 | chrX | 154253647 | 154257679 | F8(2157)[−4649] | FUNDC2(65991)[32] |
| 823 | chr1 | 33318693 | 33318738 | S100PBP(64766)[45] | FNDC5(252995)[−9130] |
| 824 | chr1 | 33323628 | 33323672 | S100PBP(64766)[44] | FNDC5(252995)[−4196] |
| 825 | chr1 | 33323707 | 33323769 | S100PBP(64766)[62] | FNDC5(252995)[−4099] |
| 826 | chr1 | 33324429 | 33324474 | S100PBP(64766)[45] | FNDC5(252995)[−3394] |
| 827 | chr1 | 33332884 | 33332938 | S100PBP(64766)[−8408] | FNDC5(252995)[54] |
| 828 | chr1 | 33334220 | 33334256 | S100PBP(64766)[−9744] | FNDC5(252995)[36] |
| 829 | chr1 | 33334327 | 33334373 | S100PBP(64766)[−9851] | FNDC5(252995)[46] |
| 830 | chr1 | 33335299 | 33335363 | | FNDC5(252995)[64] |
| 831 | chr1 | 186645046 | 186645088 | | PTGS2(5743)[42] |
| 832 | chr1 | 186645744 | 186645790 | | PTGS2(5743)[46] |
| 833 | chr1 | 186649369 | 186649411 | | PTGS2(5743)[42] |
| 834 | chr1 | 206945490 | 206945522 | | IL10(3586)[32] |
| 835 | chr10 | 69644282 | 69644307 | | SIRT1(23411)[−119], |
| | | | | | RPL12P8(645161)[−9633] |
| 836 | chr10 | 69648683 | 69648729 | | SIRT1(23411)[46] |
| 837 | chr10 | 69651264 | 69651310 | | SIRT1(23411)[46] |
| 838 | chr10 | 69682246 | 69682296 | HERC4(26091)[50] | SIRT1(23411)[−4099] |
| 839 | chr10 | 69682882 | 69682924 | HERC4(26091)[42] | SIRT1(23411)[−4735] |
| 840 | chr10 | 69684915 | 69684965 | HERC4(26091)[50] | SIRT1(23411)[−6768] |
| 841 | chr11 | 128554012 | 128554084 | LOC100507392(100507392)[−7482] | FLI1(2313)[−9726] |
| 842 | chr11 | 128556087 | 128556155 | LOC100507392(100507392)[−5411] | FLI1(2313)[−7655] |
| 843 | chr11 | 128563904 | 128563948 | LOC100507392(100507392)[44] | FLI1(2313)[44] |
| 844 | chr11 | 128566093 | 128566115 | LOC100507392(100507392)[−175] | FLI1(2313)[22] |
| 845 | chr11 | 128572440 | 128572475 | LOC100507392(100507392)[−6522] | FLI1(2313)[35] |
| 846 | chr11 | 128598811 | 128598859 | | FLI1(2313)[48] |
| 847 | chr11 | 128604941 | 128604972 | | FLI1(2313)[31] |
| 848 | chr11 | 128606828 | 128606880 | | FLI1(2313)[52] |
| 849 | chr11 | 128609407 | 128609452 | | FLI1(2313)[45] |
| 850 | chr11 | 128631220 | 128631270 | | FLI1(2313)[50] |
| 851 | chr11 | 128631552 | 128631594 | | FLI1(2313)[42] |
| 852 | chr11 | 128636236 | 128636278 | | FLI1(2313)[42] |
| 853 | chr11 | 128636411 | 128636456 | | FLI1(2313)[45] |
| 854 | chr11 | 128640108 | 128640151 | | FLI1(2313)[43] |
| 855 | chr11 | 128675064 | 128675122 | | FLI1(2313)[58] |
| 856 | chr12 | 7942203 | 7942249 | | NANOG(79923)[46] |
| 857 | chr12 | 7942281 | 7942325 | | NANOG(79923)[44] |
| 858 | chr12 | 102792744 | 102792775 | | IGF1(3479)[31] |
| 859 | chr12 | 102801497 | 102801542 | | IGF1(3479)[45] |
| 860 | chr12 | 102823235 | 102823296 | | IGF1(3479)[61] |
| 861 | chr12 | 102836469 | 102836510 | | IGF1(3479)[41] |
| 862 | chr12 | 102863096 | 102863141 | | IGF1(3479)[45] |
| 863 | chr12 | 102866947 | 102866982 | | IGF1(3479)[35] |
| 864 | chr12 | 102869486 | 102869532 | | IGF1(3479)[46] |
| 865 | chr13 | 48878033 | 48878099 | | RB1(5925)[66] |
| 866 | chr13 | 48900554 | 48900603 | PCNPP5(100507361)[49], | RB1(5925)[49] |
| | | | | PPP1R26P1(100418740)[−5944] | |
| 867 | chr13 | 48900896 | 48900954 | PCNPP5(100507361)[58], | RB1(5925)[58] |
| | | | | PPP1R26P1(100418740)[−6286] | |
| 868 | chr13 | 48902138 | 48902185 | PCNPP5(100507361)[47], | RB1(5925)[47] |
| | | | | PPP1R26P1(100418740)[−7528] | |
| 869 | chr13 | 48902350 | 48902430 | PCNPP5(100507361)[80], | RB1(5925)[80] |
| | | | | PPP1R26P1(100418740)[−7740] | |
| 870 | chr13 | 48902510 | 48902558 | PCNPP5(100507361)[48], | RB1(5925)[48] |
| | | | | PPP1R26P1(100418740)[−7900] | |
| 871 | chr13 | 48942380 | 48942424 | | RB1(5925)[44] |
| 872 | chr13 | 48948325 | 48948373 | | RB1(5925)[48] |
| 873 | chr13 | 48954982 | 48955017 | | RB1(5925)[35] |
| 874 | chr13 | 48985855 | 48985901 | LPAR6(10161)[46] | RB1(5925)[46] |
| 875 | chr13 | 49030437 | 49030479 | | RB1(5925)[42] |
| 876 | chr13 | 49063768 | 49063818 | RCBTB2(1102)[50] | RB1(5925)[−7742] |
| 877 | chr17 | 1657585 | 1657626 | | SERPINF2(5345)[41], |
| | | | | | SERPINF1(5176)[−7632] |
| 878 | chr17 | 1673187 | 1673228 | SMYD4(114826)[−9600] | SERPINF1(5176)[41] |
| 879 | chr17 | 1673256 | 1673304 | SMYD4(114826)[−9524] | SERPINF1(5176)[48] |
| 880 | chr17 | 1674373 | 1674450 | SMYD4(114826)[−8378] | SERPINF1(5176)[77] |
| 881 | chr17 | 1675218 | 1675313 | SMYD4(114826)[−7515] | SERPINF1(5176)[95] |
| 882 | chr17 | 1678400 | 1678450 | SMYD4(114826)[−4378] | SERPINF1(5176)[50] |
| 883 | chr17 | 1679867 | 1679914 | SMYD4(114826)[−2914] | SERPINF1(5176)[47] |
| 884 | chr17 | 1680412 | 1680453 | SMYD4(114826)[−2375] | SERPINF1(5176)[41] |
| 885 | chr17 | 1680584 | 1680627 | SMYD4(114826)[−2201] | SERPINF1(5176)[43] |
| 886 | chr17 | 1683417 | 1683469 | SMYD4(114826)[52] | SERPINF1(5176)[−2558] |
| 887 | chr17 | 1684672 | 1684718 | SMYD4(114826)[46] | SERPINF1(5176)[−3813] |
| 888 | chr17 | 1686655 | 1686697 | SMYD4(114826)[42] | SERPINF1(5176)[−5796] |
| 889 | chr17 | 40458377 | 40458423 | STAT5A(6776)[46] | STAT3(6774)[−6919] |
| 890 | chr17 | 40465708 | 40465750 | STAT5A(6776)[−1748] | STAT3(6774)[42] |
| 891 | chr17 | 40467567 | 40467609 | STAT5A(6776)[−3607] | STAT3(6774)[42] |
| 892 | chr17 | 40481315 | 40481352 | | STAT3(6774)[37] |
| 893 | chr17 | 40489818 | 40489864 | | STAT3(6774)[46] |
| 894 | chr17 | 40498715 | 40498756 | | STAT3(6774)[41] |
| 895 | chr17 | 40537800 | 40537845 | | STAT3(6774)[45] |
| 896 | chr17 | 41203104 | 41203130 | | BRCA1(672)[26] |
| 897 | chr17 | 41229006 | 41229051 | RPL21P4(140660)[−2226] | BRCA1(672)[45] |
| 898 | chr17 | 41238265 | 41238288 | RPL21P4(140660)[−6432] | BRCA1(672)[23] |
| 899 | chr17 | 41243836 | 41243881 | | BRCA1(672)[45] |
| 900 | chr17 | 41243981 | 41244027 | | BRCA1(672)[46] |
| 901 | chr17 | 41245476 | 41245569 | | BRCA1(672)[93] |
| 902 | chr17 | 41245602 | 41245647 | | BRCA1(672)[45] |
| 903 | chr17 | 41245791 | 41245835 | | BRCA1(672)[44] |
| 904 | chr17 | 41245920 | 41245965 | | BRCA1(672)[45] |
| 905 | chr17 | 41251151 | 41251187 | | BRCA1(672)[36] |
| 906 | chr17 | 41257619 | 41257668 | | BRCA1(672)[49] |
| 907 | chr17 | 41267754 | 41267815 | NBR2(10230)[−9784] | BRCA1(672)[61] |
| 908 | chr17 | 42421658 | 42421736 | FAM171A2(284069)[−9364] | GRN(2896)[−754] |
| 909 | chr17 | 42427887 | 42427933 | FAM171A2(284069)[−3167] | GRN(2896)[46] |
| 910 | chr17 | 42428632 | 42428717 | FAM171A2(284069)[−2383] | GRN(2896)[85] |
| 911 | chr17 | 42430812 | 42430878 | FAM171A2(284069)[−222] | GRN(2896)[−342] |
| 912 | chr17 | 42430878 | 42430946 | FAM171A2(284069)[−154] | GRN(2896)[−408] |
| 913 | chr17 | 42440135 | 42440190 | FAM171A2(284069)[55], | GRN(2896)[−9665] |
| | | | | RPL7L1P5(390800)[−2194], | |
| | | | | ITGA2B(3674)[−9359] | |
| 914 | chr18 | 46446996 | 46447042 | | SMAD7(4092)[46] |
| 915 | chr18 | 46448944 | 46448981 | | SMAD7(4092)[37] |
| 916 | chr18 | 46449426 | 46449468 | | SMAD7(4092)[42] |
| 917 | chr18 | 46449560 | 46449613 | | SMAD7(4092)[53] |
| 918 | chr18 | 46450467 | 46450550 | | SMAD7(4092)[83] |
| 919 | chr18 | 46450662 | 46450699 | | SMAD7(4092)[37] |
| 920 | chr18 | 46450805 | 46450847 | | SMAD7(4092)[42] |
| 921 | chr18 | 46454854 | 46454888 | | SMAD7(4092)[34] |
| 922 | chr18 | 46455617 | 46455650 | | SMAD7(4092)[33] |
| 923 | chr18 | 46460409 | 46460453 | | SMAD7(4092)[44] |
| 924 | chr18 | 46464660 | 46464708 | | SMAD7(4092)[48] |
| 925 | chr18 | 46467632 | 46467678 | | SMAD7(4092)[46] |
| 926 | chr18 | 46468584 | 46468626 | | SMAD7(4092)[42] |
| 927 | chr18 | 46472616 | 46472679 | | SMAD7(4092)[63] |
| 928 | chr18 | 46472920 | 46472965 | | SMAD7(4092)[45] |
| 929 | chr18 | 46474744 | 46474790 | | SMAD7(4092)[46] |
| 930 | chr18 | 46474873 | 46474918 | | SMAD7(4092)[45] |
| 931 | chr18 | 46476280 | 46476325 | | SMAD7(4092)[45] |
| 932 | chr18 | 46477514 | 46477557 | | SMAD7(4092)[−433] |
| 933 | chr18 | 46477784 | 46477833 | | SMAD7(4092)[−703] |
| 934 | chr18 | 46477897 | 46477979 | | SMAD7(4092)[−816] |
| 935 | chr18 | 46480695 | 46480765 | | SMAD7(4092)[−3614] |
| 936 | chr18 | 46484413 | 46484458 | | SMAD7(4092)[−7332] |
| 937 | chr19 | 4168341 | 4168384 | CREB3L3(84699)[43] | SIRT6(51548)[−5721] |
| 938 | chr19 | 11231035 | 11231121 | | LDLR(3949)[86] |
| 939 | chr19 | 11231140 | 11231182 | | LDLR(3949)[42] |
| 940 | chr19 | 11240206 | 11240249 | | LDLR(3949)[43] |
| 941 | chr19 | 11242367 | 11242432 | | LDLR(3949)[65] |
| 942 | chr19 | 35764119 | 35764167 | | USF2(7392)[48], |
| | | | | | LSR(51599)[−5252], |
| | | | | | HAMP(57817)[−9242] |
| 943 | chr19 | 35773336 | 35773372 | | HAMP(57817)[−37], |
| | | | | | USF2(7392)[−2618], |
| | | | | | MAG(4099)[−9616] |
| 944 | chr2 | 111875557 | 111875579 | FLJ44006(400997)[−3795] | ACOXL(55289)[22], |
| | | | | | BCL2L11(10018)[−2911] |
| 945 | chr2 | 111878709 | 111878751 | FLJ44006(400997)[−6947] | BCL2L11(10018)[42], |
| | | | | | ACOXL(55289)[−2910] |
| 946 | chr2 | 111881774 | 111881824 | | BCL2L11(10018)[50], |
| | | | | | ACOXL(55289)[−5975] |
| 947 | chr2 | 111884848 | 111884885 | | BCL2L11(10018)[37], |
| | | | | | ACOXL(55289)[−9049] |
| 948 | chr2 | 111902031 | 111902076 | | BCL2L11(10018)[45] |
| 949 | chr2 | 111907647 | 111907691 | | BCL2L11(10018)[44] |
| 950 | chr2 | 111925311 | 111925378 | | BCL2L11(10018)[67] |
| 951 | chr6 | 39017036 | 39017117 | LOC100128655(100128655)[−9275] | GLP1R(2740)[81] |
| 952 | chr6 | 39017532 | 39017577 | LOC100128655(100128655)[−9771] | GLP1R(2740)[45] |
| 953 | chr6 | 39017904 | 39017955 | | GLP1R(2740)[51] |
| 954 | chr6 | 39021794 | 39021856 | | GLP1R(2740)[62] |
| 955 | chr6 | 39022326 | 39022379 | | GLP1R(2740)[53] |
| 956 | chr6 | 39027543 | 39027589 | | GLP1R(2740)[46] |
| 957 | chr6 | 39032288 | 39032322 | | GLP1R(2740)[34] |
| 958 | chr6 | 39041838 | 39041884 | | GLP1R(2740)[46] |
| 959 | chr6 | 39048467 | 39048509 | | GLP1R(2740)[42] |
| 960 | chr6 | 39048707 | 39048753 | | GLP1R(2740)[46] |
| 961 | chr6 | 39055249 | 39055292 | | GLP1R(2740)[43] |
| 962 | chr6 | 39055855 | 39055923 | | GLP1R(2740)[−335] |
| 963 | chr6 | 39056119 | 39056160 | | GLP1R(2740)[−599] |
| 964 | chr7 | 44179539 | 44179569 | | MYL7(58498)[30], |
| | | | | | GCK(2645)[−4300] |
| 965 | chr7 | 44180455 | 44180485 | | MYL7(58498)[30], |
| | | | | | GCK(2645)[−3384] |
| 966 | chr7 | 44180553 | 44180598 | | MYL7(58498)[45], |
| | | | | | GCK(2645)[−3271] |
| 967 | chr7 | 44184152 | 44184199 | | GCK(2645)[47], |
| | | | | | MYL7(58498)[−3236] |
| 968 | chr7 | 44184364 | 44184419 | | GCK(2645)[55], |
| | | | | | MYL7(58498)[−3448] |
| 969 | chr7 | 44185300 | 44185343 | | GCK(2645)[43], |
| | | | | | MYL7(58498)[−4384] |
| 970 | chr7 | 44187650 | 44187685 | | GCK(2645)[35], |
| | | | | | MYL7(58498)[−6734] |
| 971 | chr7 | 44199272 | 44199309 | | GCK(2645)[37] |
| 972 | chr7 | 116593600 | 116593645 | ST7-AS1(93653)[45] | ST7(7982)[45], |
| | | | | | ST7-OT4(338069)[−307] |
| 973 | chr7 | 116618378 | 116618420 | TPM3P1(252956)[−5344] | ST7(7982)[42] |
| 974 | chr7 | 116623689 | 116623719 | | ST7(7982)[30] |
| 975 | chr7 | 116641826 | 116641873 | | ST7(7982)[47] |
| 976 | chr7 | 116656497 | 116656538 | | ST7(7982)[41] |
| 977 | chr7 | 116661796 | 116661843 | | ST7(7982)[47] |
| 978 | chr7 | 116700499 | 116700546 | | ST7(7982)[47] |
| 979 | chr7 | 116704561 | 116704604 | | ST7(7982)[43] |
| 980 | chr7 | 116726694 | 116726732 | | ST7(7982)[38] |
| 981 | chr7 | 116728168 | 116728220 | | ST7(7982)[52] |
| 982 | chr7 | 116753703 | 116753744 | ST7-AS2(93654)[41] | ST7(7982)[41] |
| 983 | chr7 | 116755913 | 116755980 | ST7-AS2(93654)[67] | ST7(7982)[67] |
| 984 | chr7 | 116763993 | 116764028 | ST7-AS2(93654)[35] | ST7(7982)[35] |
| 985 | chr7 | 116765305 | 116765356 | ST7-AS2(93654)[51] | ST7(7982)[51] |
| 986 | chr7 | 116765540 | 116765571 | ST7-AS2(93654)[31] | ST7(7982)[31] |
| 987 | chr7 | 116770595 | 116770641 | ST7-AS2(93654)[46] | ST7(7982)[46] |
| 988 | chr7 | 116772915 | 116772959 | ST7-AS2(93654)[44] | ST7(7982)[44] |
| 989 | chr7 | 116774221 | 116774266 | ST7-AS2(93654)[45] | ST7(7982)[45] |
| 990 | chr7 | 116805886 | 116805932 | | ST7(7982)[46] |
| 991 | chr7 | 116815347 | 116815371 | | ST7(7982)[24], |
| | | | | | ST7-OT3(93655)[−7363] |
| 992 | chr7 | 116817687 | 116817732 | | ST7(7982)[45], |
| | | | | | ST7-OT3(93655)[−5002] |
| 993 | chr7 | 116828642 | 116828686 | | ST7(7982)[44], |
| | | | | | ST7-OT3(93655)[44] |
| 994 | chr7 | 116829989 | 116830032 | | ST7(7982)[43], |
| | | | | | ST7-OT3(93655)[43] |
| 995 | chr7 | 116844555 | 116844580 | | ST7(7982)[25], |
| | | | | | ST7-OT3(93655)[25] |
| 996 | chr7 | 116861351 | 116861398 | | ST7(7982)[47] |
| 997 | chr7 | 116866075 | 116866109 | | ST7(7982)[34] |
| 998 | chr8 | 39771698 | 39771735 | | IDO1(3620)[37] |
| 999 | chr8 | 39776381 | 39776422 | | IDO1(3620)[41] |
| 1000 | chr8 | 39780978 | 39781001 | | IDO1(3620)[23] |
| 1001 | chrX | 133594301 | 133594346 | | HPRT1(3251)[45] |
| 1002 | chrX | 133596974 | 133597024 | | HPRT1(3251)[50] |
| 1003 | chrX | 133597154 | 133597198 | | HPRT1(3251)[44] |
| 1004 | chrX | 133607384 | 133607413 | | HPRT1(3251)[29] |
| 1005 | chrX | 133621697 | 133621732 | | HPRT1(3251)[35] |
| 1006 | chrX | 133621814 | 133621856 | | HPRT1(3251)[42] |
| 1007 | chrX | 133634191 | 133634233 | | HPRT1(3251)[42] |
| 1008 | chrX | 146992226 | 146992269 | FMR1-AS1(100126270)[43] | FMR1(2332)[−1199] |
| 1009 | chrX | 146992317 | 146992340 | FMR1-AS1(100126270)[23] | FMR1(2332)[−1128] |
| 1010 | chrX | 146993666 | 146993715 | FMR1-AS1(100126270)[49] | FMR1(2332)[49] |
| 1011 | chrX | 146994919 | 146994964 | FMR1-AS1(100126270)[45] | FMR1(2332)[45] |
| 1012 | chrX | 147009767 | 147009816 | FMR1-AS1(100126270)[−6091] | FMR1(2332)[49] |
| 1013 | chrX | 147025640 | 147025686 | | FMR1(2332)[46] |
| 1014 | chrX | 147026121 | 147026181 | | FMR1(2332)[60] |
| 1015 | chrX | 154131833 | 154131877 | | F8(2157)[44], |
| | | | | | EEF1A1P31(553820)[−5221] |
| 1016 | chrX | 154197605 | 154197651 | | F8(2157)[46] |
| 1017 | chr1 | 33316693 | 33320738 | S100PBP(64766)[45] | FNDC5(252995)[−9130] |
| 1018 | chr1 | 33321628 | 33325672 | S100PBP(64766)[44] | FNDC5(252995)[−4196] |
| 1019 | chr1 | 33321707 | 33325769 | S100PBP(64766)[62] | FNDC5(252995)[−4099] |
| 1020 | chr1 | 33322429 | 33326474 | S100PBP(64766)[45] | FNDC5(252995)[−3394] |
| 1021 | chr1 | 33330884 | 33334938 | S100PBP(64766)[−8408] | FNDC5(252995)[54] |
| 1022 | chr1 | 33332220 | 33336256 | S100PBP(64766)[−9744] | FNDC5(252995)[36] |
| 1023 | chr1 | 33332327 | 33336373 | S100PBP(64766)[−9851] | FNDC5(252995)[46] |
| 1024 | chr1 | 33333299 | 33337363 | | FNDC5(252995)[64] |
| 1025 | chr1 | 186643046 | 186647088 | | PTGS2(5743)[42] |
| 1026 | chr1 | 186643744 | 186647790 | | PTGS2(5743)[46] |
| 1027 | chr1 | 186647369 | 186651411 | | PTGS2(5743)[42] |
| 1028 | chr1 | 206943490 | 206947522 | | IL10(3586)[32] |
| 1029 | chr10 | 69642282 | 69646307 | | SIRT1(23411)[−119], |
| | | | | | RPL12P8(645161)[−9633] |
| 1030 | chr10 | 69646683 | 69650729 | | SIRT1(23411)[46] |
| 1031 | chr10 | 69649264 | 69653310 | | SIRT1(23411)[46] |
| 1032 | chr10 | 69680246 | 69684296 | HERC4(26091)[50] | SIRT1(23411)[−4099] |
| 1033 | chr10 | 69680882 | 69684924 | HERC4(26091)[42] | SIRT1(23411)[−4735] |
| 1034 | chr10 | 69682915 | 69686965 | HERC4(26091)[50] | SIRT1(23411)[−6768] |
| 1035 | chr11 | 128552012 | 128556084 | LOC100507392(100507392)[−7482] | FLI1(2313)[−9726] |
| 1036 | chr11 | 128554087 | 128558155 | LOC100507392(100507392)[−5411] | FLI1(2313)[−7655] |
| 1037 | chr11 | 128561904 | 128565948 | LOC100507392(100507392)[44] | FLI1(2313)[44] |
| 1038 | chr11 | 128564093 | 128568115 | LOC100507392(100507392)[−175] | FLI1(2313)[22] |
| 1039 | chr11 | 128570440 | 128574475 | LOC100507392(100507392)[−6522] | FLI1(2313)[35] |
| 1040 | chr11 | 128596811 | 128600859 | | FLI1(2313)[48] |
| 1041 | chr11 | 128602941 | 128606972 | | FLI1(2313)[31] |
| 1042 | chr11 | 128604828 | 128608880 | | FLI1(2313)[52] |
| 1043 | chr11 | 128607407 | 128611452 | | FLI1(2313)[45] |
| 1044 | chr11 | 128629220 | 128633270 | | FLI1(2313)[50] |
| 1045 | chr11 | 128629552 | 128633594 | | FLI1(2313)[42] |
| 1046 | chr11 | 128634236 | 128638278 | | FLI1(2313)[42] |
| 1047 | chr11 | 128634411 | 128638456 | | FLI1(2313)[45] |
| 1048 | chr11 | 128638108 | 128642151 | | FLI1(2313)[43] |
| 1049 | chr11 | 128673064 | 128677122 | | FLI1(2313)[58] |
| 1050 | chr12 | 7940203 | 7944249 | | NANOG(79923)[46] |
| 1051 | chr12 | 7940281 | 7944325 | | NANOG(79923)[44] |
| 1052 | chr12 | 102790744 | 102794775 | | IGF1(3479)[31] |
| 1053 | chr12 | 102799497 | 102803542 | | IGF1(3479)[45] |
| 1054 | chr12 | 102821235 | 102825296 | | IGF1(3479)[61] |
| 1055 | chr12 | 102834469 | 102838510 | | IGF1(3479)[41] |
| 1056 | chr12 | 102861096 | 102865141 | | IGF1(3479)[45] |
| 1057 | chr12 | 102864947 | 102868982 | | IGF1(3479)[35] |
| 1058 | chr12 | 102867486 | 102871532 | | IGF1(3479)[46] |
| 1059 | chr13 | 48876033 | 48880099 | | RB1(5925)[66] |
| 1060 | chr13 | 48898554 | 48902603 | PCNPP5(100507361)[49], | RB1(5925)[49] |
| | | | | PPP1R26P1(100418740)[−5944] | |
| 1061 | chr13 | 48898896 | 48902954 | PCNPP5(100507361)[58], | RB1(5925)[58] |
| | | | | PPP1R26P1(100418740)[−6286] | |
| 1062 | chr13 | 48900138 | 48904185 | PCNPP5(100507361)[47], | RB1(5925)[47] |
| | | | | PPP1R26P1(100418740)[−7528] | |
| 1063 | chr13 | 48900350 | 48904430 | PCNPP5(100507361)[80], | RB1(5925)[80] |
| | | | | PPP1R26P1(100418740)[−7740] | |
| 1064 | chr13 | 48900510 | 48904558 | PCNPP5(100507361)[48], | RB1(5925)[48] |
| | | | | PPP1R26P1(100418740)[−7900] | |
| 1065 | chr13 | 48940380 | 48944424 | | RB1(5925)[44] |
| 1066 | chr13 | 48946325 | 48950373 | | RB1(5925)[48] |
| 1067 | chr13 | 48952982 | 48957017 | | RB1(5925)[35] |
| 1068 | chr13 | 48983855 | 48987901 | LPAR6(10161)[46] | RB1(5925)[46] |
| 1069 | chr13 | 49028437 | 49032479 | | RB1(5925)[42] |
| 1070 | chr13 | 49061768 | 49065818 | RCBTB2(1102)[50] | RB1(5925)[−7742] |
| 1071 | chr17 | 1655585 | 1659626 | | SERPINF2(5345)[41], |
| | | | | | SERPINF1(5176)[−7632] |
| 1072 | chr17 | 1671187 | 1675228 | SMYD4(114826)[−9600] | SERPINF1(5176)[41] |
| 1073 | chr17 | 1671256 | 1675304 | SMYD4(114826)[−9524] | SERPINF1(5176)[48] |
| 1074 | chr17 | 1672373 | 1676450 | SMYD4(114826)[−8378] | SERPINF1(5176)[77] |
| 1075 | chr17 | 1673218 | 1677313 | SMYD4(114826)[−7515] | SERPINF1(5176)[95] |
| 1076 | chr17 | 1676400 | 1680450 | SMYD4(114826)[−4378] | SERPINF1(5176)[50] |
| 1077 | chr17 | 1677867 | 1681914 | SMYD4(114826)[−2914] | SERPINF1(5176)[47] |
| 1078 | chr17 | 1678412 | 1682453 | SMYD4(114826)[−2375] | SERPINF1(5176)[41] |
| 1079 | chr17 | 1678584 | 1682627 | SMYD4(114826)[−2201] | SERPINF1(5176)[43] |
| 1080 | chr17 | 1681417 | 1685469 | SMYD4(114826)[52] | SERPINF1(5176)[−2558] |
| 1081 | chr17 | 1682672 | 1686718 | SMYD4(114826)[46] | SERPINF1(5176)[−3813] |
| 1082 | chr17 | 1684655 | 1688697 | SMYD4(114826)[42] | SERPINF1(5176)[−5796] |
| 1083 | chr17 | 40456377 | 40460423 | STAT5A(6776)[46] | STAT3(6774)[−6919] |
| 1084 | chr17 | 40463708 | 40467750 | STAT5A(6776)[−1748] | STAT3(6774)[42] |
| 1085 | chr17 | 40465567 | 40469609 | STAT5A(6776)[−3607] | STAT3(6774)[42] |
| 1086 | chr17 | 40479315 | 40483352 | | STAT3(6774)[37] |
| 1087 | chr17 | 40487818 | 40491864 | | STAT3(6774)[46] |
| 1088 | chr17 | 40496715 | 40500756 | | STAT3(6774)[41] |
| 1089 | chr17 | 40535800 | 40539845 | | STAT3(6774)[45] |
| 1090 | chr17 | 41201104 | 41205130 | | BRCA1(672)[26] |
| 1091 | chr17 | 41227006 | 41231051 | RPL21P4(140660)[−2226] | BRCA1(672)[45] |
| 1092 | chr17 | 41236265 | 41240288 | RPL21P4(140660)[−6432] | BRCA1(672)[23] |
| 1093 | chr17 | 41241836 | 41245881 | | BRCA1(672)[45] |
| 1094 | chr17 | 41241981 | 41246027 | | BRCA1(672)[46] |
| 1095 | chr17 | 41243476 | 41247569 | | BRCA1(672)[93] |
| 1096 | chr17 | 41243602 | 41247647 | | BRCA1(672)[45] |
| 1097 | chr17 | 41243791 | 41247835 | | BRCA1(672)[44] |
| 1098 | chr17 | 41243920 | 41247965 | | BRCA1(672)[45] |
| 1099 | chr17 | 41249151 | 41253187 | | BRCA1(672)[36] |
| 1100 | chr17 | 41255619 | 41259668 | | BRCA1(672)[49] |
| 1101 | chr17 | 41265754 | 41269815 | NBR2(10230)[−9784] | BRCA1(672)[61] |
| 1102 | chr17 | 42419658 | 42423736 | FAM171A2(284069)[−9364] | GRN(2896)[−754] |
| 1103 | chr17 | 42425887 | 42429933 | FAM171A2(284069)[−3167] | GRN(2896)[46] |
| 1104 | chr17 | 42426632 | 42430717 | FAM171A2(284069)[−2383] | GRN(2896)[85] |
| 1105 | chr17 | 42428812 | 42432878 | FAM171A2(284069)[−222] | GRN(2896)[−342] |
| 1106 | chr17 | 42428878 | 42432946 | FAM171A2(284069)[−154] | GRN(2896)[−408] |
| 1107 | chr17 | 42438135 | 42442190 | FAM171A2(284069)[55], | GRN(2896)[−9665] |
| | | | | RPL7L1P5(390800)[−2194], | |
| | | | | ITGA2B(3674)[−9359] | |
| 1108 | chr18 | 46444996 | 46449042 | | SMAD7(4092)[46] |
| 1109 | chr18 | 46446944 | 46450981 | | SMAD7(4092)[37] |
| 1110 | chr18 | 46447426 | 46451468 | | SMAD7(4092)[42] |
| 1111 | chr18 | 46447560 | 46451613 | | SMAD7(4092)[53] |
| 1112 | chr18 | 46448467 | 46452550 | | SMAD7(4092)[83] |
| 1113 | chr18 | 46448662 | 46452699 | | SMAD7(4092)[37] |
| 1114 | chr18 | 46448805 | 46452847 | | SMAD7(4092)[42] |
| 1115 | chr18 | 46452854 | 46456888 | | SMAD7(4092)[34] |
| 1116 | chr18 | 46453617 | 46457650 | | SMAD7(4092)[33] |
| 1117 | chr18 | 46458409 | 46462453 | | SMAD7(4092)[44] |
| 1118 | chr18 | 46462660 | 46466708 | | SMAD7(4092)[48] |
| 1119 | chr18 | 46465632 | 46469678 | | SMAD7(4092)[46] |
| 1120 | chr18 | 46466584 | 46470626 | | SMAD7(4092)[42] |
| 1121 | chr18 | 46470616 | 46474679 | | SMAD7(4092)[63] |
| 1122 | chr18 | 46470920 | 46474965 | | SMAD7(4092)[45] |
| 1123 | chr18 | 46472744 | 46476790 | | SMAD7(4092)[46] |
| 1124 | chr18 | 46472873 | 46476918 | | SMAD7(4092)[45] |
| 1125 | chr18 | 46474280 | 46478325 | | SMAD7(4092)[45] |
| 1126 | chr18 | 46475514 | 46479557 | | SMAD7(4092)[−433] |
| 1127 | chr18 | 46475784 | 46479833 | | SMAD7(4092)[−703] |
| 1128 | chr18 | 46475897 | 46479979 | | SMAD7(4092)[−816] |
| 1129 | chr18 | 46478695 | 46482765 | | SMAD7(4092)[−3614] |
| 1130 | chr18 | 46482413 | 46486458 | | SMAD7(4092)[−7332] |
| 1131 | chr19 | 4166341 | 4170384 | CREB3L3(84699)[43] | SIRT6(51548)[−5721] |
| 1132 | chr19 | 11229035 | 11233121 | | LDLR(3949)[86] |
| 1133 | chr19 | 11229140 | 11233182 | | LDLR(3949)[42] |
| 1134 | chr19 | 11238206 | 11242249 | | LDLR(3949)[43] |
| 1135 | chr19 | 11240367 | 11244432 | | LDLR(3949)[65] |
| 1136 | chr19 | 35762119 | 35766167 | | USF2(7392)[48], |
| | | | | | LSR(51599)[−5252], |
| | | | | | HAMP(57817)[−9242] |
| 1137 | chr19 | 35771336 | 35775372 | | HAMP(57817)[−37], |
| | | | | | USF2(7392)[−2618], |
| | | | | | MAG(4099)[−9616] |
| 1138 | chr2 | 111873557 | 111877579 | FLJ44006(400997)[−3795] | ACOXL(55289)[22], |
| | | | | | BCL2L11(10018)[−2911] |
| 1139 | chr2 | 111876709 | 111880751 | FLJ44006(400997)[−6947] | BCL2L11(10018)[42], |
| | | | | | ACOXL(55289)[−2910] |
| 1140 | chr2 | 111879774 | 111883824 | | BCL2L11(10018)[50], |
| | | | | | ACOXL(55289)[−5975] |
| 1141 | chr2 | 111882848 | 111886885 | | BCL2L11(10018)[37], |
| | | | | | ACOXL(55289)[−9049] |
| 1142 | chr2 | 111900031 | 111904076 | | BCL2L11(10018)[45] |
| 1143 | chr2 | 111905647 | 111909691 | | BCL2L11(10018)[44] |
| 1144 | chr2 | 111923311 | 111927378 | | BCL2L11(10018)[67] |
| 1145 | chr6 | 39015036 | 39019117 | LOC100128655(100128655)[−9275] | GLP1R(2740)[81] |
| 1146 | chr6 | 39015532 | 39019577 | LOC100128655(100128655)[−9771] | GLP1R(2740)[45] |
| 1147 | chr6 | 39015904 | 39019955 | | GLP1R(2740)[51] |
| 1148 | chr6 | 39019794 | 39023856 | | GLP1R(2740)[62] |
| 1149 | chr6 | 39020326 | 39024379 | | GLP1R(2740)[53] |
| 1150 | chr6 | 39025543 | 39029589 | | GLP1R(2740)[46] |
| 1151 | chr6 | 39030288 | 39034322 | | GLP1R(2740)[34] |
| 1152 | chr6 | 39039838 | 39043884 | | GLP1R(2740)[46] |
| 1153 | chr6 | 39046467 | 39050509 | | GLP1R(2740)[42] |
| 1154 | chr6 | 39046707 | 39050753 | | GLP1R(2740)[46] |
| 1155 | chr6 | 39053249 | 39057292 | | GLP1R(2740)[43] |
| 1156 | chr6 | 39053855 | 39057923 | | GLP1R(2740)[−335] |
| 1157 | chr6 | 39054119 | 39058160 | | GLP1R(2740)[−599] |
| 1158 | chr7 | 44177539 | 44181569 | | MYL7(58498)[30], |
| | | | | | GCK(2645)[−4300] |
| 1159 | chr7 | 44178455 | 44182485 | | MYL7(58498)[30], |
| | | | | | GCK(2645)[−3384] |
| 1160 | chr7 | 44178553 | 44182598 | | MYL7(58498)[45], |
| | | | | | GCK(2645)[−3271] |
| 1161 | chr7 | 44182152 | 44186199 | | GCK(2645)[47], |
| | | | | | MYL7(58498)[−3236] |
| 1162 | chr7 | 44182364 | 44186419 | | GCK(2645)[55], |
| | | | | | MYL7(58498)[−3448] |
| 1163 | chr7 | 44183300 | 44187343 | | GCK(2645)[43], |
| | | | | | MYL7(58498)[−4384] |
| 1164 | chr7 | 44185650 | 44189685 | | GCK(2645)[35], |
| | | | | | MYL7(58498)[−6734] |
| 1165 | chr7 | 44197272 | 44201309 | | GCK(2645)[37] |
| 1166 | chr7 | 116591600 | 116595645 | ST7-AS1(93653)[45] | ST7(7982)[45], |
| | | | | | ST7-OT4(338069)[−307] |
| 1167 | chr7 | 116616378 | 116620420 | TPM3P1(252956)[−5344] | ST7(7982)[42] |
| 1168 | chr7 | 116621689 | 116625719 | | ST7(7982)[30] |
| 1169 | chr7 | 116639826 | 116643873 | | ST7(7982)[47] |
| 1170 | chr7 | 116654497 | 116658538 | | ST7(7982)[41] |
| 1171 | chr7 | 116659796 | 116663843 | | ST7(7982)[47] |
| 1172 | chr7 | 116698499 | 116702546 | | ST7(7982)[47] |
| 1173 | chr7 | 116702561 | 116706604 | | ST7(7982)[43] |
| 1174 | chr7 | 116724694 | 116728732 | | ST7(7982)[38] |
| 1175 | chr7 | 116726168 | 116730220 | | ST7(7982)[52] |
| 1176 | chr7 | 116751703 | 116755744 | ST7-AS2(93654)[41] | ST7(7982)[41] |
| 1177 | chr7 | 116753913 | 116757980 | ST7-AS2(93654)[67] | ST7(7982)[67] |
| 1178 | chr7 | 116761993 | 116766028 | ST7-AS2(93654)[35] | ST7(7982)[35] |
| 1179 | chr7 | 116763305 | 116767356 | ST7-AS2(93654)[51] | ST7(7982)[51] |
| 1180 | chr7 | 116763540 | 116767571 | ST7-AS2(93654)[31] | ST7(7982)[31] |
| 1181 | chr7 | 116768595 | 116772641 | ST7-AS2(93654)[46] | ST7(7982)[46] |
| 1182 | chr7 | 116770915 | 116774959 | ST7-AS2(93654)[44] | ST7(7982)[44] |
| 1183 | chr7 | 116772221 | 116776266 | ST7-AS2(93654)[45] | ST7(7982)[45] |
| 1184 | chr7 | 116803886 | 116807932 | | ST7(7982)[46] |
| 1185 | chr7 | 116813347 | 116817371 | | ST7(7982)[24], |
| | | | | | ST7-OT3(93655)[−7363] |
| 1186 | chr7 | 116815687 | 116819732 | | ST7(7982)[45], |
| | | | | | ST7-OT3(93655)[−5002] |
| 1187 | chr7 | 116826642 | 116830686 | | ST7(7982)[44], |
| | | | | | ST7-OT3(93655)[44] |
| 1188 | chr7 | 116827989 | 116832032 | | ST7(7982)[43], |
| | | | | | ST7-OT3(93655)[43] |
| 1189 | chr7 | 116842555 | 116846580 | | ST7(7982)[25], |
| | | | | | ST7-OT3(93655)[25] |
| 1190 | chr7 | 116859351 | 116863398 | | ST7(7982)[47] |
| 1191 | chr7 | 116864075 | 116868109 | | ST7(7982)[34] |
| 1192 | chr8 | 39769698 | 39773735 | | IDO1(3620)[37] |
| 1193 | chr8 | 39774381 | 39778422 | | IDO1(3620)[41] |
| 1194 | chr8 | 39778978 | 39783001 | | IDO1(3620)[23] |
| 1195 | chrX | 133592301 | 133596346 | | HPRT1(3251)[45] |
| 1196 | chrX | 133594974 | 133599024 | | HPRT1(3251)[50] |
| 1197 | chrX | 133595154 | 133599198 | | HPRT1(3251)[44] |
| 1198 | chrX | 133605384 | 133609413 | | HPRT1(3251)[29] |
| 1199 | chrX | 133619697 | 133623732 | | HPRT1(3251)[35] |
| 1200 | chrX | 133619814 | 133623856 | | HPRT1(3251)[42] |
| 1201 | chrX | 133632191 | 133636233 | | HPRT1(3251)[42] |
| 1202 | chrX | 146990226 | 146994269 | FMR1-AS1(100126270)[43] | FMR1(2332)[−1199] |
| 1203 | chrX | 146990317 | 146994340 | FMR1-AS1(100126270)[23] | FMR1(2332)[−1128] |
| 1204 | chrX | 146991666 | 146995715 | FMR1-AS1(100126270)[49] | FMR1(2332)[49] |
| 1205 | chrX | 146992919 | 146996964 | FMR1-AS1(100126270)[45] | FMR1(2332)[45] |
| 1206 | chrX | 147007767 | 147011816 | FMR1-AS1(100126270)[−6091] | FMR1(2332)[49] |
| 1207 | chrX | 147023640 | 147027686 | | FMR1(2332)[46] |
| 1208 | chrX | 147024121 | 147028181 | | FMR1(2332)[60] |
| 1209 | chrX | 154129833 | 154133877 | | F8(2157)[44], |
| | | | | | EEF1A1P31(553820)[−5221] |
| 1210 | chrX | 154195605 | 154199651 | | F8(2157)[46] |

### Further PRC2 Associated Regions and Target Genes

| SeqID | Gene | Chrom | Chr. Start | Chr. End | Strand |
|---|---|---|---|---|---|
| 815179 | CFTR | chr7 | 117136700 | 117136746 | + |
| 815180 | CFTR | chr7 | 117143005 | 117143077 | + |
| 815181 | CFTR | chr7 | 117181291 | 117181338 | + |
| 815182 | CFTR | chr7 | 117200864 | 117200924 | + |
| 815183 | CFTR | chr7 | 117204870 | 117204916 | + |
| 815184 | CFTR | chr7 | 117286463 | 117286531 | + |
| 815185 | CFTR | chr7 | 117302831 | 117302873 | + |
| 815186 | CFTR | chr7 | 117134700 | 117138746 | + |
| 815187 | CFTR | chr7 | 117141005 | 117145077 | + |
| 815188 | CFTR | chr7 | 117179291 | 117183338 | + |
| 815189 | CFTR | chr7 | 117198864 | 117202924 | + |
| 815190 | CFTR | chr7 | 117202870 | 117206916 | + |
| 815191 | CFTR | chr7 | 117284463 | 117288531 | + |
| 815192 | CFTR | chr7 | 117300831 | 117304873 | + |
| 815193 | CFTR | chr7 | 117148302 | 117148326 | − |
| 815194 | CFTR | chr7 | 117228715 | 117228750 | − |
| 815195 | CFTR | chr7 | 117229731 | 117229779 | − |
| 815196 | CFTR | chr7 | 117232568 | 117232614 | − |
| 815197 | CFTR | chr7 | 117260532 | 117260584 | − |
| 815198 | CFTR | chr7 | 117280931 | 117280967 | − |
| 815199 | CFTR | chr7 | 117296900 | 117296925 | − |
| 815200 | CFTR | chr7 | 117304311 | 117304363 | − |
| 815201 | CFTR | chr7 | 117146302 | 117150326 | − |
| 815202 | CFTR | chr7 | 117226715 | 117230750 | − |
| 815203 | CFTR | chr7 | 117227731 | 117231779 | − |
| 815204 | CFTR | chr7 | 117230568 | 117234614 | − |
| 815205 | CFTR | chr7 | 117258532 | 117262584 | − |
| 815206 | CFTR | chr7 | 117278931 | 117282967 | − |
| 815207 | CFTR | chr7 | 117294900 | 117298925 | − |
| 815208 | CFTR | chr7 | 117302311 | 117306363 | − |
| 868594 | PAH | chr12 | 103237900 | 103237947 | − |
| 868595 | PAH | chr12 | 103239302 | 103239344 | − |
| 868596 | PAH | chr12 | 103243417 | 103243456 | − |
| 868597 | PAH | chr12 | 103270854 | 103270932 | − |
| 868598 | PAH | chr12 | 103272048 | 103272151 | − |
| 868599 | PAH | chr12 | 103285132 | 103285154 | − |
| 868600 | PAH | chr12 | 103310283 | 103310328 | − |
| 868601 | PAH | chr12 | 103235900 | 103239947 | − |
| 868602 | PAH | chr12 | 103237302 | 103241344 | − |
| 868603 | PAH | chr12 | 103241417 | 103245456 | − |
| 868604 | PAH | chr12 | 103268854 | 103272932 | − |
| 868605 | PAH | chr12 | 103270048 | 103274151 | − |
| 868606 | PAH | chr12 | 103283132 | 103287154 | − |
| 868607 | PAH | chr12 | 103308283 | 103312328 | − |
| 868608 | PAH | chr12 | 103237237 | 103237282 | + |
| 868609 | PAH | chr12 | 103246085 | 103246108 | + |
| 868610 | PAH | chr12 | 103247903 | 103247930 | + |
| 868611 | PAH | chr12 | 103281391 | 103281435 | + |
| 868612 | PAH | chr12 | 103282675 | 103282692 | + |
| 868613 | PAH | chr12 | 103235237 | 103239282 | + |
| 868614 | PAH | chr12 | 103244085 | 103248108 | + |
| 868615 | PAH | chr12 | 103245903 | 103249930 | + |
| 868616 | PAH | chr12 | 103279391 | 103283435 | + |
| 868617 | PAH | chr12 | 103280675 | 103284692 | + |
| 899869 | CEP290 | chr12 | 88442999 | 88443045 | − |
| 899870 | CEP290 | chr12 | 88449482 | 88449523 | − |
| 899871 | CEP290 | chr12 | 88456477 | 88456522 | − |
| 899872 | CEP290 | chr12 | 88465619 | 88465664 | − |
| 899873 | CEP290 | chr12 | 88474127 | 88474168 | − |
| 899874 | CEP290 | chr12 | 88476609 | 88476667 | − |
| 899875 | CEP290 | chr12 | 88477171 | 88477208 | − |
| 899876 | CEP290 | chr12 | 88480171 | 88480217 | − |
| 899877 | CEP290 | chr12 | 88499877 | 88499936 | − |
| 899878 | CEP290 | chr12 | 88500553 | 88500598 | − |
| 899879 | CEP290 | chr12 | 88512420 | 88512456 | − |
| 899880 | CEP290 | chr12 | 88513987 | 88514032 | − |
| 899881 | CEP290 | chr12 | 88522734 | 88522780 | − |
| 899882 | CEP290 | chr12 | 88523504 | 88523548 | − |
| 899883 | CEP290 | chr12 | 88523600 | 88523646 | − |
| 899884 | CEP290 | chr12 | 88530462 | 88530514 | − |
| 899885 | CEP290 | chr12 | 88532498 | 88532641 | − |
| 899886 | CEP290 | chr12 | 88532655 | 88532701 | − |
| 899887 | CEP290 | chr12 | 88533289 | 88533320 | − |
| 899888 | CEP290 | chr12 | 88534203 | 88534270 | − |
| 899889 | CEP290 | chr12 | 88534751 | 88534796 | − |
| 899890 | CEP290 | chr12 | 88534984 | 88535049 | − |
| 899891 | CEP290 | chr12 | 88535711 | 88535752 | − |
| 899892 | CEP290 | chr12 | 88537115 | 88537171 | − |
| 899893 | CEP290 | chr12 | 88440999 | 88445045 | − |
| 899894 | CEP290 | chr12 | 88447482 | 88451523 | − |
| 899895 | CEP290 | chr12 | 88454477 | 88458522 | − |
| 899896 | CEP290 | chr12 | 88463619 | 88467664 | − |
| 899897 | CEP290 | chr12 | 88472127 | 88476168 | − |
| 899898 | CEP290 | chr12 | 88474609 | 88478667 | − |
| 899899 | CEP290 | chr12 | 88475171 | 88479208 | − |
| 899900 | CEP290 | chr12 | 88478171 | 88482217 | − |
| 899901 | CEP290 | chr12 | 88497877 | 88501936 | − |
| 899902 | CEP290 | chr12 | 88498553 | 88502598 | − |
| 899903 | CEP290 | chr12 | 88510420 | 88514456 | − |
| 899904 | CEP290 | chr12 | 88511987 | 88516032 | − |
| 899905 | CEP290 | chr12 | 88520734 | 88524780 | − |
| 899906 | CEP290 | chr12 | 88521504 | 88525548 | − |
| 899907 | CEP290 | chr12 | 88521600 | 88525646 | − |
| 899908 | CEP290 | chr12 | 88528462 | 88532514 | − |
| 899909 | CEP290 | chr12 | 88530498 | 88534641 | − |
| 899910 | CEP290 | chr12 | 88530655 | 88534701 | − |
| 899911 | CEP290 | chr12 | 88531289 | 88535320 | − |
| 899912 | CEP290 | chr12 | 88532203 | 88536270 | − |
| 899913 | CEP290 | chr12 | 88532751 | 88536796 | − |
| 899914 | CEP290 | chr12 | 88532984 | 88537049 | − |
| 899915 | CEP290 | chr12 | 88533711 | 88537752 | − |
| 899916 | CEP290 | chr12 | 88535115 | 88539171 | − |
| 899917 | CEP290 | chr12 | 88462087 | 88462133 | + |
| 899918 | CEP290 | chr12 | 88496147 | 88496188 | + |
| 899919 | CEP290 | chr12 | 88499934 | 88499980 | + |
| 899920 | CEP290 | chr12 | 88535092 | 88535133 | + |
| 899921 | CEP290 | chr12 | 88536167 | 88536208 | + |
| 899922 | CEP290 | chr12 | 88536495 | 88536523 | + |
| 899923 | CEP290 | chr12 | 88536556 | 88536624 | + |
| 899924 | CEP290 | chr12 | 88542150 | 88542215 | + |
| 899925 | CEP290 | chr12 | 88460087 | 88464133 | + |
| 899926 | CEP290 | chr12 | 88494147 | 88498188 | + |
| 899927 | CEP290 | chr12 | 88497934 | 88501980 | + |
| 899928 | CEP290 | chr12 | 88533092 | 88537133 | + |
| 899929 | CEP290 | chr12 | 88534167 | 88538208 | + |
| 899930 | CEP290 | chr12 | 88534495 | 88538523 | + |
| 899931 | CEP290 | chr12 | 88534556 | 88538624 | + |
| 899932 | CEP290 | chr12 | 88540150 | 88544215 | + |
| 962805 | CD274 | chr9 | 5443108 | 5443164 | + |
| 962806 | CD274 | chr9 | 5450978 | 5451029 | + |
| 962807 | CD274 | chr9 | 5452788 | 5452833 | + |
| 962808 | CD274 | chr9 | 5466094 | 5466139 | + |
| 962809 | CD274 | chr9 | 5466227 | 5466273 | + |
| 962810 | CD274 | chr9 | 5441108 | 5445164 | + |
| 962811 | CD274 | chr9 | 5448978 | 5453029 | + |
| 962812 | CD274 | chr9 | 5450788 | 5454833 | + |
| 962813 | CD274 | chr9 | 5464094 | 5468139 | + |
| 962814 | CD274 | chr9 | 5464227 | 5468273 | + |
| 962815 | CD274 | chr9 | 5457325 | 5457367 | − |
| 962816 | CD274 | chr9 | 5455325 | 5459367 | − |
| 981191 | ADIPOQ | chr3 | 186566782 | 186566827 | + |
| 981192 | ADIPOQ | chr3 | 186571631 | 186571674 | + |
| 981193 | ADIPOQ | chr3 | 186564782 | 186568827 | + |
| 981194 | ADIPOQ | chr3 | 186569631 | 186573674 | + |
| 981195 | ADIPOQ | chr3 | 186572161 | 186572189 | − |
| 981196 | ADIPOQ | chr3 | 186570161 | 186574189 | − |

### Single Strand Oligonucleotides (Antisense Strand of Target Gene):

[0251] SEQ ID NOS: 1211 to 497442, 815209 to 842011, 868618 to 887872, 899933 to 949635, 962817 to 976788, 981197 to 987384, 989617 to 989640, 989650 to 989675, 989676 to 1412676

### Single Strand Oligonucleotides (Sense Strand of Target Gene):

[0252] SEQ ID NOS: 497443 to 815174, 842012 to 868589, 887873 to 899864, 949636 to 962800, 976789 to 980845, 987385 to 989598, 989641 to 989649, 1412677-1914950

[0253] This application contains a sequence listing, the entirety of which is incorporated herein by reference. File Name: R069370014WO00 Sequence Listing.txt, Created May 16, 2013. Size: 315,306,652 bytes.

[0254] The foregoing written specification is considered to be sufficient to enable one skilled in the art to practice the invention. The present invention is not to be limited in scope by examples provided; since the examples are intended as a single illustration of one aspect of the invention and other functionally equivalent embodiments are within the scope of the invention. Various modifications of the invention in addition to those shown and described herein will become apparent to those skilled in the art from the foregoing description and fall within the scope of the appended claims. The advantages and objects of the invention are not necessarily encompassed by each embodiment of the invention.

LENGTHY TABLES
The patent application contains a lengthy table section. A copy of the table is available in electronic form from the USPTO web site (http://seqdata.uspto.gov/?pageRequest=docDetail&DocID=US20150232836A1). An electronic copy of the table will also be available from the USPTO upon request and payment of the fee set forth in 37 CFR 1.19(b)(3).

The application's sequence listing, which the Patent Office published only in electronic form, follows.

SEQUENCE LISTING (1914950 sequences)

SEQ ID NO: 1 - DNA, 71532 bp, Homo sapiens
gtataatgtttctgagatatttgatgattcattccttttttaaattaatttgtttatttttgctgagtagtatttcattgtatcggctcagcccatctgtcctcccaaatgctcatctctctagaactcacctaatcagagtctccaggaactggccttgttacctccagctgacctcagctgcatcattccataggtattaaggtgcagtgttacttatactcatctgtgggaagaaaaaataactgaagacttaagactcacttcttttttctttcattaacacagtttgtattgaaaaaaatgtttattctcctattaatggacatttaaggtgtttatggactgatgttatgaataagattgtcaggaatatttttgtggaagatgttttattatatcaaatttagaaacatttcaaccattacatcttcaagtattttatgtctcattctttctgacttctgagattccaatggcatgtatgttggattgccaatatattcccacatggtactgatggcctgttcatttttttttctctttgccccatttggaataatttctatgaatctgttttcaagattattgatttttgttccgcaatactcactctgctgttaaactcattagtgaatttttatctcaaatatcccattttttcagatctagaattttcctttcattctttcttaggagttacatttatctcagaaaatatcccatattaatctattatatccatttttctccttctatttttttttttttttttttttttttgagacagagtctcgctctttcacccaggctggagtgcagtggcatgatcttggctcactgcaacttctgcctcccaggttcaagcaattcttgtgtctcagcctcccaagtagctgggattacagacatgcaccaccatgcctggctaatttttgtatttttagtagagacagggtttcactatgttggccaggctggtctcgaactcccggcttcaagcaatccacccgcctcagcttcccaaagtgtggaattacaagcatgagccaccgtgcctggccttctccttgtaaattcttgaacacatttataatagttgtttttaaatctttgtccattaattccggtaactggtcatctctaagtcggctactgattgtgctttctttagatttggggtcacattttcctgcttctttgcaggtctaataacttattattgtacttcaaacattgtctataacagattttactttcttttgtttattttcctttcttttgtctggtggttagggtcagggtctagtcattaagattcctcctagagtcaggttgagcaggagctgctttacttagactgagttcactgtgcttagtccacccaccccatcacactaccgtctttattctttcagagtttgagctgtgaaaatggtgaactacagtttcagatatctttgattcacctttgggttgaactccagcgcagctccaaagtctatgcaccacaaggatacatgggaccatgcaaatttcctctgcttttcagtttccatgaactgctgctttcatagcaaaattctgggttgagggtaagaatcgctaggccaagtgtttgtttctgtgctaggagttcttcccaattccagtccatctggccatttttctcatcccttcaaagtctctccatctctgttaggcccagtcttctgtccacctgtccccaaaacaggcacctaccccatgtgtggaagcttctgtggatgttggcttaccaagaaagagctcatctctctgaaatcacttcattaacgttactttcttatgtatagtgcttttcagtagccccataaaacatctgatttttactttgttcagattcttcagtttgtaaccatggagcaaaattctcttgaatctatctacattttaactaggagccctcccagttgattttcagatcatttgggacaatgaagttgaatattccaggacccacttacacagaatttctccataataactttggactcttattgtatttttagttttggcagtttgtggggattttgcctcttgaaaatttttgactgaagattattccttcttgagtatgtttgcatttctttgggtttgtacttacaaaactaaactatcagttgattaagtttttttaatttattttatttatttattttttttaaacaggatctcactctgtcacccaggttggagtgcagtggcatgatcttggctttctgcaacctccacctcctgggctcaagcaatccacccacgtcagcctcccgcatagctaggactataggcatgagccaccactctcggctaatttttgtattttttgtagagatggggtttcaccatgttgcccagacttgtctggaactcctgagctcaagcaatccacccacctcggcctcccaaaatgctgaaattacaggcatgagccactgtgatgccatattttttatatgagaagtgtgcagctaatactccagctttattacaactacctaattgaatattctttcttgtttcatgtaaatgcctttgtctgtagaaaatgctactatgagcagcattgtggttactttaatcccattgccaaaacatttatatggtttcctgtattctaaagggaaaggtatatgcacttgtcttctttttaaacttttcctcttatgaatcagtagcagtatgaataaatgtcagaagttcttattaagtggttaatgttgatgcctctgtctcagcattcttgttttaggtaatgatgattaagcaaactttgtcatggaaataccagagttagaaagaaattgtatttattactaactagagaacccatgataataacaataatatttataaataatcaacctgcgccaagtttactaaatccttccatcttagagataaggaaggtagtatggcttggaagtggcaatgtcagagttcaaagccctttttctctaccaaagtggacattgtcaaaatacttagtaaacagccaaattgtgtactctttagttgaagaaaattgcagtagaaaggacattttaaaggtaaattttcttcaagtttaattatttagtgagggtaaacaaaagtgattttgttgttgtttggtaaggaaggcaatttctctattctaacatttcagattatgctaaatattgtttatcaactgaaggaacaaatcaacataaaatataatttaaattgattcagagaaaatattagctggagtcctgattatttaatagacctgtggaatgtcattttatgctaatgaaacttggttgcagagaaaaccaatgagaatgtatgtgttcctgggaccaggagacgcaccaagctaaggtctgaccctccctggaggagccagccagtgggcaatgaaaacaggaatggagctcccctttctagtagttgttgggtaaattgagagaagtagaatcacagcacacgctatgagattatgcctcgtgtgagtgtttcaggtttatttttctttcattgactgcttagtcaggcataaggactaagatgggaaattagctgccacagacctaccatctgatcctttacagaatgtttgtctaaagggaaagcaattcttcaggataagtgagcgaggaggagataagccaggccaaggcctctgtgcattcagcgagtttggaagtctgcaaaaagtgagaataggtgcaggttaactacttgattgtgcccattttcaccagtcacgatttgccagtccatgtgctgctcttttgaaggcacttgaattgtgtttgacttaaggtggtgatccaaagcagcagggaggggcctgttgaccagtgtggaagggcactcccaatttactgaaggagaatctgcagaacagagttgaagccttgtccttctgcaggtaaaggtccttctaggtcatcaagctggacttttcacatggtagctggctctgaagccgatatccttggcaccttcctccggtggcaacatcatagagtactcctgggcaccattactgccctggtcctctcagagaatctgagccagtgtggctgggcagatccatgttctccacactaggcacacacagaatacagattctgacttaggaagaacgtcaagggtcacacgtctgccacagtggtggaggcatttgtcagtgcagcaccacatatcctccagcaactggaagcagtgaggcactgggggaaaagatgaaggcaaaagggtagacaaggctttagaaaaaaaaagccctggattaaaactctagttgcatcagttacaagttatgtgacttaaattctttaagccttggttttctcatctgtaaaatgggttgatacctgatagagttgttatgagtactgaataagacagtgaacctaaagccctcctctgtaatctggcacacagtagttgtccaggaaatgtcagcatggggcagaacaccgaagaccttggttacatatgtaaagtgccatatgttgccacatagcattgttataaagatgctggagatagagcagactaagtcaaagacagctaagtagctcccttctgtacttcatgcctttacctgcctggccctccgggatggaatgtggaaagcatagatactgcacagcagagatggatccttggcaaaggctggagtaacaagctatgaattgttgattggggactagggttgcacgagacaagcatggaataaaggtggccagaggcacctgccagaatgccagttatgtgtcacagcagaagcaaaggtgataaatgacagccacaagtagcacagaacctcattttaccaaccactttaatcttattccctcatcacatcttttagattaaaagatgtttgttcattaattaaggttccccttcctgtaaagtttctagctcaaaatctagttaacctaaaatgaagtcaactgaaaaataatggacaggaaattacattaatggctcaccaatatctaacaatcccttagaaagtaagagttggctgcatagagattctttttggaaaggaggtggaattgattccttatagcaagtaagtttatttgttgttttgcttagtcaggttaaaaatttctatttctgtgcattaaccggtgataatgactgatacttattctgtgggcaggcagcctggacagttctttggctagtcttacctgggatcactcctgtggctgcagtcatctgagttcaacaggactaggatgtccaagatggcctctctctcatatctggcagtgggtgctggctgttggccaaggcaccttggtccatctctacgtggccttttgtcctccagcaggctagactgggcttctgcacagcaggtattctcacggttataggagagtgataatgggggattcaaagcttcttaaggcctaaactctggaaatcacacagtgacatgttccccatattctactggcaaagcaagtcataactcagcccagattaaagggatggagaaaaagactctaccaaggtagccagacgaaaggggctaatgaagggacatttcaagtttgggtaagggatttttcacaaaaaacagcatgtggtcatcttatgctgagaacaggggtgagacatatgggaagaggcaggaaaaccttctgcatggagtcctaggaatagctggggtgtccctccaagtgtactgggcacttcccaccctgaacatctattataggactaacaccatgccatgctgggaaaatatggtttgttcagaggactgcaaagcttagtcactgcccatccttggccatcctactctcccaactgaaataaggaaactgtagggagagtcaaaaagagcagaaaaataaattgagtactgcaactagatggaggtgggaagccaaactgatgttacaatttttccctcactcccaaatatacatattaatatagtcaaacacagtgtcatcccttgagggctgagtgcttctgctttctttaaagcagatattctcaaattccactcactggctatttccagtggactgtacattcttattgcttgtagagcaatagtgcccatgtttaggtttgaccttaaaaaatgtttttgcaagaacctataacttgttcatacttttttatttttaaagtatacctattcatttgtctttttcaaaagctggtgaattttctttgtaaagatatgggtaagcttgaagtactttgtccagcataaatgggtcataaactggcagggcagaggacccctacactatgtgcaatttttatgcttatagtatggaagcatgtttggtaacaaaactaaactttaataatacactgcttagccccatataaaaataccccctggtaataaaaatactgtaactgtgtaataatcaatgctatattatcttctcaagtttattttgtattaaagagatcatatatttttaaaaatttttaaaacgcctcaacagcttcacgatgtgagacctgttcctgtagtgtgtaccattaaacctctaaagtccagaattgtacctaacactgggtaggaatccagcataccatttgtgagtgaaaggatggtaattattattatcatcttgacagccaggaacagaggtgggtgggtacctggaatcagagtcaaacaataactaagagtcaaacaataactaacaggaatgatgccggatccgtccattgagacaataatcattctgaggtttctgttgcagtctaggaaaaatggagaaggctagaaggagtattttaaactgctccagaactttagatttagaaagaatcttggcagtcaactcctcttcacagccagttcatttttcttctctagggtgccattggagggcacactccctgaacacttatgagtgaagaaaccctccttttcaccagccattgggttccttttcaagtttatttttttaaaattttctttatattgaaatctgcctcatttaattcctacctctggccctacgttctgtttttggcaccagatagataaaacccatactctattttacactcattcaaatcattgtatttcccccaccggtgaatatattaccaaagttggttgagtttcataatgcaaacccaaagggaaaattatcttgaataatcatatgacaatatgtggaaagtttaggggctgtgtacgccacctcatggttttgaactgtgtggttaaagacgttgagagttgacagattagtcagggatttttcaagagtattaattacaaactttgaaatcttggtcagtgaaagttcattttagtgcatcttgcaaatacgatcaaaggtcttttcagtactgatttgatgatgcttaaccacagtgtgtgaagaatgaagtttttcattagaaattactggtgtaatagagcacattttcagggaagatgtattgttggactattacaattcatgctcttcccccaccatatccctaccctctatattccccatcccctatttcctccaccttcctccttgggacctcactgaaaacctgaaatgctctgaaaacctgaaatggcgttttggactgctgcaagggaaactgtgatcttaacaacatcagtgcggctcagacatgaccaccatgtgagggcaaaggtggggctggtgtaagtgatgttgttaaacctgtaaaaataaaccatgaaaacctggggatttactgtgatttggggagtgaaacaaatttaccactggccgaaaacttgaaaaatggagtacaatgtgtagatcagaagaaaagaaagccgtccctctgcccttgtgtagttttagaaaaacaatcttattagtttggtagctttttttcctgaaaataaaaaaaaaaatacattggcacctaagccatggaaaatgaaataaaaatacaccagtgcagcttccaaaacactgacttgcatctccctctcctatccgccgggaatgtcttatccctgccttccagtggctgccagaaccaagggcatccgcggcgttccttggcattggcgttaacagcagatggattttccgcagcggccaggcggaagatgcctagcattggtccgccgtctcactgtactgaatttcaagaatcatggcctactgccagccaggtcaggaccgaaggcgctagtctggggagactggagcaggtctctagtggttcacctgttcggaggctcttcctgttcagttccctctgcgcgccagagggtggcaccccaggcactccagaggtggagaggaggggacgacaggggaggcaaagagagaggagcggagggaaggaccagggaggaaggaccaaggagggagctttaataaattctcagaccttggtctcgagttcccggctaatttgggggcaaagccgaccgaccccacgtccacgcccacccccttacgggaaaagccggggtttccactgggctaggtgtcagagttgggaatgtctaaaacaaaaaaggcttccgagggttattcatggccaacagtttccacaggagaatccaaagggaaactagtttccggggccgctgtgtgtgcgggtgcttggtgggctgaaagctgctgtcactagatggctgtaagtgtgccaacatctgacctgtcccattgtgttgtgttttgcagttgctggatttgtgcgactcggtgaaggatgatgcccggagggtgatctcgacctttaacattccacacacctacctccacgcaccaatcgccggaatctccaacccgcgggccgcgtgggctttctaccctgcaccgctgcagccgcggccacgggaagaggcgcgctcccggcggcccaagctgggagccaagctctaacgggtgtggcgggaagtgtggtggcccgccagcagctgccacgacgctcgctccaccgacgcccagagctgtggccgaggccgggggctggcacccgctgggccgccactctcggggattttggtggcaaagcggaggtcccgccgaggctggcgaggtgcgcggctggctgctaggaaagagatccagacggtcgcctggtgcgctggatccctgtgccctttccctgaaacccagcctggcctgactgcaacctctcccaacttcagtgccggatcccctagacaatcagggtgggctccccgctgcgagcgcgccccacagccgggtgccgccaaaggtctcctgctgttagcggtgactcacattcccagtgatttagaaaaactgtggtgccgagtgaaagaaaaaaaaaaaagcaaacacccttagacaaaagaaaaaagctccactctttccgcgagcgggaaaaaaggtttggttcagcaagtgatgctatttcagtgaatcagacgctctggggctctgcaaggaaacgcacggactgggagaaggaagtgggagcctagagttttgctctcggcaaaacaagaactcggcttgtcctcccaggccggcggtttccgtacggcaagacaaggcgcggaaaacatttttaccatctgacgctgtagtctgtcctttagaagagaataggtgaaaagtttaataaagaaattaagcgatgtggaagtcgttcccgctgcttgcagagggtggggaggcgggcctgggcaatttcggaactaggagagaccacgtcggcaaagcctgtggtcccgaacaagggccatggatttcccatttctcagatcccggctgcccgacttcattcttgtttctttcagcacaagccatcctcccttctccctccctccacgtctcttggcagagacagaaagggacaccgctctgcccgcgtccagcgcgaaggaggtgacctaaaacccatgggcccttctcacactgcgttctctgcgctccggcccagttccgggaggacctcccgacggcgcgggagaaggctgtaagggctcttggcccccgacgcggcctgggtctcgggggacgcatgaacccgccacctctggccggcttccttttagtgccccaaatagcagcgcttagcccgttgcttcccccgactcttgtttttcaaagtgttcacagggtcgcgagagcgagcgacgcgggggcggcgaggctgcaaggctgcacaggaacagacgacaagaaatagggctttcttctgcgtggttcttttccggtccctgtctgagtcgcccgaccccgcggggagcgcggagcattgcggcgtgcggcgggcttcgggctctcagcccgcgcagcaagttgtgttgcttttccccgggtgcgacgcgggacggccgcgaagagcaaagttcgtccgcggtaggaacttcgaggcccggttaggaccgatctccggcctccgagtctacttagccgtgtccacgctcgtgccttttccctcttgcagcgaaataactgggcggggcccgacgcgcgtcctccagcgactccgggaacccaaggcctccttcacctcgctcaaaattcacccgaaaatgcgctgagactttggcatggggctgcgctgtgtcccactgacgttacagaagcgcttatgaatttaaaaactgctccaggcggccggacggcgggacaacgcctcctcacttgctcctctacggcaaggccccttccttctccctgccggctgcggtggtgtgtagggtggtccctttacagagtttccttaatccatctagcctgacctcacctgcgggatgttccatttcccgatccacctcccacacccccgctgcagttgtctagaagctggggctggggaactgaggcgcgggaggagcagacaggagggccggggttggggcgccagccacgcgttgggagagcagacccgggtgcagactcagaggactggagaggcggcatggagtttggtctcctgggaggtagagtgaggtgctgcggactccagggaggaaagggatgggtggggaggcgggaggggaggagggacggggtattttgcgctcccgcaccgcggcccgaactcagctgttctgccttcactggcctcagccagtcgagggagctcctacgaggttatctgcgagcccagcaaatcttgggggtcctagccaaatgcagtgcgcaacgttctctctcacttggaggccgccattcacctcgtttttttttttcctaaaaggatttttttttctgagtgcttttttcatttccctattttacctgctttgcacatgcctcccgccctcacccgggaggcggcgaagacgcccactgggaccgcgcctggccgttttctgggcgcgtcctgcccccacggcctctgtctcttagggcgactgggcgcggaagaaaagctggagagcccctgcggggtggcaggaggagggtgcctgagtcccgcgagaggcccgggcgaggaagatgcgcagcctgctgatccgcgtcccgcccggcgccagggaccctcagagggaggagagctcaaagacctcgccccgcgccttcgcgaggaccaacccagtccccgcgcctgccccagagcggcttagaaactcagggcacagtgagagcgcagggcgcctcccgaggcttcacaccgccggccgggccagcggaggctgtgaccggagcgccccctctgtgccgcgcacgccgcggccgccgccgggttggggtaggtgagcgggaggctagggtacacttcggggtgggggatgggcgcgcacatggccgccagcaggcagagttactccggtaaacacgccagggacggcggcgcgcgcgggaggcaacccagcggggcaacccccgcctttacctgtccgagcctgcacgcgccggcggccgcggcgccgaggggggcggagcttgccagcccgcgcgccggggcgggacctagcgggggcggggtccgcagtgattgggcgtaggagcggggccgccagccagagctgggctgcagggccgcgcaggtttcacttcgctccgcgcagccgcctggtctgcagtttgttggagctctgcgtccagcgccgctgccgctgccgccgccgccgccgccgccgccgccgccgccgccgccgccactaccaccacttgattcttgcagccaccctgcgaaccctgccacactgcgatcgcatcatcgcggtattcggttcgctgcgttcccgccgccaccgcctcggcgccctttcttggcccttgttcccccaaatgtctgactctgactctcggactgagaaacgcaaggtaaatacctccaaatcccggggcgcgggcctggcaccgaaggaagactagcgctggagcccgaacggcaccacctactgcccgcttcccgtgcacgtgcgagcggagacgcttgcatcggcgccgcttgtcgccggcgggaggtggggatccgtgtggatcgggttccctctcgggcaggttctctttaaagaaaagtcgttcacgcggaacctgcaggctcttggccgaagtgcggcttgggacgggatgctgcgcgcgggcctggtgaagggtcgtaggtccgggcaggaggagaggcagcgcgtgcctttcggcgccggcccgggagctgaggacctgctcgtagtatcgggctgtgcgcccagctggaaagtctcgccgccggctccggcgccctcagagtagcggccgcgcagtgtgagggtgtttcgtgtcttggttttttggggcgcgtgggcctgttgcggaggatttgcggaactgcggtggtgatttaactgacgagacacggcttttccttttactcattcaggccaaggtttcggggccactgctgcgttcgctttctcaagcgtacctggggcccctgcttgctctgcaggagtcctgcggcctgtgccatccgcacgattccctggcagcgagaaatctaggtcctcccctgaccacctggaccgcgcaggggactagtcgcggccggcagaacctgctcggtccctgggccgggctatcttagcggctcacgcatgcccgagcacacccgacccggttcgcggtgcaggctggcggcgccgtgccctctgggacctgttgccccagggttggcgctgctggtggagggcccgacggacgccagggcggagggtgtgaatttactcgatggtcgcggacgtgcgcgtccgcggccaggggtggctcttcggctttgactcgtgtctgcggcgcaccaggagagagaggaagttgttggaggagaatagttgccacagccagggcggtgacggccgttagggtctgcccccgacgggccaaaacaaggacaagtggcgaggactgggcctggggatggccctgcgggtccgggcgcggcgcaagtcctgctttgtctccaggtgactggctgtccaggacggcgggagctgctaaggcttgtgtccggaaggagcacagggatgggcagggtggccgggccagccggccctcaaatcctccgacgaagcggcagccgccacgaccacggccagagcagcgctcggaggcgagtttgtcaacaatcgcctcgcctttggcggcctgacccgtaggcgccgcccccaccgcggctgccgattggctgcggcgcggagcgaccgcgcgcggaccaattgggaacgcgggcacccggcgccagcggcgcggggaggtcggcggtgccggcggcggcgggcgcagagcgcgaggggaggagcgggaggaggcggaggatgttcccggcggctgcggccggggcagcgcgggccagaggcgcggcgtgcggagccctcggctgcccggcggagcgcggcggcgggctggcgggaaggcgcgggctttgcgctgcgccggggactctgaacccgagtcccgggctttgtctcctgcgctgctttcgtggtgacggtcagggggcgcccggtcggcgaagggcgcgggccggacgccgcggggcttggtccctggcccggacgctgcgctctgaagggaaggcgcggacgtgagtttcggtgtgattgccttctgaggggagggtctgtgggatgaaggcggcgcggcgcgcaccggtgtcgcctagcctgcggacctagttgtagaccttgcaggcgttcgcttcgtcgccctccgccgccccctccccatttagagatgtgcacctcacggtgtgcacctcagagaagttctgtctgattcggtgcggcgtgcggtacgggagcgggagggagggagcacgggcggagagagcgccagagccgggccgagccgcgctggagttacaaactctattgtgacgcacttactacgactgacggccgctgccagaccttccccagacttgctgccctcagcattttcggcaaacaatggggccggagcagggaacgcggccagccgcctgcaatcgctgcatctgcgcccgctcctgtgctccggcgtcctacctaaccccgggaagtcagagccgctgggagtttctgacttactcgaagaagtctgtcctgggcaaagagcacacacgaatagacttcagattagctgcttctctggaaacgcatgtgtgtgtgcaccagttccgcaagctgttgacattgttactgtattttgtttgggggtaccctctaccaaaaaaaaattacacctttattattttaggtgcaatttttttatttgggagattgtcagaaaagtatagaacaaagtatttgggattaaccctaagaatttttaatcgctaggtgagagctaatttgtttattcatcgatttttttttttgcttaaaataatcttagtttttattttacttgcagaaaaaaagaccaaatggcaaagcaaccttctgatgtaagttctgagtgtgaccgagaaggtagacaattgcagcctgcggagaggcctccccagctcagacctggggcccctacctccctacagacagagccacaaggtaatcctgaaggcaatcacggaggtgaaggggacagctgcccccacggcagccctcagggcccgctggccccacctgccagccctggcccttttgctaccagatccccgcttttcatctttatgagaagatcctccctgctgtctcgatcctccagtgggtatttctcttttgacacagacaggagcccagcacccatgagttgtgacaaatcaacacaaaccccaagtcctccttgccaggccttcaaccactatctcagtgcaatgggtaagcaatgcctgggtaagaggcagttgacgtgtggatggttgaatctgcttgaaggctgtgtgtggcatttaaaatccccttttaaaaccccgtaactgatttattccatctttagatgggaatggaggatgtgtcaaactatcaaaccaacttttttttttttttttgagatgagtcttgctctgtcgcccaggctggagtgcagtggtgcaatctcagctcaccgcaagctccacctcccgggttcaagcaattctcctacctcagcctccagagtagctgggactacaggcgcgtgccaccacgcccagctaattttttctatttttggtagagatggggtttcaccgtgttagccaggatggtctcaatctcctgaccttgtaatctgcctgtctcagcctcccaaagtgctgggattacaggcgtgagccaccgcgcatggcccacatcaacatttttacaaagttactaacttttgtggcagtgatgagttgaggtccaaacattagctttcaggtctgtcttcattaagctaaagtgtgttttaaccaccaggctttacatagtaatgacattttgcttgaaagggaactgatcatttacagaaaatagcttaataatcaaaagtgtaaagaaagatgacaatcatttttgaaaataacacttttaaaaaaatgaactagttcatgaaagcagtaccaacatagaaccatgaaaatggtttgttttctgcctaaattcctctttgtgcttattgctcagagggtttggacatagtactaatcagattaggttgtaggtttttatttcagggattaaaggcagtagtagggtttgaaccaagagtggctaacataaataccacagaggcccacagcaaaatcatggaaggaactgacctggtggagactggtaaattggagagtatttgccccttctatgtttgggccacacctaattgtggctgtgagggcatgtggtctcagggtgggttttcctatattgcaagataacctaggaatgcaaaattgatgccagataccctgtttcaacattgacagctgattcagattttgaaaacattgtacaagctgaaaagaaacatctgcagacttgatttggcccttgaacctacagcatgtgactttgggtacatactttgggtaaccttggtgaggggctgagtctgtgttgatcgacttgctgttccccaccaatggaaaaggttcatgtcttgatcagtagtcaatcacattgaccatttgtccagattagcttgccatacatgaacaagatagaagtaagttggtagagttatcaattaggaaacccagtacagagtctattataatttagattgtacctcatgatgaaggctaactcaacaaacccatcagaacagacactggaacaaaatgacatttctaaataccatccagctctgtcttcataggcttcagtgaggtaaatcaggcaggcctttgcccatgttatagaattggaaagaacctcagagtggtggtcacttgtcagaggttgggcacacctgtgaggtggtggggagaaatgacagacatcccagcagctacacatgctggctgcacgtctcttgccaaatgccaggaggtaattttttagggtccctccttagggaaaggggctggaagttttattattgctgttactactgctcgtgaactcatttcagccttagaagttcttggcttgtagtttttgttgtactcatgaaaatgctcccccatatatatgatcattctcgcttactataacatccttgcttactaaatgagttaacagggctttatggtgtgtatcgtgaaacacacgtgcattaaagaccctctggaaggtattagcttttcacactttcacaacaaaagcttcacacttgtggttattaagctattttctctaaccagttccctttcaagcaaaatgcatacattggtctctgtaggtgatgggttaatgcatggaaatagtttctccttccctggaactgggaatagtgggtgagatagtgtattttttaatgtaaagacaggcacaaatgctttttttgttgataaatactattttacaagctaattataagttaagcactgttacttgagatgaaatatacagggcttcaaagatcataatctaaataattatgcacagctaatggttatacctgtgaagtaaagtagtggatcctgaggtgtaattttatagtattagctgcatttcagtagatggtgtgatgaagagtttaatgcataggattaaatgagaagttacgaggagtttgtttaaagttaatgtaccgaggtaagttttcagtgttaagtttttgggagatttgttttgggagaggatgagttggggttgggggaggaaaggacttagccagatgtgagtttcttaaattgaagcataaaatttacaatttatgtagtccataattttctctggacattctacagtcttagttcatgcctgaagaccactgaaataatgctgagttgataagtggttctcttgactttgtttagtattctttactcaaccctatccatgaagttcttcaatgaagcttttgataatttattgcaaaatacattttccacaaagaagtcattatgattggtttgaactagtggaacacaaatgtgaggttataaagaggttcgccttagccaggggctcctttagctgcaaagcagttttttgctcagcaacttggggtagagatcagtgtgtcttgaagttttgttttgcaaaactttgttctaatgagaaagtcaagtcttaggaggaatgtatagtagttgagtgtttgtattaacactgttttcatattttccttttatgtctctgatttttctgaagacaagttcaaggaatatatttctctgtggggcaacagatacagttttttcacttttcctcaattttagtctccttacactctgggaggattaacttgacaaatgataccttagtgaataactgattatttttatcaaaatcactcacatgtgttggtttactgagtgcctttttggatgagtgttttatgccatatgtgtttttaatggaaattaaagtgtagtcagtacactaaagtgtagtcagtacaattggaaataagagttgagaaaagtcaggatatggaggaatgctccctagtgtcatgttagtaaatgtcttaaattttatacttgttccctggcacattggaattcacagatgggagttaatggctttctttttttttttttttttttcctcagcgtcttgtgggtacttctcttatagctggtacttgtctgacccctcctttagtttgtgagctccctgggcggggaataatggcctgcagatgctagcgagtgcctgacaaagaggagaagcccaggagatgttgagagtcagtccagctctgcctgttagcctttcagacaaataaagttgaagaaggcaggtagcaagaaaaagatcctgacctctgctctgccaaagtgtttttaattacctggatctagctgtaaggtttgccacgtagtggtgacagctgaggtctagctcagcactactcagcagggaagccacacatgcattaagcacttgacataggactagtctgaactgagttgtgctgtcattattgatacacactggattttgaggagacaaaaaagaatgcaaaatagtttaattgttttcatatgggttacatgttgaaatggtgttttaaatatataggttaaataaaatataaacttgtattgcagttaaacacaaagcgtaaaatttaccatctgaaccatttatttctaagtgtactgttcagtagtgttaagtgcacttattttgttgtgcggccaatctccagaacttcttcaccttgcaaaacagaaattctgtactcattaaacaactccccatttccccctccccccagcttctgacaaccaccattctattttctgtctattaatttgacaacttcagataccttatataagtgaaatttatatagtatttgctcttccatgacaggcttatttcacttagcgtaatgtcgtcagggttcatttatcttgcaacatgtcagaatttccttcctttttaaggctgaaggttgttccagtgtgtgtatatcacatacttcatttatccattcatccatcaggagatacttgggttgcttccactttttggctattgtgagtagtgctgctatgaacatgggtatgcaaatatcttttgggggattctgctttgaatttttttggatatatacttggaagtggaattgctggatcatatggtaattctatttttaattttttggggaaccatcatgctgttctccatagaggctgtgccattttacattcccaccaacagggcacaagggttccagtttctccacatacttaccaacacttttttttttttttttttaacagtagtcatcctagaggatataggtgatctttcactgtgctttggatttatatttactggcttagatttgtatggccaccaccatagtcaagatacagaacaactcaaccacaaggatttctcatgatacctttttatagccacagccacctctctccctcttccttgagcattttgtcatatggtcattggtgattaaataaaatgtattttaatattgactttctctgtttctttctacctttttaaacatggctactagaaaaatgcacaattagatttgtggctggtgttctgtttcatctaaacaggctggcctcacagaggagctggagtgtgcagtgctgctctagcaagccaggcttgactcttcccactcagggcacatcacttccatgaagcttactccttgggttgtttggttgacttaggagaatggaagtgattagcagaatcttgtaagcattttaaacattaaatgagcattgtaaacagcggcattcttcaggcaaatacagttttgttttacctctttaaattccatggtatattcggacttcaaaaagtagatggtagagcacatgctttctcagcaccttcaggctgcctggagcctcccaatagaggtgtcttcgagggagtcccagctctgtctctgaaaccccaaagttacttgtttgacaccaagagaaataaggaaactttttaggtcctaagtggggagagaaagtgctagaagagaaagatatttttctttactagttccaaacacatttattaattgttagttacccaattttaaatttacatcttaaaaaaattttttttcagataattacagattcacatgcatttataggaaataatacaaagaaattgtatatgccattcacccagtttcctacgatggtaacatcttgcctaattatagtatactgtcacaaccagcagttgacattaacagaatccatctactgtattgagatttcatcagtttcacatgcagtccatttcatgtgtctgtgagtgtttacttctattcaggtttatcaaatgtgtagatttgtatggccgccaccacagtcaagatgcagaacaactccaccacaaggatttctcatggtacctttttatagccacagccacctttctgtctcttccttacccatgataaccactcatctgatctacatatctgtacttttgtcatttcaaggatgctgtataagtgtaatcatactgtatgtgaccttttgagattggcttttttcacttagcataattcccttgaaattaatcggagatgttgtgtaacaatagtgccttgtttttttattgctgaatagtattccatagatgatgcaccacagtttgcttagctattcacctgttgaaggacactgtgtttgcatgttctggcaaggccctggcacagctggaactcagggaggattaaaagaagtatttattgtacttttacttctctttttttttttttttgtgacagtctcactctgtcacccaggctggagtgcactggtgcgatcttggctcactgcaacctccaactcccaagttcaagcggttctcctgcctcagcctcccaagtagctgggattacaggcacgtaccaccacacccagctaatttttgtatttttattagagatgggtttcaccatgttggccaggctggtctcgaactcctgacctcaggtgatctgcccgccttggcctcccaaagtgttgggattacaggcgtgagccaccacacctggccctacttttagcatctatgtgttcacttgtagtatatagaaatacaattgatttttgtgtgttggtcttctgttgtgcagtttgctgaactccttaattctaagagtttttcatagatttcctgggaggtctatatagttatgtgatctgcaaatagggacagttttatgtcttctttctgatctgtgtacatttctttttcttgcccagttgcaccagctagaatttctagtgtttatgttgactaggagtggtgagagcaaacatccatacctagtccccaatcttagggggaaagctttctgtttttaatcattaaatatgatgctaagtgtaggttttatatgggtcgtctttaaaagaatgaggaagttttaacctgtattcccagaatgctgagagtttttgtcgtaaatggatggatgttagattttataaaatgtttctgtaccagttgatatgatcccatgatgttaatttatattaacctgttgatatggtacgttccattgatttgcaatgttaagtctctcttggatgtctgagacaaatcctgcgtgggtagggtctgtaattctttttgtgcactgctggattgaatttgtcgatattttgttgagagtatttgcgcctaagttcttgagaggggtctgtcgtcttcttttaagactggtttttatatcagaaccttaattaggaagggttccctcttttattttcaggacgatattgtgtaaaattggtattgattcttttctcaatgtagaattctgtagtgaaaccatctaggccaggagattttttttttggcgggggatgggggcgggggtgggggggatggggggcgggcgggcatttagattatagattttttttttcttagtttttgtaggattgttcaggttgtctgtttcttcccagttgagttttgatagtttgtagcttttgaagaattggtccctttcttctaagttgttgaatttatgaatgtgaaaagtatttgtagcattccaatatttttaatggatgcaggatctgttgtgataacccctgcttcatttctaatactggtaatttgtgtcttttttatctctgtcagtctttccaaaagtttatcagttttgatttttttaatcagctttttgttccactgatttttctctactttcctattattaaatttattgtttattatttccttttgcttgctttgtgctaggttcttttcctagtttcttgagacagacacttggaataatgttttgagacctttcctctcttttcttcttattgttttctcagaaagaaacatttaataggtatttacaaacagaaaccctatctcgggcagcctcaagatgagatggtagatccgtgcatggttacactccagacccagggcttatgagccatagggaaagtgtatatatgcttcagaagggatgtataggacagttggcttaagttcaggatttatggaaagataatatcaaactaaggacaggattgatggtaagtacatgctcatacccaaggaacagtagataaaatagaaatcttggaggcattcgcaaaaccagggttaatcagaagttaacacagcagattagcatacaagatggagttgtttggcctccacactccagctcccaatctggctcttacagtctcatgtgccttgctcttctgccatggtccctgaaccttcagtgggtgtgcttcattttgtatagctttaccagtagtgccttggcaatggaaaataaatcgggcacagtggaattccaaatgagggagattctcaggctttgttgaatcatttgtagtcctcagaataccatgattctggttttctgggaagaagtaaaacgagataaatactgttaatatgcacacaaagattataatgaaaaagaacatgaagaaaattagaactcggttcttctttagagacttgtagctaggaagtaattcaggatgcagtttgagttgtaggcaaataataaaaactcaaaaataatggttagggctagaatctgttaacaggtattgtagttttctttggagcacatttttttctccagtttccccattcctaccaaggaccaatttatttgcaaaatacattttagtctcattatacttagcctgattatttgcataaagtgcaacaagaatagtgattggccatataggctctttttaagttggctttgctggaattttttcataaggaatctcagattagacttttagaagcctccaggcttgaaagccaagctgaaaatttgccagcaaacattgcctgtaatacctacagatcgggtgaattccattctcctcgaggtcccaaagtatcttgaggttcctgggcctgtcggaaaatgacattctttgcttatcgaagatcaggaaccttgtaagggaactgtgtagacaaggtaccaggcctgtcttttttcaaggggctttttattctttaaagcagtctggtcatatctgaaaatacgctattcagtcaaagccttggtaaaataacccatgtctccaattgcatatagaacatactctatacaatttcagttcttttaaatgtgtcaaggtttgttttgtagctcaggatatggtctattttggtgactgaacaaaagaaaacagattcttaactgaacttatgcaaataactatattgccataaaataagaatactcatgagtagtttccaaattttggagaactcagaaaggtaaattttgctcatgaaagtatactttactcaatcataagctataaataactcaaaagcaaaaggattttcttcaattagaatggcagcctgccaaacagcgtgctgtgcattcaccttggaactgccatccacaaaccaagcagccatgtctcaggagcagagatggtggagtcttaccccctttcgcttttctaatgtacgcatttattcagcgctagaaatttcctttccaccactgcttagctgcatcccacgtgttttggtatgttgtgttttcattttcattgagttctgtctatatatttttaaatttcctttgagacctcctctttgaccctaggttatttagaagtgtgttttatttccaaaaatacctaagtgtgttttctgttactgttttctttctgattctgttatggtcagagagcatattttattctatttcggtttacaaatgtgtcgagaatttgttctgtagctcaggatatggtctcttttggtgactgatctatgctgcttgggtacttgaaaacatctgtattctgctgctattgggtagagtgttcgttatatatacatctttcagatcttactggttgattgtgttgttcagttcttctctgtccttgctgattttactgtcttgttctgtcagttgctgagaatgtggtgctgaaatccccagctgtttcctttcagctctattagagtttgcttcatgtcttttgaggtgctgctgtttggagtttacacatttaaaatgtcttcaggttggatccaatcttctatcattgctgtaaaatgtactttatctggtattaatagcacttctgcttttttaacattaatgtattaatgttaacatagtattatctttttccatcctttcactttccatctgcatatgttgtatttgagataagttttttatatatggcatgtctttagataaacctgttttatctagtctgcccaatctgtctcttaaatggtctagaccatttacatttaagataatatatgtaagtctaaatgcctttttgttatttgttttttgtttcctctgttccttgtttctttttttgttttttaaccttactgtgggttatacgaacattttctaggatttcgttttgatatgtttatggtgttttaaaatatattgctctgtatcattttcttagtggttgttccaggtattacagtatgtgtgtgaaatatatattctaagtctactggtatcaatggtcacagcattttatgatgggagctgaagagtagaaaccttacttttctttaggctccgttagccccatttttccaatataattgtctgaagtatttcctccatgtacattgagcactgaatgagttggtattgttatttttgcttcaaccatcaaatatgatttaagaaagtactgttagtctaccaatagtcgcttccatttttccccttccaatgttctttcctttctgaagttctaagctttcttcttttgtcatttcctttctgtttagagaacttccttagttctttaatgataggtctgttagtaacaactcctctgagttctccttctgggaatgtctttatttccccttcagtccagaaggatatcttcacggaagatagaattcgcagttgatgtatctctttcagtacttggaaaacatgccactttcttagggcctctatggttttagatgagaaatcccttgtcatctgaattggtgttctcaactaagttatgtgtcattcctatgtggctgctttcaagattgtcttttagtattaagaagtttaattgtgatgtgtcttgtcatgggttctttgggtttatcctttttggggtgcactcagcatcttgaatctggagtttcacgttttatgccaggtttgggaagttttcagccattatgtctttaaatacttttccagtcccttcctctcttttggaactctgatgataagaatgttagtgcttttgttagtcctgtaagttcctgagactgttcatttttttccagtagattttctctctcttcagattgagtaaattctattgattttgcctcatattcactgattgtttttaaaattatgtttaattatatttttcaattctaagatttctgcctgtttctactaggtaagttggaagttcagatttctccttggctttgctggtactttccaaacaaaagaggggccccagtgcacactgctttattgtgtccagttgttgggggagatgtgtaagcttggctccctcagccactgctgacaccaggaagcagggagaccatagagggctgcctcataccttgtttctgcagagtagaggtcagaactcagcttccctctgagggaagctgaccccaccaggggtgggggggtcaggtacaacatgccaaccaggcccactttctactacctgattctccctctttgatgctagatgggagagttctcttttgttctctttaattagccagatggggcgaagactcagtacccactgggtgcccagacacccaaggctggggctgggagagccgatgggcccatgaaccctgttttgcactgtctggttcagtgggtgtgtgtaatgtcatgtcaactaactaaccccaccttgtacccacccgttgctgtttagtagaggtggaggcttagctcactgctcactgctcagccccactaatgtaaccctgggaggggatgttagataactgccctactaacactgctttggcagggcagccggatcacctctgcctgcttctgccagggagggtctgggagatcggcctgctgacaccatctggtggtggaatcagagcacctcctgcttcccctgggctggggatgggctggaagatcaactccccactctggccacgcggtgctgtggggctgctgccaggggcgttgtggttttcccgttgctgtttggctagagtagggcaggagtcatggagtggttttctgttgttaggtcaccctcttttcagtcccttggcgatggagaacaggcctcccatggagctgttatctacgcctcttggaaaggcccagttggaggtttcttctgcagcatgctgtccaggatacatgggagtgaggaaaacggcatactccctgtccgtcatccctcaagtcctgaggtccccagcagcctgtcctatttcccgcttcagttttcctgggcctgcttgctgtgttctctctagggttgtctgaggttctgtctcgggttttcagttgggagaggaaggacctggggagatggctcctccaccttagtggaactagagatctgcagcttcctttaggtgtttatggtggctatttgtcttagtccctttgagctgctctaatggaatacctgagactgggtggcttacaaacaacagaagtttatttctcacaattctggagggtgataagtacaagacaaaagcaggtttggtgtgcggtgagggccacttagacggcaccttcgagctgtgtcctcgagtgatagaaaatgtgagggtttctctggggtctcttttgtgagagcactaatcccattccaatggccccacctcctaacacccatcactttcaaggtcaggtttcagcgagagttttgggggcatgtaacgtttataccatagcagtatcagttggctctggctgcaaagactactctgaattgtagaagttacttcttcactcctttttactctccatgtggaataacagacttacaatgatggaaagagatttagctgtgatccaggccacctttttcagatgataaccgtaatatctattgctgtaactccactgtgtgtgactctcatggtgtgaccatagggcgtgctctgtgctgctttcgaacatcactcctgaaaatggctgggtaacccaattccgattttatatgccttaggggggacttcttactaaagattcagacttgttttatatttagagtacttgtagtaggtttagagatacacacctaattgccagttgaatgctgtacattctgatgccttgctgcttcacttactttaaaaccattaaatctgatcattggcccagtctccacacacctcatgtctgtggtcatcctgcctgtcacaggactcgctatgaaccaccacctctccctgcccatctccacctcccgcaccagaattaagttgtctccattccttctttgttagaccagcctcagtctcttggtgtattcctcatgtggtgacatttctagcctaatccacttctggtccctgctcggtcaatggctgagacttgtgctggggcatctgacctcagactgctttccttctctgcaagtctcatcacacctgtccttggagacctcacaggcttggtcctgtgctgactgtaagctctgtgccacccacatctcagaccctgcactgcaggcatagagcagaagatgtaacattcctccccacttttttttttttttttttttcaggaaatgctagcagaaacatatatgcaagggggttcatcacagcattgtttatacagccaaacgactgtccttggtcctctaatgggaggggagaatctacattattctgccctttttttggcagactggtgctgtcttcatggtgttaaaaagaataatggcataggggaaatgcctgttggcctgatgttaagttttaaaaagctgcaagattatttatgatagtctagtttaatattaaagaagttcattggcatatcaaaaatataagaatacattaaactgtcagtagtgggtattgttgtattttcgttacaggtgggcttttctcccttttttctttctttctttctttcttttttttttttttttgagatagaatcttactgtcacccaggctggaatgcagtgccatgatctcagctcactgcaccctccacctcccaggttcaagtgattgtcctgcctcagccttctgagtagctgggattacaggcacccaccacgacgcctggctaatttttgtatttttagtagagacagggtttcactatgttggccaggctggtctcgaactcctgacctgaagtgatccgcctacctcggcctcccaaagtgctgagattacaggcgttgagccactgctcctggccacaggtggtcttttctgtgtgcctttgtgtatgtacacaattgtcataactagtattatgtttataatcagaacagatttaatagataatacttactaaaacttttgctctttataattttaatctttgtttttggcattcccagcagcctgtcactgggcatgcataccttgtttgtgtgattcagtgttaaccgttgtgtcttttgcattgttgaagattttgtccaggctgatcaagctttggtcccatcaggaccatcaccgaaagtactcggggtgaacattagccccctaatttactcttttggggtctgcctttttattttttgcaaagtgagtaatctctcagggaacatctccatcggacaggatcatggatggatttggtgttggcaggttgctcttggtagctgtctcccccacaggctgctcttgggtctggagcaggttttgggtcgggtcctgcctgccctccatggaacctgggcggagcagtgagtctgtctgagcttcagcttcctcagccatcaagtgaggacatagtgctcacctctgagggtcatggggagtttttccataagcaaatcgacagaaagcccctggtagaaactcgcacaggaatctttccttgcccctcaatgagccctcagccctggcaggttagtgagcatgactgtaatgaagtgctctctactgctttccgtggaaaggagctgtcgttccaggagtataggaaactcctagggaagtgaattcatctggaaatgctactataattctaatcccctgggtcccagaacaaacaagcaagcaaaaaagaacatcttttctagaaagtggcctggaggggggcgtgggaagaggaggtctgaatcacccctaacctgccagtgaaccaaacatcacctgagaagaacctcagcttcttgggtaaatcatggagagacatctggaaacctgccccaccccagcgctgtctgaattgggggtgagttggggacacctgctggagacggcccatttgatttggcagaaacttgactataattcaaaatgtgtcttgagacatgagacatagactcaagtactttttcttgcaatccaaacttacgtactttttcccaaaataagggatacattggttgctcgtggatttaacattaggagtgttcattgtgtgaatgaaatcaagacttctacaactgcgttttccttcttttccctgaggtaattaaactcctttagtgagaagacaatttagacagactgttggccattgataatcaaaattttgatatttctaagtgagtgagttatggatccttcttcttggtaaccttttttcacacactatgaggtagcggaagtaaaccgtcagtataaacaacatgtacccggtttaacccgtttgtaagaggccaggccttcgtggttttaagtatttgcttagaatgaatttgtctccccagtgtcctctgggaaaccaaaatgtgctttgtattttctcttctctgccttggaccagatccacatgattcgtgagtagagttgccaagacaggtgtggcaagaaatagccctgagacagggctgctggcacgcagctctcctcctgttctgcctttctgtgtggaccacgaggcagcagtgagggcttcccatggagcatgtctccctttcagtcacacatcttgcgctcacagtcactgccagccagttgactgcaagtgctgtgtctgtaaaccttgcagtggggacttgacattgctttcagagtgaggaaaccgaacttggggatttggacatgagtctgggctgtgcttagtgttggagccccgggttgaacttgggtctttggtactggcagactgccctctgcacagtacataatgcttggtttagtttggacttccctttcttaggagtgagatggttttgaagctaaaatttaaaaaaaaaatcatttcaagctgataagagtgtgtgtgttaaatggaaacacgttcaatataaggatttcagctatttgaaataccttggggccttttccccccaaaatatattgtattcctgggtcataacatgcttcccattccagttcctaaaacattttactattagcagtttatagaagacttacggagtggtttgatacttttttcaaagaaggcagcttaagtggatggaatctgattttctcttaggcacgtgcatctgcgaaggtgtctgaggtgagccaagctcgataacctgatttgttgagtgagttacttttctgtgggatgtgtggtggagaaaagactagaagtgtattttcttgttgatttgtctgttatttggtcccttgagaaaggcattaacctgaagtagtctatagtgaattctgaatagatacaatgttagtatatatgtgagtttacacctcatttttgctgatacttgatcataaattctactaaattagtcaaaacaacaacttaagaaaaagtttgatacatagcaggagtgcaatatttgttgatttaaagagactctcattagcgtttaatgcaatatacgagtgccaccagttccttctcttttcacttggatttcaccagggtgctcatttgaagcttagaactctgtcctcggcaaagaaagcctggcatacactgtacaaggtgttgactcatctttgtgttcctctgctcctctagtgtgaggtgtggagtaggaggttccagcaggtgacccagcccagccttggtcctcccataggcctattaacaaccctggggcaaatgccttagcctgcctggaaatctcagtgttagggccatggcccttccgcagtggtcatagcagtgtagggagttggtgcctatggggaactggcctacattgagttagaacaatccacacgtatgtttattgcggcattattcacaatagcaaagacttggaaccaacccaaatgtccaacaatgatagactggattaagaaaatgtggcacatatacaccatggaatactatgcagccataaaaaatgatgagttcatgtcctttgtagggacatggatgaaattggaaatcatcattctcagtaaactattgcaagaacaaaaaaccaaacactgcatattctcactcataggtgggaattgaacaatgagatcacatggacacaggaaggggaatatcacactctggggactgttgtggggtggggggaggggggagggagagcattgggagatatacctaatgctagatgacgagttagtgggtgcagcacaccagcatggcacatgtatacctatgtaactaacctgcacattgtgcacatgtaccctaaaacttaaagtatataaaaaataataataataataatcccaattcttgtgagtttttttttttttttgagacggagtttcgctcttgtcacccaggctggagtgcaatggtgccatctgagctcactgcaatctccgcctcccaggttcacgcgattctcctgcctcagcctcctgagtagctgggattacaagcaggtgccaccatgcctggtgaatttttgtatttttttagtagagacaggttttcaccatgttggccaggctggtcttgaactcctgacctcaagtgatgtgcccacctcagcctcccaaagtgctaggattacaggcgtgagccactgcacccgaccagaacaatcccaattctatctgtatcacacagtgtgtttctcatctaggatacagactcactgggcagcagccgtgtctgccctggaaagtgggggcatcagggaggaggaggaatgtgtgaacctaaacacatggaagaccttcaaaagcaccagaacacagtctttcagcacagaattctttacatccttaacttgcacttgtgctaatgaagactctacctcctgttcttttccttctgtgacaaaacaagttatctgtctgggaagacatggcacaatttatttatacaacatttttatggcttgcagatgactccgctggatcctccctcagaattgcccttcatagggaagttcagtggccactcaagtggttagcaaaatcaaggtgaaaagtttttctttttattcaaaatgggataaaaagaagcagctgccttttgtgacttttaagtgagaagctttcattatgtcttagccctacagtgtgttatcaataatcatatctgtgttaaattgtacttcactttgtatatcaccattgtaagttttaaccgtatacattataggctttttccatttttattttaaaaactgtttaaggtgtagctttttaaggattctgtttttgctcttattttttacctgtgtcttggtctttcttatcatggaggtgaaaacagtaatactgaagaccttaatgtgagtttaggagaaaagatgttaatcaccagtttcctgctactggttttaaatttcatagaggaagccacacttattttgtcatcagaaattcttatattttttgtttaaattctcatctccctcccctcttgcccagatctggttttttggctagaaacaacttacagtaacttcaaattaagcattttaattctaaggaatggtcttaagtgaaccaatgtatatagagttttatctttacttttaaaaggtctctaaagcatttttcttcttatggggaaataaattgggtagtttacctcgtcagtagaaaaaatatagggatttgtgtctttgcactaaagtaatttcagggttggtcttcttttagctgtccttagttttgggattatttttgtttttcagaataaaatggcacaggtcagatacttttaatcccctgaaagtaatctaaagctatagaaatggagctgtggctgtcgcagagacttactaggatgaaggttggtgtagaaaaactaaggagtagtagcagtattcagtgtcccgtgtctttccccagaagaacactggcagaacaccaggggcagaacactgtcacacactattcagagcagcgatttcaggagcacaccaaggcgggccaggtggtcaaggggcttcccaggggatgtcatacaaggcacatggaaagaactggtttaggaccaggtttggcacaggttcactgacaaaaagtggggtgatgattgagagggatcatagatttcctttatagtcccaggggcagaatcaagattgaagtggggcttagaagggaacatttcaattccctacgaggaatagcatcgtagcactcagtgttcttcagcgaggacagcagtgccttaggaaatgtgcatctgtcccaggaagcgggcacacaggctgggagtcttagagggctcctgctcaggtctcccacatggtgcaagatgctgggcttctgtcgtgactcagctggggatgtccttgagtatagggatcacagctcagtctgggtttgctcctggcttgtccccagctgctagtaaatatgttaatatgtgtgtcggggacagctctggtgacatggataattagtttttctgatgttgaatgagaaatgagtaaaaaggcataacacattaatcttaatgtctttagacttgtatttttattataagggacagataatagtgaatgagggaaaaaatctcatgaacactagtttccagacttctgtccaacttcacagccttggtttactggcagtttccaaatggtcaggctggaaattgatgaaagctgtttcttttgaccatggctccataaaggcaatgggcagtgcacgttgaaagagtaagtatgaaaacactggcctcatctcataaactttattattgatagtattttatcctagcagctgtttttgaagcactgtcttgaattcatgtgactgcccaggcttttgacacaaatgtgttccagggagacagattgaggaatctttgagtactaatgctgtcatcgtatttctcatagcttttgttttcatccagtggctcagcggaattgattgggattgccaaaaaataaaatgatacaagtgagaaatagacctggagggaggtgtgtgtgtgtgttgttggttacttgcttattttatttctgagaaccgtcagagttgaggatttcaaacatgattctgatagcatttaccgcaaacgctgatggcagttgctctcctttgccttatagctaactgggactagaaacagctccatcacccaggtgagttttataaggaaacataagggggctggtctgttgcttccctcctcttgtaagctttggataactctgaatttagaaagatatttctgaagatatttaaagaaggagacttacagagttgaataaacatcctggaatttttctttctctaaatgaatgtcagcttcagagagcccacctgcagacagaggcagtgactcccctaaacattttcggagtatctcttggaattggtttaaagctggtttcagagtccacaaagaaatggccctttacaggatcctttattgcttttggtggttaaagcagaatctctctggagagtaaaggtagacagccctgcaatgtctgaaggacaggccttctttctcctcacacccctgcagtccctggctgtgcctggctgtttcccgcaagtgccagacagaatgtgcactttttggctaagtatgttctattatgtgtgtaaaatcctctctcagttctgagttgaatatcgattcaaagcttaattcacgctgatgacttgaaaatctaatcttgattctactcgagtgtttgtagatatctgaacatctgaaaacagtacagagtgcagcgttcctgtgaattttaatttggtttctggtactacacttgaaattccagtaatgataagatgggaactaaaacagcagctgcccctcggaaatgagggtcgcaccacctcgttcccagactgaggctgcagttgagaatgcttgtgtgtgacatgcccctgccacccagtacacacacctgagtcattagatgtcactttatggcatcgtcacagagaacaactgggttttggagagagaatgtcatgatgtgacttcatttccttggagcactgggatagaggctcttgggttagaagctcttggacattaaagagaaatcagaaggtttagcctgactgatactgagctcattatagattgacaatctctctttttttaaaaaaaaaagtttcctgccgtggctgctgctacagaaagtcctttgtgaaagccccagcctgatttcactatcaaccacttaaccacggtattaatttttcagttgttgaacttttaagattttaaattacttaagactttaaaaatagtctgttgctgagccagaatagtttgttaagaaacatgcatctttgagtagaactaaagtcccttggtgttggaaaatgccctccacactcctccaaaaatggattaagaatacttcatggtattttcccataggtagtaatgttaccagtaagttccgggcttcaaaaaatgatttctaagaagtttgaagattcagtggacacacttttggcaaaaattgcttatatctgacatattgcattataaaagttttgattagtggctttcttttttttttttttttttttgtaacaagtaaagagaaagaaaacatggatctgcctaggaagtcacctctgcctgagtctgctacttgcaggattggagcttttgctgcagattacagctttgaagtcactttacctcaagagcagtttatattttattgtgctttaaaaaaaaaatttagtgccaggtttatggagtgaagtgctttcataaatgctgaaactacattttctgtgggtaaaaatgcagctcatcagaatttcccctttgaagaattttttatgttcacataaaattgccaagttaaaaatttgatctccctacagagtaagagctttcatttcaaataaaaccattttatagaccaggtatcaacatttacggcggtcagacacattgcagatagcaaaataaaatatttatgcttggttcttacttttcttataaactagaaatgtcaacctaagttatctttttgatagctcgagtatgttaggataggaggaattgggttgagtatccaggtaagattacaggagtgagggtggagcagcgtgtgtttggagatttctgtatgccaaaccccacgggctccaggcacgcttttggaagaccataccggtggatccctttgtcatcgtggtggcaaagcaaactgatgctaaaggaaataacaaaacttaattctcgtgctgatcggtgccactgtggggcttacagaccccattcatttgttctggttgatttcatgtggtgtgagactcactaacattgaattagtgatgaagttaaagagaggctttctctatccccatagaagatattttgtcacttaagaaataattgaactttatgttgcactgtactaacagattaaaactacccttttaaaatacaggaataaataagagttaaaataagagtttttatcatatagtctttatagccatgtactactgtgtgcatactagctaggtcttattgcaggatgagtgtttgccattacttttaggtttataaattcaggaaataactgtatttgcatctcaaaaaaacaaactggtttttaaaaaaatagtgataggtgctagttagagtagcccttacagatcagtcttttttgcaaaatgtaatttatagtatctatttccataataactttttaaaactacacctaagtacagttgatagctcttactaatgtagttattgccaattccagtataagcctagtctctaaaccattatctttgcttaatacaactctcctaactctgaaatgctaaagacacatctcagggctccagagcattgccatggtttcttgccttttgcccaccagggtctggttgggaaaccgtctgcaccagagttgcttagggacttgaaagagtacagcctcctgtatctctctctctctctctctcacacacacacacacacacacacacacacacacacacacacacacccgccatttctccctgccagagcttagggatgtgtttatatccatgaatttatttaggctaattaatgttaactactgaacttttctttttgtacaagaaacaggccattcgtttatttgcttctgccaaagccagcagggcatttatctcttaagatgagtaagttgaaattggctaatttgttaaaagctcctacctgctggctaggttgaatgcattcactaagtgctagttttgataggttggcttctgacagagactgccccttgatagtatttggtggtatttgcaattgccagcccaagcacgagccatgtggaagcttctaaaccacagacacaagtcaaagtgttaaagagaatccagtggacttaatttacgagttaggggaaattgacagggggaattatttttgttttgtcttataaaaagtataaaatatgtctccttgtcccaaagaaatttagcagttagttgaaatcaagtggttaatctacaagaaggtaagccccgtgggagcagggcatggcctcctttgttgctatacccagagcacctcctagaacaatgtcaggcatgtgagtgtttgtgtttgttgagtggatttgtgaatatcattgatgtattaagtattgggtaacttggcctgcaatttttaccagtctgccaactttataaaacatcaatctgtagttcacagatgtccttttgataattggtgttttcttcacttctgactccggggctgaaggcagttttctctctcagtcatgtgtagtgagaaacaggtggagcttgaagctcaggagaggtgggtgatggtgtcttgctggctggacgttcacttgtgcatatgggtaggcacacctcctttaggaggactgcatgagacccttgtgcagtgggtgcccaaacaaaacacacttttcttcttcccctaagggcgaactaacttgttaaaagcttctaaatcagggaaagaacacttaaaaagagtagctctttaaggggcagtaagcccaggaaaaggaactatgacatcagcatcacctcatatcacatctacccagaaattttgttttctcccagtttagttcaaaaattaattttaagactttttacagatttgttagaaatatttgtgtgacacaggtacaatcaaagtaaattttgtatgattggatgtattcagaggccatgcctgacatcctgaaagtttccccttcatcagcctttgtgcttctccaccagggcttcctacagcagttcctccctctggtttattcacagactgcagataactctggaggggatcggtgtgtgtccctcttaccccactgccacccccacaggggtggtgtgatattctgcctctcctaggccctcagtctttgtgggattattgttaaattcacttgggtataagatgaggcaagagattgtagaggaattggcaaaaactcttcaaagtgttcacttttaagtgtttttatagagctctgaatcagtatcagttttactggccttttacaaaaataaagacaggaagttatgttccttcgtatggcaaaatcctattatcgtaggtttttacctattttgttctggtgaaaacgtaatatgtgtgtttaattgtgagtacggtgtgcccatttttacagtaagttaacgtaagtcacacgtgaatagcggtggaaatccaagaattttatctcatttcctgtacacgttactgaactgttcacctctgagtgtaatgctttcctggtggcacatggagaatataatcttcctaatgcataatgggatcttttgacaactcacatttttgttctccttcatttttggctgtcacatggcttttaatggtttcattagtaaacagatgaatgtactgggtgtgaatgttagtgacagcttaatgaaagggcagtcctccctctttcttctcctttcaaaaatgcctttgctcttagacccaaaaacatgttttctctccatgtggtgtttgcagacttgagctcatcttgattggctgcattaatattgagacaaaacatgcaattatgctttcatttggccctggggtagccattctgaagacagctgtctgtatcattgtacctgctttcatagaaaccaacttattcaggtttctcagggtttcgcttattttgctttgaatgggacagccatttcacctcatatttttggatgatgtttgaaagttatataggaatatttgccttgtaataagatcagaatgattattttactgaaaaactaaattgttatgttataattatgtttcaagcatatttctttggcagtattttccattttcttgtgagtaacttctggaaatggaagtgtgtatgaatgggttggaatgttttcagttcttgcaattctgaatctccagttttaaaaaaggaaattttattctatatctcttattctttaaccagagttatgtagaagactctgccactctaatctttagtacatggctgtagttgttgaagtcagggagctcccagaaatgtgaaagagtgtgtgagatgggcttgcctctagagacttatctttggaactttcccagtgatctgtggaccacaatgtgatttttgttttgttttgttctgatgcagcttccatgaggcaggctgaacctgcagatatgcgcccagagatatggatcgcccaagagttgcggcgtattggagacgagtttaacgcttactatgcaaggagggtaatgatgttttctttacccgcttttctgctcacaccctccccttccacactatatttttttaaaaagacagtgacttcttgtaactacatgctaattctggaaatgattactgttgcctagttgtgacctttcattgtttctcctttcccatttttcatttgttttatgactaagtaatggcacttaaataaaataatacagtaggaggcagcaaaggaattttatgagcacagactttaaaacaatgctaaaaaagggattatttatagactttgagatagtctagaaatactattaacataggtttcaatccatgtagtgtgtttctgtactccccttgtgcattttaggtcaaagttaaaggtaatttttaaacaacatcttttgtcacttagcgcatgggagcgatgccagcactcatgtaaaagactctcctgcaatttgcagggtggcccgaggaagcagggagccattgcccttgcagagcccattgctgtctttggacatttaattgttgaaatgtattaggaggccgctaatcaatagcctgtaatttgggctgtaaaaactttatattatagataattgccacttattttgagctatgttcttgattttttaaaaattttagcctatgtcatcttctgtagttagtagaagcggtgttttttgtttgttttacctgggggcaatgtaggtgaccatttggacacctttttcacatgggacacttttgtttgtttgtttgtttgtttgtgtgtgtgtttgtttttgagacggagtcttgctctgtcaccaggctgaagtgcagtggcgcaatcccagctcactgcaacctccgcctcccaggttcaagtgattctcctgcctcagcctcttgagtagctgggattacaggcgcctgcaaccacacccagctagttttgtatttttagttgagatggggtttcaccatattgtccaggatgatctcgatttcctgactctgtgatctgcctgcctcggcctcccaaagtgctgggattacaggtgtgagcctctgcgcctggccgcatgggagacatttttaaatgtgtagactttgactccaggagttagtaccattgggaacacctgtgactgcttccgctaaagggtacactagcaaatgtgtgatatagtgtatttacttgttcacagagttttaaacacctcatataaaggtattaattcagttgatttatccaaaaggaagacactaattcttattttgtggaaaatgttatagttgttaatatcatttattcttaccccttctcttttagctcttttttttctgaacgttgttgttttatataagtacctcttaaaagtttttttttaatctgttttctaggggaggtcatgcttggttaattgttgctaagtaaatggattttacctttgattattatttttctgcctttatacaatgtgttttaggcttcttttagacaaatagacattttcccattacaaaggacactatcagttcttcagtatggaatttctgtaagagtcaagaaaacacacatcggatcttcctacctttctgtgggggtgtttgaggagagtgctgtagtaatgattctgttgtaaaatgggaagtgtgacattgatggacttaagaatttcttaaaatactgtcttaagctggcaaaactcctggcatcctccacctgacataaaccagttcacagaacattccagcctagatctgaaatggtaatttttttggaactttggttggttttataacttgtcactgaagtaaccattccctccagttcctctgccttggtttacctaaagggattttggtgttcctgtgtgtgactggaagtggctgtctctattgactaggaagaactggtgagaagtgggaccacagtgtattcaggatcaaagtggggaggacatgagtccctttaagagggtaggtgaatacactcaagtcccgattctggtattgtgtccagaatccaacaggacagatcatttctgatgggtatggagacatctctgaacctaggcaatgaactgaccatcccctgggcctgtctccttcccgtctggaaggggctttgtagacaccctcggggcaagatctgccttagatggggctgcctgagagaaagaggtggcagtaggccttgcctggtgcccacagtgtctccctgctgccaagagctctgggtactgagataagcttgcacattctcaaggattctgttagagattttgaccgcagagctggttgtgttaaaggatattatacaagtttctctttaaagcatgcaatatgaatgcatgactccacaaggctttcctgtgggcctgcccagatggacctggtggatgcacctccatggctgccatgagtggtcagtgacaagacataggctaaggctggcatggggactggagtgcatcccagtccccggccatcctcttgtgaaggctgtcaaggtggggaatagtttgagtcatatgcagatgaaacctaggctgctgggttgtctttgttaccttgcctctctgttgaggatgtgatagcagcacctaacaggttcatagcctgcctcccctcctcttctcccaatgtcatttcacagtttaatgtttaagcgtatgtttaagatggtcatgtctgtgtttccaataagatgcaacctattgttcccatgcttttggtaaattaaatttgtctgattgcagtatttacaaggttttgtcattgtgcatcttttgcatatcttaaaaataattcagtgcaaaaatacagtcacaaatcattaaaggactttagctttgttagtaggctgggatattagggggaaggagtagggatagattctaggttataacccaatttttctaaaacaaaggtaaatatattcagattttataaatagcgcaaaacacaaggctgggtacggtggctcacacctgtaatcccagcactttgggaggctgaggcgggtggatcaccagaggtcacgagtttaagaccagcctggctaagatggtgaagccccgtctctactaaaagtacaaaaaattagctgggtgtggtggtgggtgcctgtaatcccagctactcgggaggctgaggcaggagaattgcttgaacctggaaggcgcaggttgcagtgaactgagattgcaccattgcactctagcctccacaagagcgaaactccatctaaaaaaaaaaatagttcaaaacactggatgatgctgtggatagtgacaccgtgatcttcaaagccacagacacccgtcttgatacttgttagattaaaaacagtccattgtctggaatcacacttaatggtccattgttaaatattgggggcagaaatctgggaaggtaatgggaggccgttttgggaaataatgaattcaaattacctgctgtcttcacaagggaattatcctctcttggcaagcgagtgtatctcactgtgctgctttaggatggatattaaccttttaaatgttgagtgtctttatttgcttaatgctattacaatgccttgtctaaagtgttagtcttttattgccacgagccttgcaaagcctgacaggatattttcccgtttttccagttagagaaatagaggaagttgtcgtgtagttgtcatgtattcagtccacttaagggcagtggggaagcgtttgagacggagctgtggaggctgaatccttgaaggaggaggtgagagaggcacaggtgagcgcaaagtcccagtgcatgtcccctcttctctcccgatgcagtgtcattcccaggtgaacctgccgggctgaacggcctggcccctctattcagtcggagttttactactccagtggattttggtaacttcatttggaaataatttcagacttacaaaaatgttgcaagaatgacacaaagaaccacccttttatatctgccccacttgttttcatgttttccctctttgcacacatgtacaatttatttcagaaaaaactacagacatgatactgcttttcctacactaaaaatacttcagtgtatatttcccaaaaataggagtaatcccttatgtaaccacagtgtaattatcaaaattcacaaatagtgttacaaaactattatctgatctatggaccttattcagattttaccacttgtcccaacaatgcccttctcagaaaaaaaaaaaaaaaagaaaaaatgtattttctggcctaagagccaatgtaggataatgcattgaattcacgtgttttacctctggttccgttaatttggaaccgttcctctgtctttgtcttttatgacagtgacatttttgaaggatcagggcagttgtaatttgcagactccctgagtttgatttatctgatatttctgcatgatgagactcaggttttgcatttctgatgggagcactccagaggtgatgtgtcagtgtggcacagcaggaagcacatgatgtccatttgtcctgttactgatgaggttcactttgatccaaggtggatcttggatcaaagatcttccacagtcttccactgtgaagttagtacttttccatttgtaataggacagagattataaaggacaaagagctttcctttctctcttatatagttatttagtataacaacttggattcatagattcctgttttattcaatgggctgcaatgcgttactgtcaatatttattttgatgctcagattcttaatgatttggcgggaggcaccagtagtgcaggcacagggagaaccagttgtgggacaaagcccaggggctgtgaaggtcacggagctcttaaaagtcatttgttgcggaatgaactttggccagagggctactgaccctcacagctcttcctatgcaggtctgctgtgcagggcactcttaaaagactccaagcttgtgagactccttagtggcgagtagggaggctattggtaaaggctaggtagcgtaaggatgttagtaggcatggagggaagagaagttctctgagaaactaaatattttggaatttgtgagaaagtgagcagcttgcctttacctgagtggtgcagtgtttgtatttctgcagcctgcaccttctcttcctggtgagtgtgtcagcccaagacagccagactgttcttcagtagcggttgccagtttctttcatcacccaaactgtgtgagcgcatgtaccggttcatctgctggacgcagtgccagcaagtgtagattgcgaccctctgtagatgtgggccggaggtactggaaggatagtgtctacttgggtgggagtcttgaccatgggctggggctgcagtcagaagcccttagaatgtaaaaatgcttactcttggaataactggacccattctgcaaccaacatgcctccctctttcccctccataacccctaatactgaagctggagttgtttaccttctgtggcttctaggttcttcacagtcaggttgtccagctcaagtcactccatgtgcaggaacactgctcttggctaactgtgacctgggcatgtcctggtggtgggctgcagtggacagcagcacatgaagctgctctccagatgaggccagcagtgaataaaaaccctttcattgtttgatcacaagaaacagtgatcttttgtttacactgcctacttcctactctgtccagggcatgtgcagacaggaattgattgaagtgcatgtagaccaaaatctagccctgaatgagacaaagtagagttgagaaggtgacttgcagactgattttgatggaaagaatttaacgtgtcattacattagcattttcctgtgctctgtatgaatttgaaatacttatatgctctccttcttgagaagtgaaatccccagtgctatctcattcttgtttttataaatggtagtcactcttctgtgaataatgtacaaaggcaaggactaaagtttagcctgcttggtaattgcacaaactgaacacaaacccaaacgtgtgttctcagcgtactttggaggtcttcattaattgaatgttggagtttagtaaaagaagttgctttctgttactggctgtgaaaagagtcgtggaaatctgcacatcagatattaaattcaaattagacctaactcatgcaatgataggttgccccacacttcactcacatgagttgatagaatgtcagttttcataacaaaagcagtcatgaggagcttagataaattggtacctgccattgatcagtggcacggttttcattcaggttcagcaagagttttccttaaagctggaggaggcagctcagtgtttgggtttaggagcctttctttcctgtcttagactaccccgtttccgtcccagaagtacaatggccagaggtgatgagctccttggttcttcccctcagacttttgggagaacatgtggctgggattatgtggactatggattgctggttttccaaacaagcgcgttctgttactcgttgaagccagagtgtgatctcgtaggaaaacacgactcacagagaagtgtggggactttggggtcagacctagagccctgactctacccttaacctttaggaggccaattgtctggtctatcccttaggcatgtagtggagattaagtaagaacatttagagatggagctagaaaattcttattatcatctgttatcgtaattctgtttcctctcactttgaactgtaattgaaacatttttcaatgggtcttcggcgtttagaaagggagatgccaggaactctgttcacctgtctatcttttaaatactctggaactgctttttaaacaagttgtgtgtttgaccctactgcacatgctgtgtctgggtgtaggcaaatatgagatgaggctgaggcactggtgtgtgtttaaatggctggatgggcatcgggctaaaggacttgtgcttgtttgcaccacgtgtgagtgctcatctgtttggcaggtgcctacacctgcagggctgccttgcagctctggatcaaggccattaacacataaccatgaggaaggagatgcaggtgcctggaaggggacttcaggaggtctaactggggttttttttaaatctcttgaggaggaaatgaagatgcacacaaactaaggcttggccctgctgcagacgttcaaaaataataagcttctcatatcatccttcactagacttctaccacctgaaacaaagtggagaggttttagttgtggttaaactatgttacgtctcacttagcttttttctgaggctgaaacattttggaacagtgtgtttcttctctgaatctaatattccaactactggtgcctcacacagatgtcagaacaatctgtctcttctctgtggttggccatagaacagtgacgatttcagaagtggcaggtgggagttgttccccagtttagccagcaccaggtctggagtctgacaggctagagacctaccaagtggagggctgtgctgtgctgcctgaagagcctcagtgcacagcctcacctggacattcactggagaagagatttgtgtcacaataagccttaactatcataatttctttgaaatagtgtgtcaaaaataggataaaagtttggtttatgcaaatgtagtttttatctgacttctgaagaccacattgtcaccatagcagatcagctgcagcacccatagctttgcaacgctaggggagagtgctctcctggtttggggtgaaggtaccatgcatctgggagggaacttcctagtgccctttccccagctgtggtgacatcaaagtgcagcaggcacaagctatgcaaatatccatgttgccttggtgatgaatagaaagtggatttggtgttgggcagtattgtagcaatctcctctgacacctgaaaacagcatgcatatggaaccagtgctgaaataccagctcagctgccgtttgactgtggttgttggtctgaaagtggagagagaccagatcttcctgaagagctccacatcatgctcaactgtgtgctgggcctttttctctctgacttctgtgtcacttagttgccagttaaaatgctgtttagactgctgggttatgaacgagtcgtggagtggtagttctaacagaatcaggggggtgactcctagttccatgtcccaccctgccacctcagtgtccctaaagatgccgtgacagcccctgggtattctcaggctcctggatgtccatcccaggccctctcttctgcagcctgtggggatcagacaccaaccagagagactgcttcctcagttgcctgagcctggagcagagattccctctgtccttcctggtctcacagtccaaaattcagcctcctattatatataatgtataataatttatagtatatatataaacacttaaatatatataaaaaataagtttcaggacatcctatacatttactgttgaaattctgtaagaaacaagtttttgagtaagttaaattcctctgcatctcagagttctataggtataccttgtttttgaatgcctcttagaattaggaattgagcttgctttgatatgacaatgaaattgtcgtttttccctcgttgctctgactgccaggaaactcttaactaaactgtggctctcttacagcacatctcacccctggttcccaggataactccttgatgtcatgtctgatctcaacctttttttttaaattgtgttacacacatttgcgctttcttaatttaagtcccctttgagccatgctatgtctaggtctgtgttgtacttaccgagtccttgggcccagtgggtgtcagccctgcctttggagcatggatgagtgggctgtattctgagctgcattgtaggaatcacttagtgattctcaattcgcactccagaacctctgtggcctcagctcagcctgaaacaaggcccctttcaggtctgaggagcaacgggcccttcccagcagaggcacaggcacaggcacagggtgtgcgaggagggaaggtgctggcctgaaagccctcgtttaacttctttcctgcttctggcattccatcttcatgtgggccaagagtacccatcctgtcctgccactgtcttcagctgcactttgagtcacttgcttgacctctgtagtcactggctgcaaaacagcatagggaatgctaccctggcactcagggttgttgtggggactgaaaagcatgggctaggttatttcatttagtggtggccatggcaattcttccatccccaagcttgggcacacaaagtccaaaggcctggagtgccctaggcagcttttcaaaggttcgactcctctcactgttggagagtgaagctgaatccaaagctgcattctatagttgtctgctgttcaacctgaccagttccctggggccagggcctctattgttttccaagcatctgcttccctggactgagcaagagagtggtgttctgtgattattttggcattagaatgtcattaaattccctgacacttaattggtcgtcccaagtgtaaattgaagatgcttctgccctgcacttaatgttcctcgctgcagtggcagctccagcccctggcaaggcagcaggaaccccacgctagggcattcctgtggtacagctcctcccaggttgccacccagatgagcttgtgccatctggtgtcatggggacatgtgaagaactatttaggaattccctgttgaatgctcgacaccgtctcaaagggcattgttcatatcttcagagaaagactgcttaagtctatgctgaggaacttgtagacacataatcctatgcctttacacttagagggcacagtctgtgggggagcaatcctgcaacttggcataatctttccttctggtttatgataaatacttatccactactgagattatctttactgaactgctggccccttctgcctgttggccttgctgcctctgcccagcttctctctccacctgcactgcccattctcctcttgtccttccaagaaattctcctcttcctttggggcttgatgtggggattcaccctggtgccttcctgccctggctcccccacttcctctctggccagtggtttttttccctctcattttatttgcctctgtattgtccttactttattatcttgtttactgttttgtgctggcgacacagctattaccatcagacctagtgggtacacagacacgtgccttgaagtcaggccccccacctgatgctggtcagcaacagggccactggagccccttaccctgagaggggcaggggctgtcaggaactggttcctggagggacacacaaggttgtgaatgttgaaggagtcatcttctggacacatgggatggccacaaaaggcagttacctccaggtaacccagtcctcatatagctcttgatttaggctatggagattacagtacccaactgggtggggccctcctctttgtgcacttgtgattgtgtgtatgtgtgtctgcgtagagaaagtgagagaggagagaactgtagtatatggtcacttcagttgtaacttactagcaaatttggtctttaaaaataatctccttcacccaaatgagttgttatacctttctaaagtatttttgcaatttagactaaaacagagttacccaactctgtaagaaggattgttttcacttaaagagtgacagactgagagcatcagtgaaagtgtgtattagtcagctagggctgctgtgcagagttccagagactgggtggctcacacaacaggaatttatttttcttagttctggaggctggaagtctgtgatcatggtgcagacttagcctccagacctgtagatgctgtcatcccctgtgtcttcacgtggtctccctccgtgggtttctgtgtcctgattgtctcttaccagaacaccgtggattagagcccaccccacagtgacctcattttaacttaatcaccttattgatgaccctgtctccacttacagtcacagcctgaggtccggggggttaggactgcaacagatgaattgaggggacacagtgtacagttcagcccataaagaggaagatacccagaagtttcaggagggagtggagcatcttccctgattgtatttattttaatagttttttaaaaaacgcttgtaatcaggaaagacagtctgtcttttttatattacccagtttgggagtggcagaacttaaatgcacttttgattcacagatgcctcttccacctgattaagaaccactgtagcagacgcagacttattggacactaggcgggaggccagctctgcagacagcaggtctcaggaagacggtcaaggcatggctgctgatgatccgcttatgggtgtgtttattgtcttagcccatgttagatgcgaggaaccactcacactgcaaatgacagctcctggctcagtcttagtgtcatacttgcctttaactggcaactcccctgcaatacagggattgtcatctttagtcctgactttccaattccatcttggatgtgctaccctggccagaagccactgggtgtgcccttactttgacctttcaccagtaaattccatcttagggggctttctctaattgcttcagactccctcctgaccctttataccaccccaaaaccaaaggccctggtttaggagctgaattgtagcagccgttcctcagtatctagatcgcagggagatttcactggagctggctgaagctgttggcgctttgagcagcgttgagccatcagtcctagttctgcgtctttgccccactgcagcttttggccacttgccccagtttagtgtcaccaggccccgactataagccacagtaatttttatggctgcaggtattagagggcagccagtctacagaggtaggggctgcccatcctccagctgtcttttgcaatacgggcatacacttcgagccaacagcagctccagccggccgtgccagctgtcaaatgctttctgggctggcacggctctttgaatccgtggtaatggcttcctctgttgaatgtcgtccaaaagcaattgcttgtcagcttaaaagcgtgtgccatgttgtcatgcccgccgtctgagagggcaggcatccccgcacacttgcagactgggatgctgtagcatcttctcatgagtcagggattgggtgtaacttttgccaaaatttcctgcattttccccaccctctccaacatgtctttgaataccccatatcctttacatttgagatgaaagtggaactctaaaaaccttggaaagattctcttgtgaggtgacttctacttaagcttggtcacagcctcctgctgtcctcaaagagtgggcaggagatttcttcccttggacgctgccagtgctggaatatgaaacttaccaagtgtcagcagttggggtctgtccttcacgttgacccagccccctcattggtgtcctgatgattgtggacacccagtcagccccattttctggccacaccaagcatggcaatgacaccaggttggcacaaaacaactctgcctggattgattacttagcccatcatagcgtacactttcttcattttagtaagttgtggttttattttgaataagtctctttcaacctattaatattagtctacactaaaattaaccttcccctaaattattctcacacagaggcagcaaagtaattttgaaagttaaatcaaaacaaagcaatcttgtgtgtaaaacagataaaaatcacagactgtggttacagagtgcctctacaggaatcgcttacataaagctgatttcctccaatcttgttatggaaggaaaaggggaaatgccctggccttatcacaatcccattctgtcaaacaagcgcggcagagcttgtgtaaacagtggagctgcagctgcggctggtgtctgtgggggccattcggggtctgaggggacagttgtctcagcctgatgcatggcaggtggttcccgcgacggtgtgttggaggtatcccccacccaatgagaagggggtttgtggagagacagtcatgtagcccggtctcgtgtggattagtcattaagaaatgtccagggcagatttcagacttgaacagtgaaccaggttgtagctcatggcgtcgaggttgaggtgttgtgttgccgctgcctttggtgactgtgaatttataccttgcacatactcacaaaatggattagaacctgaaagtgggcgctgtggaagacctgaggaccctgaaagcattggataagctggtgatttccttttgaacagtttctcagtttgtaacaaacatatgctggtcactgacacagagacttttttatgttctggattgctctttccttcccataccgagaaggtgggaggatgggggttgacattgcctgtgtctgtgaccatgggcacccctctgggtcacggtgtttatcatagccaagcagccagaggcacaatggcgcatcactgcgagactttatttagcttcttagggcagattactccaaatcactggtttttcaaataaattacagctaccagaaattcacccctgggggaatctgcagcatatttgaatgtcagttaacttgggtggtaagatagttgctttacatcctctttgagtttttcaaacatttttttgagtgcttttttttttttttttttttttcctattttaaggagtaaatcattggtatgcctgccctttttgtagggatgtcttcccctttgcagggaaatgaaaacaagttttcttcacaatctctgggaggcatcgtgctttgtgacacagtgctcttgaagaggtgcctttcatggtgattaagatgggattggttgttcacttaaatatgggctcccacccctccccacccccaaattagggagaaactaagaagctttccttttgttgtttcaggtatttttgaataattaccaagcagccgaagaccacccacgaatggttatcttacgactgttacgttacattgtccgcctggtgtggagaatgcattgacaggttctttgcggagccgagataccatgcagacattttgcttgttcaaaccaacaagacccagcaccgcggtctcctggtgccattattatgcagccagcggttctcttgtggagggggcaggtgacgtttcagaagacaccgagctggatgggactacctttctgttcatcaccacacagcagaatttctaatggaagtttgttgtgaatgtaaaggagggagcattctttgctttttaatatacaaaccatggttttttggagcaggattttgtgtaagaatggtgtttacatgcagtgtgttttccccctcaccttcaataaggtttttcaaaaaggaaatggaaactttttaaccaatttgtgaataacttttgtattaaaattttaagaacctacggcctattctcagaggattatgtaacccctgcagtggaaactgagccagctaacttaaaaagctgccttagtttatttttagagattacagaatttttaaacagggagacgtgtgatatactccctcccttccctactattgcctctctgacctttttaaattatttttaataccaaaagagttcttttgaaatggaactgattaaaagggcagagggtctgttgccagcctgcattgatataccagtcccatttgtaaatatttacgtacctttataaattcagttgcatctgtggcaaaatttcagactatttttgcgtctttcctcatcactttttgtgatgcaactccagtctggactcagatgcatagatttggtccagtgtattttcatgataaagtgaaattgagtcagaacaagagttaatatctgcctgtatcttgcacagttcgagcgatctgttattaactgggaagcatttggtgttggttttcattccatttcgacgagcatgttattgggaagtattctgaagaggcaatagcagtaataacaacagacttaagtgctacgcccctttgtgctgctggcttttctggttgcaggctttcccatggtcacaggatgcactgtcagcatcaggtcccagagggccaccgtgtccattacagcagagtccagctgcagcatccagctcacgccctcatgggaattggcacaggcctggggcagggcttctgatggccatttgcttggcctcctgcattttagtccaactcacagtccactagcttcactcctttaaattcactttgaaacaggcctcatcccacttccaccagcaccatagaagaataattctgggcagaagtctgttttttttcatttttccaggacagttggatattgtcaggccacttgtgaccccagccatgtagtgagggtgctctttctctgtgcctgctccttatgagtgcagtggaaggaagccacacactggtcagtcatttcagaggcagcagatgcccagggagacccaagaaagagtcaggttagggagcagtgaaagtgaggagggaagacaattctgtgaactctgtaactcttaaaatttttgaaaactccatcgttaaacaacttttaaaagaaataactaaattttcaaatgagtaagcagtgccaccaactagtgttttgcccgatagaagagccagcatgttcacgttatttaaattaggtggaaaaatctaaacatttttatcttcataatttaaaaaatatatatgtatatattgcatattcactttttcctttaggtagagatgatttcaatccaaatactcttactttaaaaaatttcctttccccaagaatctccttgggactttgacttatttttaaagctgtgttggagctcatcttgttccctgatgtgtctcgagcccattggtagggtcatacaaagcccacggttacaagcagtggtaggattgcagccgtgggcctgctggacacacacatacaccaaagatgtatttggatctgggcaccccctcccaggatccctgtactcacgtgccagtctcctgactagagcactttactctgtttcctcagccctgcagcccctgggagcacacactgggtgcagccctgggccaggcacgggaggccctgccctgtgctgcccaggggctgtgtgcaccacatgagcacatttccctctggcctggcggcctccaggctggctgtggaaacagttcctgaggaaattagagattctatgaattgtaggagtattaaagaccaggctgttggcaccagaacttaaagcgatgactggatgtctctgtactgtatgtatctggttatcaagatgcctctgtgcagaaagtatgcctcccgtgggtatacgtttttaccttttttaaaaaacatttttgtagaaaaaataattaaatcccctttttggaaacttactgcaggttttgtgccttgacaacctctccctatgtgaggtttgtaaaaagtgtcctgtgacttaacacagaaacgcaataaacacacacaaaatagtttcatgagtgattcttcagatgcccttcccaactggttagttgatcaagaattttgggggtgggggttgcggagaaatcaagtttaaaattccttctgattaaaaaaatatagtggaatacaattgtctgccgtttccccttcttaatgtatatattgtgagtatttattagattcgtaggtcatattacttatcaactgagccaaatgtctgtgtgcaattgtgtttcctttaccttgtaaaattttgtacagcataaataagtaaaaaaatcactgtttttctcaactttttcaaaatcaaggattgtaaatattgtagattctttttctgtgtgatgtgtcctactgtttcataatgctgtaacttgtagaaatattgtatatttattttctgcttatttaatgtcttaatttctgaaaagtattaacatccctgtctcccactcccctgccgtcccatgaagttaactcctgagagttgtcgggggtgactggagagctcattgcagaccacgtggtcctccagggtggctctccaccttcgggtcctggtatttccagtcaagtgggtttcaattcttgggctttgccgcccttatgatgaagtgtgtgtttgatgccagtgagaaactcagtctggcaggctacaaaattctactccaagaaatacccagcaaccttctgtttgttccaaagcaactagcttatcatgcaagcaaattttgctgactccaggctttatctttaggaaaacaaaaaaaccaaagtattatcagcaggtgggaaagatttttctattgaaaatttatccctgacaactcagcgtttagaaaagaaataaaatgtgccacttccagaggtgctgcattgcagttgttcagggctagggccaggcaggacaagtgaatgggtgggacaggtggctcctgcctaaggaccacctcaggccactaaccccttgtggacaactgtgagtagctgggttttcccccacctgctgtgcaacttcctgtgctttgaggttggactaacttgtcttcaggagctaattaactgtacagccctccccacgccccacccatacggtcactgcatttggtcagcctgcttcttcaggtcgatgccctccttctgatactccatctccttcaggggaggttggggccccactggactgggtgtcaagatgtgaaagcttatgggagctttaaggagacttcatggtggttccatgcaggtggttctgccatccctgctgatttagcctggtgcctgtgtgtgtccactcacgtacacgtggggtgggggaaacgtgtctacagatgacgctaaatcagttggggtctactctaaacagcattgtgtgtaagaagcatcctcaagctcccagttaagtaacttgactacttttatttgggaatttcagactatagaagctctcttatgttttatgtccagattctgtgaccactagttactgtatcagaactcatcaggtacccacttataaatagcactgatctggctgtatactgatccatcactaacctgttttctaggacccagcgtatgtagcatttgtattgcagtttccctggcttacttgtgttttgcactgatgaattttgacagggtaattgccactttacttgtgcaatactgctgtaaataactgcagatttttaaacaatcttttatgttaattttataaaaataaaactttcaactagttttggtgagcgtttgatttgtttgcacaaaatgtcagagaaacagctgaaattatatatgaacatgtacacgcccacacatctgctattatcagtcataaaatgtagctgtgtgtagctcatatatttttgcttgaagacgaatccgtgcagtacacttaaaagtaaacgagtctttaaagttttgatgtggctggtgcgaaaagtattctgcctgcacagtcagatatgactcagcacttgggtggggagttgtgggggcagggaagtgtactaggagccggctctgtactgtgttgatgagtgatatggcaggtgcccagccatcttaccccatcaaccccataatagaaagggcttgtctgcagcacctgctcagggtcaaaggggtcacccaaacgtgcctagaccctgtgtgtgaaatgatgaccaggaaccgccaagttcccagctcccgtcatgtagggtggatgggaattgccttaggaatgagtgaaagaaattaaagcctggtttggggatacaggtgataaaatcctaataagtatttaatttggcactttcaccctaagtgctgggaaagtgaaagacagactcagctttcttttagactaacaatctgttaatgctttcaatcgggtgagtaatacatgaatatggtcttgtaaatttatttcaaattgtatttgtttcaaatcaaattgttctgtcttaatcctacctcctcactgaggtaggagtttgcattctcctggactcttaatctgcagtgtgtgtgtgtgtgtgtgttgtgtgtactcacacagcagttttgcttttctgtaagtgccatagctctgtatatggttctgacttagcaataggtcacatatctttccatagcgactccacttcatgctaactactgcagcaagtgccagagcacaggcatagaatttgctcataggtatcccactcttgtggtacagggaggtggaagatcagcctcaacagactctggaagacactgtcaaagtggcagctccacttcacacgggccctggcagcacataagaacacccacttacccccagtgctgtcagacatgagtgagctggtgtctgcctgctgggtgaggagcaagtggtgctcatttgaatttttctatcaatgcagtaggatgatcttttcaggcactggtggcatttgcctttttttctgaaagtttttgctaatttttggttgagtattttttctattgatgattagctctttatacattctggacaaaaaaatctcttatatgttggaaatacttttccttcaatctgttgcctttttttcccaacattttattgtgaaaacttccaaacattcagaaaagtcaaaagagttttacagagaatacccatgcactcactacctagcttctacctttaacttttactacctttgcattatcatgtattcatttattaatccggcttattttttggtgcatttcaaaacaagttgtcaccaatactcttatccccaaatacttcagcatcatttagagttcatcaattttttataatttttttctccaaagataaaatttacataaagtaaaacatacaaatcctatgtgtgcatttgctaaattttgaccaaggatacagctgtctctcaaacccttgtcaagataaagaatactaccgtaactcccagaaagttatctgctttccaggtaatccctcctctcctgcccccattggtaacctctgttctgagattcttttccgtcataaattagtcttacctcttcctgaacttcatattaatggaaccataacagtatatggtcttttgtgtcgtgtctggtttcttttgctcagaatatgagatccatgttacaattatcagtaatttcttcctttttattactaagtagtagtctattgtgtgaacaaaccatgctttgtctattgtcttattaatgaacacctgagttcttaccagtttggggctatgatgaataaatctgctatgaatactctcatacaaagcatatgagtctcttttgtgaacatatgtttttattctgcagcatgttttttaattgcttgtggtgtattttatgtagaagttgtcatcttaggtggtgggtgcctatagtcccagctactcgggaggctgaggcaggagaatggcgtgaaccccggggggcgaagcctgcagcgagccaagatcgcgccactgcactccagcctgggcgacagagtgagactccgtctcaaaaaaaaaaaaaaaaaaaaaaaaaaagaagtcagatttgtcagtctgtcagtcttgcttaggtttctgtattttgtatctcgtttaagacaacttatctatgacaaagttttaaatatattttcttatgttttattcatataaccagtacagtttggggtttttttttcaccttaatccacctggaatttatttttttagtgatccacagtatttagtttttaccccacagaaagccagcactgttgtctttttgtccaccagcctaaattgatcctttgacaatataccaaagtctaatacatacggttctgtatctcagctcttgcctttttcattgatccttttgtttaatctacattattttaattacttgagttttatctgttttgagtttcttgtctttatttttcaaaatcatcgtggctctttttacattgtctttttatgtgcatcttagaattagttgaagcttttcagaaagttctttggaggtctcatttaggattacagtaactcttgatttagggaagaattgccatttttccagatgttttccaagatgtataatatttttatccatcgattgtgtttggttttggatgcttttagtacacttgatttttcttccttcaaatcccgcacatttcctatttgctttttctgggaaagaggggaggatgccttgcatccagcccttatctccaccacagtttccctttgtgtgcctgcctcccactgcccctttctttccctgcctgaggtatcgctgagggcaggcccatggcctaatgtttgactgataaaacactcttcccagcactttgactctggagcgagcaaggcaaggaggggccatttggagggcagcatccttgaagctgcagggcatgtttgtgttcttggccacagtaaccggccccccagccaccagcaccccggggtcccgtctctgagctgcctgctggactatgcaacaggcgcccaccctccagcatgttctccttgtgctaaattagccagggctggtttctgtcgctggcagccaaagcagtgactcattcctacctgtcagaaggaccgaatacaaaagttgcatgaagtctctttaaacaagatgaattagaaggtgtggggtgatggactgattgtgaaaatctcccctgtcgagaccagaatggggctgtgaggagatgggaaatagcaaggcaaaaggtggtctctaatctttttgggtaacttctaccacttgctgtttttgttttttttttttcctggaaactctatctttcctgaggcaacccctaagtccttagaagactgtatgaccgaggagaagatatattagaatgttgaaggctttttttctgggcatgttatagaatgattacaggtattacagaaaaggacccaggaaggcatgattataataaccactcaggctccataaagtagatttgggaagagttagttcttacaataaccacttacctaatagctaaacaagatcaaacttggcctaccactcttaaaagacaccatcaagatgtcgtgtttcattgccgatatcagagagcttatgcaaccccattaaaaatatattttagatggtcattttcctaaaatcttaatctgagtattaaggtcctaccatgtactagacacacatgagaatatcaaaatgcttaaaaccagggcatggtaaacaggccatgttcttaaaggtctcacaatcagtaagcggaaagaccacagtaaaattctctagtgtagttcccagggaaagagctgtttcaggagcttaggtgagagtagtgggcctacagctccatggggtgtctcacccacttccccctcatctcggggtcccctctaatgatgcctataatgacagctaaccgttaggcacttgctacgtgtgaggcacggttcaaagcatctcatagttcattttcatctcagaacaacagccctttgaagcagctgctattaccaccccaagtgtccagacaggaaaaccaagtcatgaggtggttaagccacttgcccagggacatcaggctcctcaatggcagagcgaggatgtgaggccaggcagtgtggctctgccagagaatggacgtctgaccacgcacctgctgccttgcagggcccgtcggaccaggagcaggaacagggggctgagaccagccagccagggtctgccccagacaggatgcctgtcctgcagccttgcttctgcatagctgccagcattctggggactcatgactccatgacctggtccagatctgccatgagaatgtgcatgcacaggcccaggtctcacttgcatctccagccaccagggcatttcagctttgccagtggctcttcttgctgtggggccctagtcctgcatggactcttttgacctaactggagggcctcctgtggacgtgtgggctgtcccaagagtccttggttttcctgagcctgctaattgccacgcagacccctgacaggtgtggcctctgtgtgatggagggtgtgggcccccctcctgcccactgccccatcctcactctgccattagggcagagcagctccccaggtatttgttgggatttaagtccattttaatgggggcatcgcagtgctagagtgatggagcaaaggggtcagaagacccccgggagtgggctccccagccaggagcctagagtgagattgggtgggaaggagctagtcagtacccatcaggagcagaaccctcccacactcattcgtgtctggttcttgaaatcttttctctccagacctggagcagggaattgttctgaacccagagcctcccgagccctcaacatcttacccccacctgccaggcacgtactgcctgtgcccctacactgcgcctgagctgcagccccagctgggtgcacgtgttccttttgcttgtttcaatctggtgcacaccttccctagggtgccagtggagagcagggctgggggttcagatctttgagttccgcatggaccccactttgcagcaaaacctatagagagcaggcaggactggactccacagggactcaggcaggccatcatccccagcagctgctgtttgcttttgaagagctggagctcctccgattttcttttttcctttataaaaaaagtattgaggtacaagtacacacagggaagcacacagcttgcacagccaactttacacatttctacagccaaggattgatttgcctccccagtgaagatgcagaaccttcccaattttaagtgagagcacctcggtgctgcctgcccaggctcgcccctgacctcctggctcacccttgctctgggggcctgagcctggaaccccttcggggacagactggggatccaggcctctaacctcatcctgggtaggtcccccaagggtgctcagaggtccctcaaggcccttctaacaggaaagggggctatctccgctcatggagtaggttccgatgagtctctaactcagtcagaaactcttcccagtgttactcgaccatgaccttcaggccaatatgtgtcacttatttctgccaagacgcctgctacaaaaatccttgactgtagaagatctggtatattttcttaaaaagtaaatcaattctattactttgaattctggacccttgaaaggggaaagtggtgagtcaaagcttcctcaggcattggatgacactttgaaaggctttctgaggggaaaaaaaattgcattttgtcttcaatcagtgcctatagaatctctttctcatttaagtgttggtgaaaggattctattgtctctaacccaaatagtctaaaagacttgcattcattcatgtatttactcgctcagcaaaggttcgttgagcctctattatgtatcaggcacaattcattctacatgcttgggaattagcaaggacaaccccctgcgctcatggagctgatgttcagtggaggtgggaggcataagataacacgtaggggaaccagtgaccaagacagtgaaaggtgcaggaaataaacaaggcagagtgtagtggaccaggtgcggtggtgggaccagagaaaggaaggcctctcctctgagacctcagggtgatcaggagcaaccagagaagagcggtccagacagagccactagagatgtgaagcccagcacagcaaatggggaggaaggggctgcatcggggacatgcgagggagggagccatggatgggggagatgggcttgagaattaggccaggctgcagggtgagggggcatgcccgagacagggctggccctacattcccaggacagtggagggctcttgtcacaggagtaacataatctgatagaaactccagattacaggagaccaaggggacatggtgactgaatgcaatatactatctggaattttccattgctataaaagacatgattggggcaggtggtcaaatctgaagaaaatatgtagatgttaatattgcatccatgttaatttcctgattttgatcgctgaactctggttaggtaagaggatgtcctcatttttaggagatacacactgaagtatttaggggcaaggggcaacaggtaatttactctcaatgttcaggagaaaaatgtgatgtgcttacatgcatgtggggcaggatggaatggtggcagttggaagggagaaggataaagcaaaatgtggcaaaatggtaacatctgggtactctgggtaaaggctataagaaaagtgtctctactattttgcaaactttttgtgtgtctgaaattatttcaaataaaaagttaaaaaattaagagctgtgcctggattgtggctgtgcctggattgtggctgtgcctggattttggtcaggagtagaagtcaggagtccaccccgggagacctgggatgtggacagagggcagacaggctttggaggaagaggagggaggacttcctgatgtggaaggtgagggaacagaaggaatcaaggattctaaaggatgatttgggtcagagcaattagcggggatggcgcttcctgagaatagaagcaggagtgggaagtgagatcggttggggaggggctggggtggaggaagagtgaatggagagttctgttttgctggaccacgaactcaactcaggggttatctagaaacaaagggctgtcaattcattttaaagggcttttttttaagttgagtttctggaaagaaactccaggaaggtggactgtacccactggctgcttagagaaagcctggagcatgaatatttagacatttgctttaatgaagcactctcataagccggggaaacagggccttgagcatctgttcatgagaggtggatgatggcccagtggcgcctatggagcatctatgaacacaggccagacagggcacaggagggaggtcctcaagcctagaggatgttagactcccccaggggcttttacaaaatacccataccagaggcccacctctctgagtctgtggtgggggtgcagtgtcatatttttaaagggtccctaaatgactccagtgtgcagctgggcttgggagctgctgaatgacagcttgctcaaaactgccagggatgactccagcagtggtggggcagccacagcagcatcgggtccagcaatgctccccagggacaatgctctgaaggacagcaatcagcaaggtgctttctgtctgtttaaatttctgttgtagttgcaaaatgatcaattctcttttctgtttccctttgccagtttgccctggcacaggcatccatgcctccagccaaattcaaggtgagtggaggacagagtgtgctgtagggcccaaggccaaggccaaggccacggcagggtggaggtgaggtggccccgggttgtgagcctggggagagcccagtcatcatcaggtgagtcagagccttcaactgacaaacccaaagaactcagcgagctcagagacgggaggcggagccatagtgtggaccccagaagggctagaggtagaaccgaatctgtgtgtggcacaggcagtgaacgtgggtggatcatgctgtgcttgagcctggccttccatagctcaggagagtgtagagtgtgaggggaatctcataatcatgggaaaagtgtcatcatcgtcccctgaaaaacaaggacaggaggacacacaggggcaggctctgagagagcacattcaggtgtgagcacttagaagggaaaatgatgatttgtgttggggaacagaccacaatgcacattgcacccggttagacaccaagctcttccaggggaacttctacttctgattgctcaatactatgcagaaatggcctccgtgggagcctccacaggcacacccttgcccgctccaagtccctcccaggaccagactctctgtccctgccccagccagcaaggctcagaacagtggctgctcccaggtaactcccagcctgattccgggtccagtcaccaagctctggggatggccttctgatggcttataggtaaatgctctcatccctgctggaagatcctaataacattttaaattgtgtctctctgtctgtggggctgctagcattagccagtgtgcctctgactcagcgggatctcgccgtacctggcacctagtaggcactcaacacaccgttgttggatgggtgtgtggcaactaaatgtctgacgaggactcaggtaaatcatcttctatgaaagcccagtcttttcttggcctcttgaccttcatcatatgtatgtactgtttgcactttcttttttttcttttttcttttttttttgagacagagtcttgctctgtcacccaggctggagtgcagtggtgcgatctcggctcactgcaatctccacttctcaggttcaagcaattctcctgcctcagcctcctgagtagctaggattacaggcgtgcgccagcacacctgactaatttttgtatttttagtagagactgggtttcatcatgttggtcaggcttgaactcctgacctcatgatctgcccaccttggcctcccaaagtgctgggattacagatgtgaaccaccgcgcctggcctgtttgccactttcaaaagagtagtgagaacatggagcctattcaaatgacagaacttttttaaacagcaggtccagccagccctttggcaaaacggctctcccttttagacgcccctttttgcctcctggtagccccctcctccttcctcatctcacctgtttgggccctggggccactatttctcctctcctttttaaaagctgctgtccagggccatagcgctgccaggattctgataaataagttcacctgaagaaaatgactgatcatgtcttgatgaactcactgtcactggctgctctgggtggcatgtgcatttcggacaatttagttgcttctaaacttggtggctggtataaaacagaagtcttcatgagtcataaaaaaaggacacgttggagaaataaatgtcaatattatgggctcttttatggagtatgccctatgccgttgcttagaacaacccaagctcactcccgcctaaggctgcagctgcccgctttttctaaatcgctcttctctctatagctacagggctggcctcttcagcagtcagggctgcttgaatgttactttccagtggcaccttccctggtcacccactcattcccaccttcagtcttactatctgggcagcaggctttgcgaacactctgggagcgccagctttaatgtgtgctagaacctaggattactagacctgggagtggctgtggaatgatagggaaggactcaggtcctaatctctgggggcctggactatgtgctccatgagaacaagggctgtgtgaatgccatcctcgcatccctagcactgacacatagtaggtgctcagggaatgtctgtgggatgatgtagctcttgcttctggaagaatgtggctaccctacaagcctggacaaggtaaagaagtactaagttgggtgggaatgagagaagcttcccatctccctccagacccctgatagcatccctctgtgggaccccgtcatatatggcctttcacagtacaccaatgggcagcacccagatggaggctgctcaaaacttccctccagaggaaatcaggcgtaaagtccttgcctaccagcaggccagggcagccctgggtcacagtggctgttttgcaatggtgtctgggaagaggcctctgggagctctttctcaatggaaccaggctctcacaggcatcacaggtcatatccctgttgcctcaacctggtccaactcacagaactgacctacctagtggggctgggaaggtttaggcagacagacagacagacagactgcctgaggtgtgagggagtacacttaccccctgtgaccaaaaccccatgtgtggccagcgtggccgattactcatggtctggggagggaggacagccggatccagaggtaaagtctaacccatggagtcctaagcaatgggaaaggagccccatgtggattaaataaacatattcctgcctgcagatccccttttctaaatgcataaggcagatgtactatctgaaggactttggactcagtgagttgtgacttatgtaaacaataccacactgacttaaaaataatccacaaggcaggaaaaaaaacctctttcattgttataaaactgaaccaagattacatttttttctcctgtaattgcttctcagggtccgtaaatagaccttattataaagagctggggaggggaacagcaaatcaagataaagtacaacctttttttagattatttatgggttttttttttttggtctgattctgaaccctttgaagaactgaaggaatatataaagtaagttaactggtttcattccaaggaatgtcaaataaaactccagtttcagagagacagaactctaccagtgttcccaaatgccaagaaccttctatgtcatgttttctgggacctaacgttattctccttaaacctgccatgattttcagttgaaaaatacccaaagtggatgcgagccttgcccagggagggcatcctgaatgtgtgattcccatttcccacaactcagcgagggaggaagaccctgaccaagaggagagcagtgatcactgcttagcagagagtagcttctcagggacttagcatttgaaactgacaagacattgacctcagttgatcagcctgagccacctacttttcttggctgcctcttccccattccagccactctctgtgtttagttcttttttttttttttttttttgagacagggtctcgctctatcacccaggctggagtgcagtggtgtgatctcaactcactgcagcttctgcctctccagctcatgcaatactcccacctcagcctcccaagtatattggactacaggcatgtgccaccatgcacagataatttaaaaaaaaattttgtagagatggggtctcaccgtattgcccaggctagtcctagaactcttgtgctcaagcaatcctcccgcctcaacctcccagagtgcttgtctgtgagtttagttctgatgactgagtctagctgtccaaagacgctgaactgctgagctccaaagagggctggcctctcccccgcacctctgtgctggacttcttcagcacctgtgaagggcccagctgaggctgtggccagcagaggaaggggaaccttatccc

SEQ ID NO: 2 - DNA, 71532 bp, Homo sapiens
gggataaggttccccttcctctgctggccacagcctcagctgggcccttcacaggtgctgaagaagtccagcacagaggtgcgggggagaggccagccctctttggagctcagcagttcagcgtctttggacagctagactcagtcatcagaactaaactcacagacaagcactctgggaggttgaggcgggaggattgcttgagcacaagagttctaggactagcctgggcaatacggtgagaccccatctctacaaaatttttttttaaattatctgtgcatggtggcacatgcctgtagtccaatatacttgggaggctgaggtgggagtattgcatgagctggagaggcagaagctgcagtgagttgagatcacaccactgcactccagcctgggtgatagagcgagaccctgtctcaaaaaaaaaaaaaaaaaaaagaactaaacacagagagtggctggaatggggaagaggcagccaagaaaagtaggtggctcaggctgatcaactgaggtcaatgtcttgtcagtttcaaatgctaagtccctgagaagctactctctgctaagcagtgatcactgctctcctcttggtcagggtcttcctccctcgctgagttgtgggaaatgggaatcacacattcaggatgccctccctgggcaaggctcgcatccactttgggtatttttcaactgaaaatcatggcaggtttaaggagaataacgttaggtcccagaaaacatgacatagaaggttcttggcatttgggaacactggtagagttctgtctctctgaaactggagttttatttgacattccttggaatgaaaccagttaacttactttatatattccttcagttcttcaaagggttcagaatcagaccaaaaaaaaaaaacccataaataatctaaaaaaaggttgtactttatcttgatttgctgttcccctccccagctctttataataaggtctatttacggaccctgagaagcaattacaggagaaaaaaatgtaatcttggttcagttttataacaatgaaagaggttttttttcctgccttgtggattatttttaagtcagtgtggtattgtttacataagtcacaactcactgagtccaaagtccttcagatagtacatctgccttatgcatttagaaaaggggatctgcaggcaggaatatgtttatttaatccacatggggctcctttcccattgcttaggactccatgggttagactttacctctggatccggctgtcctccctccccagaccatgagtaatcggccacgctggccacacatggggttttggtcacagggggtaagtgtactccctcacacctcaggcagtctgtctgtctgtctgtctgcctaaaccttcccagccccactaggtaggtcagttctgtgagttggaccaggttgaggcaacagggatatgacctgtgatgcctgtgagagcctggttccattgagaaagagctcccagaggcctcttcccagacaccattgcaaaacagccactgtgacccagggctgccctggcctgctggtaggcaaggactttacgcctgatttcctctggagggaagttttgagcagcctccatctgggtgctgcccattggtgtactgtgaaaggccatatatgacggggtcccacagagggatgctatcaggggtctggagggagatgggaagcttctctcattcccacccaacttagtacttctttaccttgtccaggcttgtagggtagccacattcttccagaagcaagagctacatcatcccacagacattccctgagcacctactatgtgtcagtgctagggatgcgaggatggcattcacacagcccttgttctcatggagcacatagtccaggcccccagagattaggacctgagtccttccctatcattccacagccactcccaggtctagtaatcctaggttctagcacacattaaagctggcgctcccagagtgttcgcaaagcctgctgcccagatagtaagactgaaggtgggaatgagtgggtgaccagggaaggtgccactggaaagtaacattcaagcagccctgactgctgaagaggccagccctgtagctatagagagaagagcgatttagaaaaagcgggcagctgcagccttaggcgggagtgagcttgggttgttctaagcaacggcatagggcatactccataaaagagcccataatattgacatttatttctccaacgtgtcctttttttatgactcatgaagacttctgttttataccagccaccaagtttagaagcaactaaattgtccgaaatgcacatgccacccagagcagccagtgacagtgagttcatcaagacatgatcagtcattttcttcaggtgaacttatttatcagaatcctggcagcgctatggccctggacagcagcttttaaaaaggagaggagaaatagtggccccagggcccaaacaggtgagatgaggaaggaggagggggctaccaggaggcaaaaaggggcgtctaaaagggagagccgttttgccaaagggctggctggacctgctgtttaaaaaagttctgtcatttgaataggctccatgttctcactactcttttgaaagtggcaaacaggccaggcgcggtggttcacatctgtaatcccagcactttgggaggccaaggtgggcagatcatgaggtcaggagttcaagcctgaccaacatgatgaaacccagtctctactaaaaatacaaaaattagtcaggtgtgctggcgcacgcctgtaatcctagctactcaggaggctgaggcaggagaattgcttgaacctgagaagtggagattgcagtgagccgagatcgcaccactgcactccagcctgggtgacagagcaagactctgtctcaaaaaaaaaagaaaaaagaaaaaaaagaaagtgcaaacagtacatacatatgatgaaggtcaagaggccaagaaaagactgggctttcatagaagatgatttacctgagtcctcgtcagacatttagttgccacacacccatccaacaacggtgtgttgagtgcctactaggtgccaggtacggcgagatcccgctgagtcagaggcacactggctaatgctagcagccccacagacagagagacacaatttaaaatgttattaggatcttccagcagggatgagagcatttacctataagccatcagaaggccatccccagagcttggtgactggacccggaatcaggctgggagttacctgggagcagccactgttctgagccttgctggctggggcagggacagagagtctggtcctgggagggacttggagcgggcaagggtgtgcctgtggaggctcccacggaggccatttctgcatagtattgagcaatcagaagtagaagttcccctggaagagcttggtgtctaaccgggtgcaatgtgcattgtggtctgttccccaacacaaatcatcattttcccttctaagtgctcacacctgaatgtgctctctcagagcctgcccctgtgtgtcctcctgtccttgtttttcaggggacgatgatgacacttttcccatgattatgagattcccctcacactctacactctcctgagctatggaaggccaggctcaagcacagcatgatccacccacgttcactgcctgtgccacacacagattcggttctacctctagcccttctggggtccacactatggctccgcctcccgtctctgagctcgctgagttctttgggtttgtcagttgaaggctctgactcacctgatgatgactgggctctccccaggctcacaacccggggccacctcacctccaccctgccgtggccttggccttggccttgggccctacagcacactctgtcctccactcaccttgaatttggctggaggcatggatgcctgtgccagggcaaactggcaaagggaaacagaaaagagaattgatcattttgcaactacaacagaaatttaaacagacagaaagcaccttgctgattgctgtccttcagagcattgtccctggggagcattgctggacccgatgctgctgtggctgccccaccactgctggagtcatccctggcagttttgagcaagctgtcattcagcagctcccaagcccagctgcacactggagtcatttagggaccctttaaaaatatgacactgcacccccaccacagactcagagaggtgggcctctggtatgggtattttgtaaaagcccctgggggagtctaacatcctctaggcttgaggacctccctcctgtgccctgtctggcctgtgttcatagatgctccataggcgccactgggccatcatccacctctcatgaacagatgctcaaggccctgtttccccggcttatgagagtgcttcattaaagcaaatgtctaaatattcatgctccaggctttctctaagcagccagtgggtacagtccaccttcctggagtttctttccagaaactcaacttaaaaaaaagccctttaaaatgaattgacagccctttgtttctagataacccctgagttgagttcgtggtccagcaaaacagaactctccattcactcttcctccaccccagcccctccccaaccgatctcacttcccactcctgcttctattctcaggaagcgccatccccgctaattgctctgacccaaatcatcctttagaatccttgattccttctgttccctcaccttccacatcaggaagtcctccctcctcttcctccaaagcctgtctgccctctgtccacatcccaggtctcccggggtggactcctgacttctactcctgaccaaaatccaggcacagccacaatccaggcacagccacaatccaggcacagctcttaattttttaactttttatttgaaataatttcagacacacaaaaagtttgcaaaatagtagagacacttttcttatagcctttacccagagtacccagatgttaccattttgccacattttgctttatccttctcccttccaactgccaccattccatcctgccccacatgcatgtaagcacatcacatttttctcctgaacattgagagtaaattacctgttgccccttgcccctaaatacttcagtgtgtatctcctaaaaatgaggacatcctcttacctaaccagagttcagcgatcaaaatcaggaaattaacatggatgcaatattaacatctacatattttcttcagatttgaccacctgccccaatcatgtcttttatagcaatggaaaattccagatagtatattgcattcagtcaccatgtccccttggtctcctgtaatctggagtttctatcagattatgttactcctgtgacaagagccctccactgtcctgggaatgtagggccagccctgtctcgggcatgccccctcaccctgcagcctggcctaattctcaagcccatctcccccatccatggctccctccctcgcatgtccccgatgcagccccttcctccccatttgctgtgctgggcttcacatctctagtggctctgtctggaccgctcttctctggttgctcctgatcaccctgaggtctcagaggagaggccttcctttctctggtcccaccaccgcacctggtccactacactctgccttgtttatttcctgcacctttcactgtcttggtcactggttcccctacgtgttatcttatgcctcccacctccactgaacatcagctccatgagcgcagggggttgtccttgctaattcccaagcatgtagaatgaattgtgcctgatacataatagaggctcaacgaacctttgctgagcgagtaaatacatgaatgaatgcaagtcttttagactatttgggttagagacaatagaatcctttcaccaacacttaaatgagaaagagattctataggcactgattgaagacaaaatgcaattttttttcccctcagaaagcctttcaaagtgtcatccaatgcctgaggaagctttgactcaccactttcccctttcaagggtccagaattcaaagtaatagaattgatttactttttaagaaaatataccagatcttctacagtcaaggatttttgtagcaggcgtcttggcagaaataagtgacacatattggcctgaaggtcatggtcgagtaacactgggaagagtttctgactgagttagagactcatcggaacctactccatgagcggagatagccccctttcctgttagaagggccttgagggacctctgagcacccttgggggacctacccaggatgaggttagaggcctggatccccagtctgtccccgaaggggttccaggctcaggcccccagagcaagggtgagccaggaggtcaggggcgagcctgggcaggcagcaccgaggtgctctcacttaaaattgggaaggttctgcatcttcactggggaggcaaatcaatccttggctgtagaaatgtgtaaagttggctgtgcaagctgtgtgcttccctgtgtgtacttgtacctcaatactttttttataaaggaaaaaagaaaatcggaggagctccagctcttcaaaagcaaacagcagctgctggggatgatggcctgcctgagtccctgtggagtccagtcctgcctgctctctataggttttgctgcaaagtggggtccatgcggaactcaaagatctgaacccccagccctgctctccactggcaccctagggaaggtgtgcaccagattgaaacaagcaaaaggaacacgtgcacccagctggggctgcagctcaggcgcagtgtaggggcacaggcagtacgtgcctggcaggtgggggtaagatgttgagggctcgggaggctctgggttcagaacaattccctgctccaggtctggagagaaaagatttcaagaaccagacacgaatgagtgtgggagggttctgctcctgatgggtactgactagctccttcccacccaatctcactctaggctcctggctggggagcccactcccgggggtcttctgacccctttgctccatcactctagcactgcgatgcccccattaaaatggacttaaatcccaacaaatacctggggagctgctctgccctaatggcagagtgaggatggggcagtgggcaggaggggggcccacaccctccatcacacagaggccacacctgtcaggggtctgcgtggcaattagcaggctcaggaaaaccaaggactcttgggacagcccacacgtccacaggaggccctccagttaggtcaaaagagtccatgcaggactagggccccacagcaagaagagccactggcaaagctgaaatgccctggtggctggagatgcaagtgagacctgggcctgtgcatgcacattctcatggcagatctggaccaggtcatggagtcatgagtccccagaatgctggcagctatgcagaagcaaggctgcaggacaggcatcctgtctggggcagaccctggctggctggtctcagccccctgttcctgctcctggtccgacgggccctgcaaggcagcaggtgcgtggtcagacgtccattctctggcagagccacactgcctggcctcacatcctcgctctgccattgaggagcctgatgtccctgggcaagtggcttaaccacctcatgacttggttttcctgtctggacacttggggtggtaatagcagctgcttcaaagggctgttgttctgagatgaaaatgaactatgagatgctttgaaccgtgcctcacacgtagcaagtgcctaacggttagctgtcattataggcatcattagaggggaccccgagatgagggggaagtgggtgagacaccccatggagctgtaggcccactactctcacctaagctcctgaaacagctctttccctgggaactacactagagaattttactgtggtctttccgcttactgattgtgagacctttaagaacatggcctgtttaccatgccctggttttaagcattttgatattctcatgtgtgtctagtacatggtaggaccttaatactcagattaagattttaggaaaatgaccatctaaaatatatttttaatggggttgcataagctctctgatatcggcaatgaaacacgacatcttgatggtgtcttttaagagtggtaggccaagtttgatcttgtttagctattaggtaagtggttattgtaagaactaactcttcccaaatctactttatggagcctgagtggttattataatcatgccttcctgggtccttttctgtaatacctgtaatcattctataacatgcccagaaaaaaagccttcaacattctaatatatcttctcctcggtcatacagtcttctaaggacttaggggttgcctcaggaaagatagagtttccaggaaaaaaaaaaaacaaaaacagcaagtggtagaagttacccaaaaagattagagaccaccttttgccttgctatttcccatctcctcacagccccattctggtctcgacaggggagattttcacaatcagtccatcaccccacaccttctaattcatcttgtttaaagagacttcatgcaacttttgtattcggtccttctgacaggtaggaatgagtcactgctttggctgccagcgacagaaaccagccctggctaatttagcacaaggagaacatgctggagggtgggcgcctgttgcatagtccagcaggcagctcagagacgggaccccggggtgctggtggctggggggccggttactgtggccaagaacacaaacatgccctgcagcttcaaggatgctgccctccaaatggcccctccttgccttgctcgctccagagtcaaagtgctgggaagagtgttttatcagtcaaacattaggccatgggcctgccctcagcgatacctcaggcagggaaagaaaggggcagtgggaggcaggcacacaaagggaaactgtggtggagataagggctggatgcaaggcatcctcccctctttcccagaaaaagcaaataggaaatgtgcgggatttgaaggaagaaaaatcaagtgtactaaaagcatccaaaaccaaacacaatcgatggataaaaatattatacatcttggaaaacatctggaaaaatggcaattcttccctaaatcaagagttactgtaatcctaaatgagacctccaaagaactttctgaaaagcttcaactaattctaagatgcacataaaaagacaatgtaaaaagagccacgatgattttgaaaaataaagacaagaaactcaaaacagataaaactcaagtaattaaaataatgtagattaaacaaaaggatcaatgaaaaaggcaagagctgagatacagaaccgtatgtattagactttggtatattgtcaaaggatcaatttaggctggtggacaaaaagacaacagtgctggctttctgtggggtaaaaactaaatactgtggatcactaaaaaaataaattccaggtggattaaggtgaaaaaaaaaccccaaactgtactggttatatgaataaaacataagaaaatatatttaaaactttgtcatagataagttgtcttaaacgagatacaaaatacagaaacctaagcaagactgacagactgacaaatctgacttctttttttttttttttttttttttttttgagacggagtctcactctgtcgcccaggctggagtgcagtggcgcgatcttggctcgctgcaggcttcgccccccggggttcacgccattctcctgcctcagcctcccgagtagctgggactataggcacccaccacctaagatgacaacttctacataaaatacaccacaagcaattaaaaaacatgctgcagaataaaaacatatgttcacaaaagagactcatatgctttgtatgagagtattcatagcagatttattcatcatagccccaaactggtaagaactcaggtgttcattaataagacaatagacaaagcatggtttgttcacacaatagactactacttagtaataaaaaggaagaaattactgataattgtaacatggatctcatattctgagcaaaagaaaccagacacgacacaaaagaccatatactgttatggttccattaatatgaagttcaggaagaggtaagactaatttatgacggaaaagaatctcagaacagaggttaccaatgggggcaggagaggagggattacctggaaagcagataactttctgggagttacggtagtattctttatcttgacaagggtttgagagacagctgtatccttggtcaaaatttagcaaatgcacacataggatttgtatgttttactttatgtaaattttatctttggagaaaaaaattataaaaaattgatgaactctaaatgatgctgaagtatttggggataagagtattggtgacaacttgttttgaaatgcaccaaaaaataagccggattaataaatgaatacatgataatgcaaaggtagtaaaagttaaaggtagaagctaggtagtgagtgcatgggtattctctgtaaaactcttttgacttttctgaatgtttggaagttttcacaataaaatgttgggaaaaaaaggcaacagattgaaggaaaagtatttccaacatataagagatttttttgtccagaatgtataaagagctaatcatcaatagaaaaaatactcaaccaaaaattagcaaaaactttcagaaaaaaaggcaaatgccaccagtgcctgaaaagatcatcctactgcattgatagaaaaattcaaatgagcaccacttgctcctcacccagcaggcagacaccagctcactcatgtctgacagcactgggggtaagtgggtgttcttatgtgctgccagggcccgtgtgaagtggagctgccactttgacagtgtcttccagagtctgttgaggctgatcttccacctccctgtaccacaagagtgggatacctatgagcaaattctatgcctgtgctctggcacttgctgcagtagttagcatgaagtggagtcgctatggaaagatatgtgacctattgctaagtcagaaccatatacagagctatggcacttacagaaaagcaaaactgctgtgtgagtacacacaacacacacacacacacacactgcagattaagagtccaggagaatgcaaactcctacctcagtgaggaggtaggattaagacagaacaatttgatttgaaacaaatacaatttgaaataaatttacaagaccatattcatgtattactcacccgattgaaagcattaacagattgttagtctaaaagaaagctgagtctgtctttcactttcccagcacttagggtgaaagtgccaaattaaatacttattaggattttatcacctgtatccccaaaccaggctttaatttctttcactcattcctaaggcaattcccatccaccctacatgacgggagctgggaacttggcggttcctggtcatcatttcacacacagggtctaggcacgtttgggtgacccctttgaccctgagcaggtgctgcagacaagccctttctattatggggttgatggggtaagatggctgggcacctgccatatcactcatcaacacagtacagagccggctcctagtacacttccctgcccccacaactccccacccaagtgctgagtcatatctgactgtgcaggcagaatacttttcgcaccagccacatcaaaactttaaagactcgtttacttttaagtgtactgcacggattcgtcttcaagcaaaaatatatgagctacacacagctacattttatgactgataatagcagatgtgtgggcgtgtacatgttcatatataatttcagctgtttctctgacattttgtgcaaacaaatcaaacgctcaccaaaactagttgaaagttttatttttataaaattaacataaaagattgtttaaaaatctgcagttatttacagcagtattgcacaagtaaagtggcaattaccctgtcaaaattcatcagtgcaaaacacaagtaagccagggaaactgcaatacaaatgctacatacgctgggtcctagaaaacaggttagtgatggatcagtatacagccagatcagtgctatttataagtgggtacctgatgagttctgatacagtaactagtggtcacagaatctggacataaaacataagagagcttctatagtctgaaattcccaaataaaagtagtcaagttacttaactgggagcttgaggatgcttcttacacacaatgctgtttagagtagaccccaactgatttagcgtcatctgtagacacgtttcccccaccccacgtgtacgtgagtggacacacacaggcaccaggctaaatcagcagggatggcagaaccacctgcatggaaccaccatgaagtctccttaaagctcccataagctttcacatcttgacacccagtccagtggggccccaacctcccctgaaggagatggagtatcagaaggagggcatcgacctgaagaagcaggctgaccaaatgcagtgaccgtatgggtggggcgtggggagggctgtacagttaattagctcctgaagacaagttagtccaacctcaaagcacaggaagttgcacagcaggtgggggaaaacccagctactcacagttgtccacaaggggttagtggcctgaggtggtccttaggcaggagccacctgtcccacccattcacttgtcctgcctggccctagccctgaacaactgcaatgcagcacctctggaagtggcacattttatttcttttctaaacgctgagttgtcagggataaattttcaatagaaaaatctttcccacctgctgataatactttggtttttttgttttcctaaagataaagcctggagtcagcaaaatttgcttgcatgataagctagttgctttggaacaaacagaaggttgctgggtatttcttggagtagaattttgtagcctgccagactgagtttctcactggcatcaaacacacacttcatcataagggcggcaaagcccaagaattgaaacccacttgactggaaataccaggacccgaaggtggagagccaccctggaggaccacgtggtctgcaatgagctctccagtcacccccgacaactctcaggagttaacttcatgggacggcaggggagtgggagacagggatgttaatacttttcagaaattaagacattaaataagcagaaaataaatatacaatatttctacaagttacagcattatgaaacagtaggacacatcacacagaaaaagaatctacaatatttacaatccttgattttgaaaaagttgagaaaaacagtgatttttttacttatttatgctgtacaaaattttacaaggtaaaggaaacacaattgcacacagacatttggctcagttgataagtaatatgacctacgaatctaataaatactcacaatatatacattaagaaggggaaacggcagacaattgtattccactatatttttttaatcagaaggaattttaaacttgatttctccgcaacccccacccccaaaattcttgatcaactaaccagttgggaagggcatctgaagaatcactcatgaaactattttgtgtgtgtttattgcgtttctgtgttaagtcacaggacactttttacaaacctcacatagggagaggttgtcaaggcacaaaacctgcagtaagtttccaaaaaggggatttaattattttttctacaaaaatgttttttaaaaaaggtaaaaacgtatacccacgggaggcatactttctgcacagaggcatcttgataaccagatacatacagtacagagacatccagtcatcgctttaagttctggtgccaacagcctggtctttaatactcctacaattcatagaatctctaatttcctcaggaactgtttccacagccagcctggaggccgccaggccagagggaaatgtgctcatgtggtgcacacagcccctgggcagcacagggcagggcctcccgtgcctggcccagggctgcacccagtgtgtgctcccaggggctgcagggctgaggaaacagagtaaagtgctctagtcaggagactggcacgtgagtacagggatcctgggagggggtgcccagatccaaatacatctttggtgtatgtgtgtgtccagcaggcccacggctgcaatcctaccactgcttgtaaccgtgggctttgtatgaccctaccaatgggctcgagacacatcagggaacaagatgagctccaacacagctttaaaaataagtcaaagtcccaaggagattcttggggaaaggaaattttttaaagtaagagtatttggattgaaatcatctctacctaaaggaaaaagtgaatatgcaatatatacatatatattttttaaattatgaagataaaaatgtttagatttttccacctaatttaaataacgtgaacatgctggctcttctatcgggcaaaacactagttggtggcactgcttactcatttgaaaatttagttatttcttttaaaagttgtttaacgatggagttttcaaaaattttaagagttacagagttcacagaattgtcttccctcctcactttcactgctccctaacctgactctttcttgggtctccctgggcatctgctgcctctgaaatgactgaccagtgtgtggcttccttccactgcactcataaggagcaggcacagagaaagagcaccctcactacatggctggggtcacaagtggcctgacaatatccaactgtcctggaaaaatgaaaaaaaacagacttctgcccagaattattcttctatggtgctggtggaagtgggatgaggcctgtttcaaagtgaatttaaaggagtgaagctagtggactgtgagttggactaaaatgcaggaggccaagcaaatggccatcagaagccctgccccaggcctgtgccaattcccatgagggcgtgagctggatgctgcagctggactctgctgtaatggacacggtggccctctgggacctgatgctgacagtgcatcctgtgaccatgggaaagcctgcaaccagaaaagccagcagcacaaaggggcgtagcacttaagtctgttgttattactgctattgcctcttcagaatacttcccaataacatgctcgtcgaaatggaatgaaaaccaacaccaaatgcttcccagttaataacagatcgctcgaactgtgcaagatacaggcagatattaactcttgttctgactcaatttcactttatcatgaaaatacactggaccaaatctatgcatctgagtccagactggagttgcatcacaaaaagtgatgaggaaagacgcaaaaatagtctgaaattttgccacagatgcaactgaatttataaaggtacgtaaatatttacaaatgggactggtatatcaatgcaggctggcaacagaccctctgcccttttaatcagttccatttcaaaagaactcttttggtattaaaaataatttaaaaaggtcagagaggcaatagtagggaagggagggagtatatcacacgtctccctgtttaaaaattctgtaatctctaaaaataaactaaggcagctttttaagttagctggctcagtttccactgcaggggttacataatcctctgagaataggccgtaggttcttaaaattttaatacaaaagttattcacaaattggttaaaaagtttccatttcctttttgaaaaaccttattgaaggtgagggggaaaacacactgcatgtaaacaccattcttacacaaaatcctgctccaaaaaaccatggtttgtatattaaaaagcaaagaatgctccctcctttacattcacaacaaacttccattagaaattctgctgtgtggtgatgaacagaaaggtagtcccatccagctcggtgtcttctgaaacgtcacctgccccctccacaagagaaccgctggctgcataataatggcaccaggagaccgcggtgctgggtcttgttggtttgaacaagcaaaatgtctgcatggtatctcggctccgcaaagaacctgtcaatgcattctccacaccaggcggacaatgtaacgtaacagtcgtaagataaccattcgtgggtggtcttcggctgcttggtaattattcaaaaatacctgaaacaacaaaaggaaagcttcttagtttctccctaatttgggggtggggaggggtgggagcccatatttaagtgaacaaccaatcccatcttaatcaccatgaaaggcacctcttcaagagcactgtgtcacaaagcacgatgcctcccagagattgtgaagaaaacttgttttcatttccctgcaaaggggaagacatccctacaaaaagggcaggcataccaatgatttactccttaaaataggaaaaaaaaaaaaaaaaaaaaaagcactcaaaaaaatgtttgaaaaactcaaagaggatgtaaagcaactatcttaccacccaagttaactgacattcaaatatgctgcagattcccccaggggtgaatttctggtagctgtaatttatttgaaaaaccagtgatttggagtaatctgccctaagaagctaaataaagtctcgcagtgatgcgccattgtgcctctggctgcttggctatgataaacaccgtgacccagaggggtgcccatggtcacagacacaggcaatgtcaacccccatcctcccaccttctcggtatgggaaggaaagagcaatccagaacataaaaaagtctctgtgtcagtgaccagcatatgtttgttacaaactgagaaactgttcaaaaggaaatcaccagcttatccaatgctttcagggtcctcaggtcttccacagcgcccactttcaggttctaatccattttgtgagtatgtgcaaggtataaattcacagtcaccaaaggcagcggcaacacaacacctcaacctcgacgccatgagctacaacctggttcactgttcaagtctgaaatctgccctggacatttcttaatgactaatccacacgagaccgggctacatgactgtctctccacaaacccccttctcattgggtgggggatacctccaacacaccgtcgcgggaaccacctgccatgcatcaggctgagacaactgtcccctcagaccccgaatggcccccacagacaccagccgcagctgcagctccactgtttacacaagctctgccgcgcttgtttgacagaatgggattgtgataaggccagggcatttccccttttccttccataacaagattggaggaaatcagctttatgtaagcgattcctgtagaggcactctgtaaccacagtctgtgatttttatctgttttacacacaagattgctttgttttgatttaactttcaaaattactttgctgcctctgtgtgagaataatttaggggaaggttaattttagtgtagactaatattaataggttgaaagagacttattcaaaataaaaccacaacttactaaaatgaagaaagtgtacgctatgatgggctaagtaatcaatccaggcagagttgttttgtgccaacctggtgtcattgccatgcttggtgtggccagaaaatggggctgactgggtgtccacaatcatcaggacaccaatgagggggctgggtcaacgtgaaggacagaccccaactgctgacacttggtaagtttcatattccagcactggcagcgtccaagggaagaaatctcctgcccactctttgaggacagcaggaggctgtgaccaagcttaagtagaagtcacctcacaagagaatctttccaaggtttttagagttccactttcatctcaaatgtaaaggatatggggtattcaaagacatgttggagagggtggggaaaatgcaggaaattttggcaaaagttacacccaatccctgactcatgagaagatgctacagcatcccagtctgcaagtgtgcggggatgcctgccctctcagacggcgggcatgacaacatggcacacgcttttaagctgacaagcaattgcttttggacgacattcaacagaggaagccattaccacggattcaaagagccgtgccagcccagaaagcatttgacagctggcacggccggctggagctgctgttggctcgaagtgtatgcccgtattgcaaaagacagctggaggatgggcagcccctacctctgtagactggctgccctctaatacctgcagccataaaaattactgtggcttatagtcggggcctggtgacactaaactggggcaagtggccaaaagctgcagtggggcaaagacgcagaactaggactgatggctcaacgctgctcaaagcgccaacagcttcagccagctccagtgaaatctccctgcgatctagatactgaggaacggctgctacaattcagctcctaaaccagggcctttggttttggggtggtataaagggtcaggagggagtctgaagcaattagagaaagccccctaagatggaatttactggtgaaaggtcaaagtaagggcacacccagtggcttctggccagggtagcacatccaagatggaattggaaagtcaggactaaagatgacaatccctgtattgcaggggagttgccagttaaaggcaagtatgacactaagactgagccaggagctgtcatttgcagtgtgagtggttcctcgcatctaacatgggctaagacaataaacacacccataagcggatcatcagcagccatgccttgaccgtcttcctgagacctgctgtctgcagagctggcctcccgcctagtgtccaataagtctgcgtctgctacagtggttcttaatcaggtggaagaggcatctgtgaatcaaaagtgcatttaagttctgccactcccaaactgggtaatataaaaaagacagactgtctttcctgattacaagcgttttttaaaaaactattaaaataaatacaatcagggaagatgctccactccctcctgaaacttctgggtatcttcctctttatgggctgaactgtacactgtgtcccctcaattcatctgttgcagtcctaaccccccggacctcaggctgtgactgtaagtggagacagggtcatcaataaggtgattaagttaaaatgaggtcactgtggggtgggctctaatccacggtgttctggtaagagacaatcaggacacagaaacccacggagggagaccacgtgaagacacaggggatgacagcatctacaggtctggaggctaagtctgcaccatgatcacagacttccagcctccagaactaagaaaaataaattcctgttgtgtgagccacccagtctctggaactctgcacagcagccctagctgactaatacacactttcactgatgctctcagtctgtcactctttaagtgaaaacaatccttcttacagagttgggtaactctgttttagtctaaattgcaaaaatactttagaaaggtataacaactcatttgggtgaaggagattatttttaaagaccaaatttgctagtaagttacaactgaagtgaccatatactacagttctctcctctctcactttctctacgcagacacacatacacacaatcacaagtgcacaaagaggagggccccacccagttgggtactgtaatctccatagcctaaatcaagagctatatgaggactgggttacctggaggtaactgccttttgtggccatcccatgtgtccagaagatgactccttcaacattcacaaccttgtgtgtccctccaggaaccagttcctgacagcccctgcccctctcagggtaaggggctccagtggccctgttgctgaccagcatcaggtggggggcctgacttcaaggcacgtgtctgtgtacccactaggtctgatggtaatagctgtgtcgccagcacaaaacagtaaacaagataataaagtaaggacaatacagaggcaaataaaatgagagggaaaaaaaccactggccagagaggaagtgggggagccagggcaggaaggcaccagggtgaatccccacatcaagccccaaaggaagaggagaatttcttggaaggacaagaggagaatgggcagtgcaggtggagagagaagctgggcagaggcagcaaggccaacaggcagaaggggccagcagttcagtaaagataatctcagtagtggataagtatttatcataaaccagaaggaaagattatgccaagttgcaggattgctcccccacagactgtgccctctaagtgtaaaggcataggattatgtgtctacaagttcctcagcatagacttaagcagtctttctctgaagatatgaacaatgccctttgagacggtgtcgagcattcaacagggaattcctaaatagttcttcacatgtccccatgacaccagatggcacaagctcatctgggtggcaacctgggaggagctgtaccacaggaatgccctagcgtggggttcctgctgccttgccaggggctggagctgccactgcagcgaggaacattaagtgcagggcagaagcatcttcaatttacacttgggacgaccaattaagtgtcagggaatttaatgacattctaatgccaaaataatcacagaacaccactctcttgctcagtccagggaagcagatgcttggaaaacaatagaggccctggccccagggaactggtcaggttgaacagcagacaactatagaatgcagctttggattcagcttcactctccaacagtgagaggagtcgaacctttgaaaagctgcctagggcactccaggcctttggactttgtgtgcccaagcttggggatggaagaattgccatggccaccactaaatgaaataacctagcccatgcttttcagtccccacaacaaccctgagtgccagggtagcattccctatgctgttttgcagccagtgactacagaggtcaagcaagtgactcaaagtgcagctgaagacagtggcaggacaggatgggtactcttggcccacatgaagatggaatgccagaagcaggaaagaagttaaacgagggctttcaggccagcaccttccctcctcgcacaccctgtgcctgtgcctgtgcctctgctgggaagggcccgttgctcctcagacctgaaaggggccttgtttcaggctgagctgaggccacagaggttctggagtgcgaattgagaatcactaagtgattcctacaatgcagctcagaatacagcccactcatccatgctccaaaggcagggctgacacccactgggcccaaggactcggtaagtacaacacagacctagacatagcatggctcaaaggggacttaaattaagaaagcgcaaatgtgtgtaacacaatttaaaaaaaaaggttgagatcagacatgacatcaaggagttatcctgggaaccaggggtgagatgtgctgtaagagagccacagtttagttaagagtttcctggcagtcagagcaacgagggaaaaacgacaatttcattgtcatatcaaagcaagctcaattcctaattctaagaggcattcaaaaacaaggtatacctatagaactctgagatgcagaggaatttaacttactcaaaaacttgtttcttacagaatttcaacagtaaatgtataggatgtcctgaaacttattttttatatatatttaagtgtttatatatatactataaattattatacattatatataataggaggctgaattttggactgtgagaccaggaaggacagagggaatctctgctccaggctcaggcaactgaggaagcagtctctctggttggtgtctgatccccacaggctgcagaagagagggcctgggatggacatccaggagcctgagaatacccaggggctgtcacggcatctttagggacactgaggtggcagggtgggacatggaactaggagtcacccccctgattctgttagaactaccactccacgactcgttcataacccagcagtctaaacagcattttaactggcaactaagtgacacagaagtcagagagaaaaaggcccagcacacagttgagcatgatgtggagctcttcaggaagatctggtctctctccactttcagaccaacaaccacagtcaaacggcagctgagctggtatttcagcactggttccatatgcatgctgttttcaggtgtcagaggagattgctacaatactgcccaacaccaaatccactttctattcatcaccaaggcaacatggatatttgcatagcttgtgcctgctgcactttgatgtcaccacagctggggaaagggcactaggaagttccctcccagatgcatggtaccttcaccccaaaccaggagagcactctcccctagcgttgcaaagctatgggtgctgcagctgatctgctatggtgacaatgtggtcttcagaagtcagataaaaactacatttgcataaaccaaacttttatcctatttttgacacactatttcaaagaaattatgatagttaaggcttattgtgacacaaatctcttctccagtgaatgtccaggtgaggctgtgcactgaggctcttcaggcagcacagcacagccctccacttggtaggtctctagcctgtcagactccagacctggtgctggctaaactggggaacaactcccacctgccacttctgaaatcgtcactgttctatggccaaccacagagaagagacagattgttctgacatctgtgtgaggcaccagtagttggaatattagattcagagaagaaacacactgttccaaaatgtttcagcctcagaaaaaagctaagtgagacgtaacatagtttaaccacaactaaaacctctccactttgtttcaggtggtagaagtctagtgaaggatgatatgagaagcttattatttttgaacgtctgcagcagggccaagccttagtttgtgtgcatcttcatttcctcctcaagagatttaaaaaaaaccccagttagacctcctgaagtccccttccaggcacctgcatctccttcctcatggttatgtgttaatggccttgatccagagctgcaaggcagccctgcaggtgtaggcacctgccaaacagatgagcactcacacgtggtgcaaacaagcacaagtcctttagcccgatgcccatccagccatttaaacacacaccagtgcctcagcctcatctcatatttgcctacacccagacacagcatgtgcagtagggtcaaacacacaacttgtttaaaaagcagttccagagtatttaaaagatagacaggtgaacagagttcctggcatctccctttctaaacgccgaagacccattgaaaaatgtttcaattacagttcaaagtgagaggaaacagaattacgataacagatgataataagaattttctagctccatctctaaatgttcttacttaatctccactacatgcctaagggatagaccagacaattggcctcctaaaggttaagggtagagtcagggctctaggtctgaccccaaagtccccacacttctctgtgagtcgtgttttcctacgagatcacactctggcttcaacgagtaacagaacgcgcttgtttggaaaaccagcaatccatagtccacataatcccagccacatgttctcccaaaagtctgaggggaagaaccaaggagctcatcacctctggccattgtacttctgggacggaaacggggtagtctaagacaggaaagaaaggctcctaaacccaaacactgagctgcctcctccagctttaaggaaaactcttgctgaacctgaatgaaaaccgtgccactgatcaatggcaggtaccaatttatctaagctcctcatgactgcttttgttatgaaaactgacattctatcaactcatgtgagtgaagtgtggggcaacctatcattgcatgagttaggtctaatttgaatttaatatctgatgtgcagatttccacgactcttttcacagccagtaacagaaagcaacttcttttactaaactccaacattcaattaatgaagacctccaaagtacgctgagaacacacgtttgggtttgtgttcagtttgtgcaattaccaagcaggctaaactttagtccttgcctttgtacattattcacagaagagtgactaccatttataaaaacaagaatgagatagcactggggatttcacttctcaagaaggagagcatataagtatttcaaattcatacagagcacaggaaaatgctaatgtaatgacacgttaaattctttccatcaaaatcagtctgcaagtcaccttctcaactctactttgtctcattcagggctagattttggtctacatgcacttcaatcaattcctgtctgcacatgccctggacagagtaggaagtaggcagtgtaaacaaaagatcactgtttcttgtgatcaaacaatgaaagggtttttattcactgctggcctcatctggagagcagcttcatgtgctgctgtccactgcagcccaccaccaggacatgcccaggtcacagttagccaagagcagtgttcctgcacatggagtgacttgagctggacaacctgactgtgaagaacctagaagccacagaaggtaaacaactccagcttcagtattaggggttatggaggggaaagagggaggcatgttggttgcagaatgggtccagttattccaagagtaagcatttttacattctaagggcttctgactgcagccccagcccatggtcaagactcccacccaagtagacactatccttccagtacctccggcccacatctacagagggtcgcaatctacacttgctggcactgcgtccagcagatgaaccggtacatgcgctcacacagtttgggtgatgaaagaaactggcaaccgctactgaagaacagtctggctgtcttgggctgacacactcaccaggaagagaaggtgcaggctgcagaaatacaaacactgcaccactcaggtaaaggcaagctgctcactttctcacaaattccaaaatatttagtttctcagagaacttctcttccctccatgcctactaacatccttacgctacctagcctttaccaatagcctccctactcgccactaaggagtctcacaagcttggagtcttttaagagtgccctgcacagcagacctgcataggaagagctgtgagggtcagtagccctctggccaaagttcattccgcaacaaatgacttttaagagctccgtgaccttcacagcccctgggctttgtcccacaactggttctccctgtgcctgcactactggtgcctcccgccaaatcattaagaatctgagcatcaaaataaatattgacagtaacgcattgcagcccattgaataaaacaggaatctatgaatccaagttgttatactaaataactatataagagagaaaggaaagctctttgtcctttataatctctgtcctattacaaatggaaaagtactaacttcacagtggaagactgtggaagatctttgatccaagatccaccttggatcaaagtgaacctcatcagtaacaggacaaatggacatcatgtgcttcctgctgtgccacactgacacatcacctctggagtgctcccatcagaaatgcaaaacctgagtctcatcatgcagaaatatcagataaatcaaactcagggagtctgcaaattacaactgccctgatccttcaaaaatgtcactgtcataaaagacaaagacagaggaacggttccaaattaacggaaccagaggtaaaacacgtgaattcaatgcattatcctacattggctcttaggccagaaaatacattttttcttttttttttttttttctgagaagggcattgttgggacaagtggtaaaatctgaataaggtccatagatcagataatagttttgtaacactatttgtgaattttgataattacactgtggttacataagggattactcctatttttgggaaatatacactgaagtatttttagtgtaggaaaagcagtatcatgtctgtagttttttctgaaataaattgtacatgtgtgcaaagagggaaaacatgaaaacaagtggggcagatataaaagggtggttctttgtgtcattcttgcaacatttttgtaagtctgaaattatttccaaatgaagttaccaaaatccactggagtagtaaaactccgactgaatagaggggccaggccgttcagcccggcaggttcacctgggaatgacactgcatcgggagagaagaggggacatgcactgggactttgcgctcacctgtgcctctctcacctcctccttcaaggattcagcctccacagctccgtctcaaacgcttccccactgcccttaagtggactgaatacatgacaactacacgacaacttcctctatttctctaactggaaaaacgggaaaatatcctgtcaggctttgcaaggctcgtggcaataaaagactaacactttagacaaggcattgtaatagcattaagcaaataaagacactcaacatttaaaaggttaatatccatcctaaagcagcacagtgagatacactcgcttgccaagagaggataattcccttgtgaagacagcaggtaatttgaattcattatttcccaaaacggcctcccattaccttcccagatttctgcccccaatatttaacaatggaccattaagtgtgattccagacaatggactgtttttaatctaacaagtatcaagacgggtgtctgtggctttgaagatcacggtgtcactatccacagcatcatccagtgttttgaactatttttttttttagatggagtttcgctcttgtggaggctagagtgcaatggtgcaatctcagttcactgcaacctgcgccttccaggttcaagcaattctcctgcctcagcctcccgagtagctgggattacaggcacccaccaccacacccagctaattttttgtacttttagtagagacggggcttcaccatcttagccaggctggtcttaaactcgtgacctctggtgatccacccgcctcagcctcccaaagtgctgggattacaggtgtgagccaccgtacccagccttgtgttttgcgctatttataaaatctgaatatatttacctttgttttagaaaaattgggttataacctagaatctatccctactccttccccctaatatcccagcctactaacaaagctaaagtcctttaatgatttgtgactgtatttttgcactgaattatttttaagatatgcaaaagatgcacaatgacaaaaccttgtaaatactgcaatcagacaaatttaatttaccaaaagcatgggaacaataggttgcatcttattggaaacacagacatgaccatcttaaacatacgcttaaacattaaactgtgaaatgacattgggagaagaggaggggaggcaggctatgaacctgttaggtgctgctatcacatcctcaacagagaggcaaggtaacaaagacaacccagcagcctaggtttcatctgcatatgactcaaactattccccaccttgacagccttcacaagaggatggccggggactgggatgcactccagtccccatgccagccttagcctatgtcttgtcactgaccactcatggcagccatggaggtgcatccaccaggtccatctgggcaggcccacaggaaagccttgtggagtcatgcattcatattgcatgctttaaagagaaacttgtataatatcctttaacacaaccagctctgcggtcaaaatctctaacagaatccttgagaatgtgcaagcttatctcagtacccagagctcttggcagcagggagacactgtgggcaccaggcaaggcctactgccacctctttctctcaggcagccccatctaaggcagatcttgccccgagggtgtctacaaagccccttccagacgggaaggagacaggcccaggggatggtcagttcattgcctaggttcagagatgtctccatacccatcagaaatgatctgtcctgttggattctggacacaataccagaatcgggacttgagtgtattcacctaccctcttaaagggactcatgtcctccccactttgatcctgaatacactgtggtcccacttctcaccagttcttcctagtcaatagagacagccacttccagtcacacacaggaacaccaaaatccctttaggtaaaccaaggcagaggaactggagggaatggttacttcagtgacaagttataaaaccaaccaaagttccaaaaaaattaccatttcagatctaggctggaatgttctgtgaactggtttatgtcaggtggaggatgccaggagttttgccagcttaagacagtattttaagaaattcttaagtccatcaatgtcacacttcccattttacaacagaatcattactacagcactctcctcaaacacccccacagaaaggtaggaagatccgatgtgtgttttcttgactcttacagaaattccatactgaagaactgatagtgtcctttgtaatgggaaaatgtctatttgtctaaaagaagcctaaaacacattgtataaaggcagaaaaataataatcaaaggtaaaatccatttacttagcaacaattaaccaagcatgacctcccctagaaaacagattaaaaaaaaacttttaagaggtacttatataaaacaacaacgttcagaaaaaaaagagctaaaagagaaggggtaagaataaatgatattaacaactataacattttccacaaaataagaattagtgtcttccttttggataaatcaactgaattaatacctttatatgaggtgtttaaaactctgtgaacaagtaaatacactatatcacacatttgctagtgtaccctttagcggaagcagtcacaggtgttcccaatggtactaactcctggagtcaaagtctacacatttaaaaatgtctcccatgcggccaggcgcagaggctcacacctgtaatcccagcactttgggaggccgaggcaggcagatcacagagtcaggaaatcgagatcatcctggacaatatggtgaaaccccatctcaactaaaaatacaaaactagctgggtgtggttgcaggcgcctgtaatcccagctactcaagaggctgaggcaggagaatcacttgaacctgggaggcggaggttgcagtgagctgggattgcgccactgcacttcagcctggtgacagagcaagactccgtctcaaaaacaaacacacacacaaacaaacaaacaaacaaacaaaagtgtcccatgtgaaaaaggtgtccaaatggtcacctacattgcccccaggtaaaacaaacaaaaaacaccgcttctactaactacagaagatgacataggctaaaatttttaaaaaatcaagaacatagctcaaaataagtggcaattatctataatataaagtttttacagcccaaattacaggctattgattagcggcctcctaatacatttcaacaattaaatgtccaaagacagcaatgggctctgcaagggcaatggctccctgcttcctcgggccaccctgcaaattgcaggagagtcttttacatgagtgctggcatcgctcccatgcgctaagtgacaaaagatgttgtttaaaaattacctttaactttgacctaaaatgcacaaggggagtacagaaacacactacatggattgaaacctatgttaatagtatttctagactatctcaaagtctataaataatcccttttttagcattgttttaaagtctgtgctcataaaattcctttgctgcctcctactgtattattttatttaagtgccattacttagtcataaaacaaatgaaaaatgggaaaggagaaacaatgaaaggtcacaactaggcaacagtaatcatttccagaattagcatgtagttacaagaagtcactgtctttttaaaaaaatatagtgtggaaggggagggtgtgagcagaaaagcgggtaaagaaaacatcattaccctccttgcatagtaagcgttaaactcgtctccaatacgccgcaactcttgggcgatccatatctctgggcgcatatctgcaggttcagcctgcctcatggaagctgcatcagaacaaaacaaaacaaaaatcacattgtggtccacagatcactgggaaagttccaaagataagtctctagaggcaagcccatctcacacactctttcacatttctgggagctccctgacttcaacaactacagccatgtactaaagattagagtggcagagtcttctacataactctggttaaagaataagagatatagaataaaatttccttttttaaaactggagattcagaattgcaagaactgaaaacattccaacccattcatacacacttccatttccagaagttactcacaagaaaatggaaaatactgccaaagaaatatgcttgaaacataattataacataacaatttagtttttcagtaaaataatcattctgatcttattacaaggcaaatattcctatataactttcaaacatcatccaaaaatatgaggtgaaatggctgtcccattcaaagcaaaataagcgaaaccctgagaaacctgaataagttggtttctatgaaagcaggtacaatgatacagacagctgtcttcagaatggctaccccagggccaaatgaaagcataattgcatgttttgtctcaatattaatgcagccaatcaagatgagctcaagtctgcaaacaccacatggagagaaaacatgtttttgggtctaagagcaaaggcatttttgaaaggagaagaaagagggaggactgccctttcattaagctgtcactaacattcacacccagtacattcatctgtttactaatgaaaccattaaaagccatgtgacagccaaaaatgaaggagaacaaaaatgtgagttgtcaaaagatcccattatgcattaggaagattatattctccatgtgccaccaggaaagcattacactcagaggtgaacagttcagtaacgtgtacaggaaatgagataaaattcttggatttccaccgctattcacgtgtgacttacgttaacttactgtaaaaatgggcacaccgtactcacaattaaacacacatattacgttttcaccagaacaaaataggtaaaaacctacgataataggattttgccatacgaaggaacataacttcctgtctttatttttgtaaaaggccagtaaaactgatactgattcagagctctataaaaacacttaaaagtgaacactttgaagagtttttgccaattcctctacaatctcttgcctcatcttatacccaagtgaatttaacaataatcccacaaagactgagggcctaggagaggcagaatatcacaccacccctgtgggggtggcagtggggtaagagggacacacaccgatcccctccagagttatctgcagtctgtgaataaaccagagggaggaactgctgtaggaagccctggtggagaagcacaaaggctgatgaaggggaaactttcaggatgtcaggcatggcctctgaatacatccaatcatacaaaatttactttgattgtacctgtgtcacacaaatatttctaacaaatctgtaaaaagtcttaaaattaatttttgaactaaactgggagaaaacaaaatttctgggtagatgtgatatgaggtgatgctgatgtcatagttccttttcctgggcttactgccccttaaagagctactctttttaagtgttctttccctgatttagaagcttttaacaagttagttcgcccttaggggaagaagaaaagtgtgttttgtttgggcacccactgcacaagggtctcatgcagtcctcctaaaggaggtgtgcctacccatatgcacaagtgaacgtccagccagcaagacaccatcacccacctctcctgagcttcaagctccacctgtttctcactacacatgactgagagagaaaactgccttcagccccggagtcagaagtgaagaaaacaccaattatcaaaaggacatctgtgaactacagattgatgttttataaagttggcagactggtaaaaattgcaggccaagttacccaatacttaatacatcaatgatattcacaaatccactcaacaaacacaaacactcacatgcctgacattgttctaggaggtgctctgggtatagcaacaaaggaggccatgccctgctcccacggggcttaccttcttgtagattaaccacttgatttcaactaactgctaaatttctttgggacaaggagacatattttatactttttataagacaaaacaaaaataattccccctgtcaatttcccctaactcgtaaattaagtccactggattctctttaacactttgacttgtgtctgtggtttagaagcttccacatggctcgtgcttgggctggcaattgcaaataccaccaaatactatcaaggggcagtctctgtcagaagccaacctatcaaaactagcacttagtgaatgcattcaacctagccagcaggtaggagcttttaacaaattagccaatttcaacttactcatcttaagagataaatgccctgctggctttggcagaagcaaataaacgaatggcctgtttcttgtacaaaaagaaaagttcagtagttaacattaattagcctaaataaattcatggatataaacacatccctaagctctggcagggagaaatggcgggtgtgtgtgtgtgtgtgtgtgtgtgtgtgtgtgtgtgtgtgtgtgagagagagagagagagagatacaggaggctgtactctttcaagtccctaagcaactctggtgcagacggtttcccaaccagaccctggtgggcaaaaggcaagaaaccatggcaatgctctggagccctgagatgtgtctttagcatttcagagttaggagagttgtattaagcaaagataatggtttagagactaggcttatactggaattggcaataactacattagtaagagctatcaactgtacttaggtgtagttttaaaaagttattatggaaatagatactataaattacattttgcaaaaaagactgatctgtaagggctactctaactagcacctatcactatttttttaaaaaccagtttgtttttttgagatgcaaatacagttatttcctgaatttataaacctaaaagtaatggcaaacactcatcctgcaataagacctagctagtatgcacacagtagtacatggctataaagactatatgataaaaactcttattttaactcttatttattcctgtattttaaaagggtagttttaatctgttagtacagtgcaacataaagttcaattatttcttaagtgacaaaatatcttctatggggatagagaaagcctctctttaacttcatcactaattcaatgttagtgagtctcacaccacatgaaatcaaccagaacaaatgaatggggtctgtaagccccacagtggcaccgatcagcacgagaattaagttttgttatttcctttagcatcagtttgctttgccaccacgatgacaaagggatccaccggtatggtcttccaaaagcgtgcctggagcccgtggggtttggcatacagaaatctccaaacacacgctgctccaccctcactcctgtaatcttacctggatactcaacccaattcctcctatcctaacatactcgagctatcaaaaagataacttaggttgacatttctagtttataagaaaagtaagaaccaagcataaatattttattttgctatctgcaatgtgtctgaccgccgtaaatgttgatacctggtctataaaatggttttatttgaaatgaaagctcttactctgtagggagatcaaatttttaacttggcaattttatgtgaacataaaaaattcttcaaaggggaaattctgatgagctgcatttttacccacagaaaatgtagtttcagcatttatgaaagcacttcactccataaacctggcactaaattttttttttaaagcacaataaaatataaactgctcttgaggtaaagtgacttcaaagctgtaatctgcagcaaaagctccaatcctgcaagtagcagactcaggcagaggtgacttcctaggcagatccatgttttctttctctttacttgttacaaaaaaaaaaaaaaaaaaaagaaagccactaatcaaaacttttataatgcaatatgtcagatataagcaatttttgccaaaagtgtgtccactgaatcttcaaacttcttagaaatcattttttgaagcccggaacttactggtaacattactacctatgggaaaataccatgaagtattcttaatccatttttggaggagtgtggagggcattttccaacaccaagggactttagttctactcaaagatgcatgtttcttaacaaactattctggctcagcaacagactatttttaaagtcttaagtaatttaaaatcttaaaagttcaacaactgaaaaattaataccgtggttaagtggttgatagtgaaatcaggctggggctttcacaaaggactttctgtagcagcagccacggcaggaaacttttttttttaaaaaaagagagattgtcaatctataatgagctcagtatcagtcaggctaaaccttctgatttctctttaatgtccaagagcttctaacccaagagcctctatcccagtgctccaaggaaatgaagtcacatcatgacattctctctccaaaacccagttgttctctgtgacgatgccataaagtgacatctaatgactcaggtgtgtgtactgggtggcaggggcatgtcacacacaagcattctcaactgcagcctcagtctgggaacgaggtggtgcgaccctcatttccgaggggcagctgctgttttagttcccatcttatcattactggaatttcaagtgtagtaccagaaaccaaattaaaattcacaggaacgctgcactctgtactgttttcagatgttcagatatctacaaacactcgagtagaatcaagattagattttcaagtcatcagcgtgaattaagctttgaatcgatattcaactcagaactgagagaggattttacacacataatagaacatacttagccaaaaagtgcacattctgtctggcacttgcgggaaacagccaggcacagccagggactgcaggggtgtgaggagaaagaaggcctgtccttcagacattgcagggctgtctacctttactctccagagagattctgctttaaccaccaaaagcaataaaggatcctgtaaagggccatttctttgtggactctgaaaccagctttaaaccaattccaagagatactccgaaaatgtttaggggagtcactgcctctgtctgcaggtgggctctctgaagctgacattcatttagagaaagaaaaattccaggatgtttattcaactctgtaagtctccttctttaaatatcttcagaaatatctttctaaattcagagttatccaaagcttacaagaggagggaagcaacagaccagcccccttatgtttccttataaaactcacctgggtgatggagctgtttctagtcccagttagctataaggcaaaggagagcaactgccatcagcgtttgcggtaaatgctatcagaatcatgtttgaaatcctcaactctgacggttctcagaaataaaataagcaagtaaccaacaacacacacacacacctccctccaggtctatttctcacttgtatcattttattttttggcaatcccaatcaattccgctgagccactggatgaaaacaaaagctatgagaaatacgatgacagcattagtactcaaagattcctcaatctgtctccctggaacacatttgtgtcaaaagcctgggcagtcacatgaattcaagacagtgcttcaaaaacagctgctaggataaaatactatcaataataaagtttatgagatgaggccagtgttttcatacttactctttcaacgtgcactgcccattgcctttatggagccatggtcaaaagaaacagctttcatcaatttccagcctgaccatttggaaactgccagtaaaccaaggctgtgaagttggacagaagtctggaaactagtgttcatgagattttttccctcattcactattatctgtcccttataataaaaatacaagtctaaagacattaagattaatgtgttatgcctttttactcatttctcattcaacatcagaaaaactaattatccatgtcaccagagctgtccccgacacacatattaacatatttactagcagctggggacaagccaggagcaaacccagactgagctgtgatccctatactcaaggacatccccagctgagtcacgacagaagcccagcatcttgcaccatgtgggagacctgagcaggagccctctaagactcccagcctgtgtgcccgcttcctgggacagatgcacatttcctaaggcactgctgtcctcgctgaagaacactgagtgctacgatgctattcctcgtagggaattgaaatgttcccttctaagccccacttcaatcttgattctgcccctgggactataaaggaaatctatgatccctctcaatcatcaccccactttttgtcagtgaacctgtgccaaacctggtcctaaaccagttctttccatgtgccttgtatgacatcccctgggaagccccttgaccacctggcccgccttggtgtgctcctgaaatcgctgctctgaatagtgtgtgacagtgttctgcccctggtgttctgccagtgttcttctggggaaagacacgggacactgaatactgctactactccttagtttttctacaccaaccttcatcctagtaagtctctgcgacagccacagctccatttctatagctttagattactttcaggggattaaaagtatctgacctgtgccattttattctgaaaaacaaaaataatcccaaaactaaggacagctaaaagaagaccaaccctgaaattactttagtgcaaagacacaaatccctatattttttctactgacgaggtaaactacccaatttatttccccataagaagaaaaatgctttagagaccttttaaaagtaaagataaaactctatatacattggttcacttaagaccattccttagaattaaaatgcttaatttgaagttactgtaagttgtttctagccaaaaaaccagatctgggcaagaggggagggagatgagaatttaaacaaaaaatataagaatttctgatgacaaaataagtgtggcttcctctatgaaatttaaaaccagtagcaggaaactggtgattaacatcttttctcctaaactcacattaaggtcttcagtattactgttttcacctccatgataagaaagaccaagacacaggtaaaaaataagagcaaaaacagaatccttaaaaagctacaccttaaacagtttttaaaataaaaatggaaaaagcctataatgtatacggttaaaacttacaatggtgatatacaaagtgaagtacaatttaacacagatatgattattgataacacactgtagggctaagacataatgaaagcttctcacttaaaagtcacaaaaggcagctgcttctttttatcccattttgaataaaaagaaaaacttttcaccttgattttgctaaccacttgagtggccactgaacttccctatgaagggcaattctgagggaggatccagcggagtcatctgcaagccataaaaatgttgtataaataaattgtgccatgtcttcccagacagataacttgttttgtcacagaaggaaaagaacaggaggtagagtcttcattagcacaagtgcaagttaaggatgtaaagaattctgtgctgaaagactgtgttctggtgcttttgaaggtcttccatgtgtttaggttcacacattcctcctcctccctgatgcccccactttccagggcagacacggctgctgcccagtgagtctgtatcctagatgagaaacacactgtgtgatacagatagaattgggattgttctggtcgggtgcagtggctcacgcctgtaatcctagcactttgggaggctgaggtgggcacatcacttgaggtcaggagttcaagaccagcctggccaacatggtgaaaacctgtctctactaaaaaaatacaaaaattcaccaggcatggtggcacctgcttgtaatcccagctactcaggaggctgaggcaggagaatcgcgtgaacctgggaggcggagattgcagtgagctcagatggcaccattgcactccagcctgggtgacaagagcgaaactccgtctcaaaaaaaaaaaaaaactcacaagaattgggattattattattattattttttatatactttaagttttagggtacatgtgcacaatgtgcaggttagttacataggtatacatgtgccatgctggtgtgctgcacccactaactcgtcatctagcattaggtatatctcccaatgctctccctcccccctccccccaccccacaacagtccccagagtgtgatattccccttcctgtgtccatgtgatctcattgttcaattcccacctatgagtgagaatatgcagtgtttggttttttgttcttgcaatagtttactgagaatgatgatttccaatttcatccatgtccctacaaaggacatgaactcatcattttttatggctgcatagtattccatggtgtatatgtgccacattttcttaatccagtctatcattgttggacatttgggttggttccaagtctttgctattgtgaataatgccgcaataaacatacgtgtggattgttctaactcaatgtaggccagttccccataggcaccaactccctacactgctatgaccactgcggaagggccatggccctaacactgagatttccaggcaggctaaggcatttgccccagggttgttaataggcctatgggaggaccaaggctgggctgggtcacctgctggaacctcctactccacacctcacactagaggagcagaggaacacaaagatgagtcaacaccttgtacagtgtatgccaggctttctttgccgaggacagagttctaagcttcaaatgagcaccctggtgaaatccaagtgaaaagagaaggaactggtggcactcgtatattgcattaaacgctaatgagagtctctttaaatcaacaaatattgcactcctgctatgtatcaaactttttcttaagttgttgttttgactaatttagtagaatttatgatcaagtatcagcaaaaatgaggtgtaaactcacatatatactaacattgtatctattcagaattcactatagactacttcaggttaatgcctttctcaagggaccaaataacagacaaatcaacaagaaaatacacttctagtcttttctccaccacacatcccacagaaaagtaactcactcaacaaatcaggttatcgagcttggctcacctcagacaccttcgcagatgcacgtgcctaagagaaaatcagattccatccacttaagctgccttctttgaaaaaagtatcaaaccactccgtaagtcttctataaactgctaatagtaaaatgttttaggaactggaatgggaagcatgttatgacccaggaatacaatatattttggggggaaaaggccccaaggtatttcaaatagctgaaatccttatattgaacgtgtttccatttaacacacacactcttatcagcttgaaatgattttttttttaaattttagcttcaaaaccatctcactcctaagaaagggaagtccaaactaaaccaagcattatgtactgtgcagagggcagtctgccagtaccaaagacccaagttcaacccggggctccaacactaagcacagcccagactcatgtccaaatccccaagttcggtttcctcactctgaaagcaatgtcaagtccccactgcaaggtttacagacacagcacttgcagtcaactggctggcagtgactgtgagcgcaagatgtgtgactgaaagggagacatgctccatgggaagccctcactgctgcctcgtggtccacacagaaaggcagaacaggaggagagctgcgtgccagcagccctgtctcagggctatttcttgccacacctgtcttggcaactctactcacgaatcatgtggatctggtccaaggcagagaagagaaaatacaaagcacattttggtttcccagaggacactggggagacaaattcattctaagcaaatacttaaaaccacgaaggcctggcctcttacaaacgggttaaaccgggtacatgttgtttatactgacggtttacttccgctacctcatagtgtgtgaaaaaaggttaccaagaagaaggatccataactcactcacttagaaatatcaaaattttgattatcaatggccaacagtctgtctaaattgtcttctcactaaaggagtttaattacctcagggaaaagaaggaaaacgcagttgtagaagtcttgatttcattcacacaatgaacactcctaatgttaaatccacgagcaaccaatgtatcccttattttgggaaaaagtacgtaagtttggattgcaagaaaaagtacttgagtctatgtctcatgtctcaagacacattttgaattatagtcaagtttctgccaaatcaaatgggccgtctccagcaggtgtccccaactcacccccaattcagacagcgctggggtggggcaggtttccagatgtctctccatgatttacccaagaagctgaggttcttctcaggtgatgtttggttcactggcaggttaggggtgattcagacctcctcttcccacgcccccctccaggccactttctagaaaagatgttcttttttgcttgcttgtttgttctgggacccaggggattagaattatagtagcatttccagatgaattcacttccctaggagtttcctatactcctggaacgacagctcctttccacggaaagcagtagagagcacttcattacagtcatgctcactaacctgccagggctgagggctcattgaggggcaaggaaagattcctgtgcgagtttctaccaggggctttctgtcgatttgcttatggaaaaactccccatgaccctcagaggtgagcactatgtcctcacttgatggctgaggaagctgaagctcagacagactcactgctccgcccaggttccatggagggcaggcaggacccgacccaaaacctgctccagacccaagagcagcctgtgggggagacagctaccaagagcaacctgccaacaccaaatccatccatgatcctgtccgatggagatgttccctgagagattactcactttgcaaaaaataaaaaggcagaccccaaaagagtaaattagggggctaatgttcaccccgagtactttcggtgatggtcctgatgggaccaaagcttgatcagcctggacaaaatcttcaacaatgcaaaagacacaacggttaacactgaatcacacaaacaaggtatgcatgcccagtgacaggctgctgggaatgccaaaaacaaagattaaaattataaagagcaaaagttttagtaagtattatctattaaatctgttctgattataaacataatactagttatgacaattgtgtacatacacaaaggcacacagaaaagaccacctgtggccaggagcagtggctcaacgcctgtaatctcagcactttgggaggccgaggtaggcggatcacttcaggtcaggagttcgagaccagcctggccaacatagtgaaaccctgtctctactaaaaatacaaaaattagccaggcgtcgtggtgggtgcctgtaatcccagctactcagaaggctgaggcaggacaatcacttgaacctgggaggtggagggtgcagtgagctgagatcatggcactgcattccagcctgggtgacagtaagattctatctcaaaaaaaaaaaaaaaagaaagaaagaaagaaagaaaaaagggagaaaagcccacctgtaacgaaaatacaacaatacccactactgacagtttaatgtattcttatatttttgatatgccaatgaacttctttaatattaaactagactatcataaataatcttgcagctttttaaaacttaacatcaggccaacaggcatttcccctatgccattattctttttaacaccatgaagacagcaccagtctgccaaaaaaagggcagaataatgtagattctcccctcccattagaggaccaaggacagtcgtttggctgtataaacaatgctgtgatgaacccccttgcatatatgtttctgctagcatttcctgaaaaaaaaaaaaaaaaaaaagtggggaggaatgttacatcttctgctctatgcctgcagtgcagggtctgagatgtgggtggcacagagcttacagtcagcacaggaccaagcctgtgaggtctccaaggacaggtgtgatgagacttgcagagaaggaaagcagtctgaggtcagatgccccagcacaagtctcagccattgaccgagcagggaccagaagtggattaggctagaaatgtcaccacatgaggaatacaccaagagactgaggctggtctaacaaagaaggaatggagacaacttaattctggtgcgggaggtggagatgggcagggagaggtggtggttcatagcgagtcctgtgacaggcaggatgaccacagacatgaggtgtgtggagactgggccaatgatcagatttaatggttttaaagtaagtgaagcagcaaggcatcagaatgtacagcattcaactggcaattaggtgtgtatctctaaacctactacaagtactctaaatataaaacaagtctgaatctttagtaagaagtcccccctaaggcatataaaatcggaattgggttacccagccattttcaggagtgatgttcgaaagcagcacagagcacgccctatggtcacaccatgagagtcacacacagtggagttacagcaatagatattacggttatcatctgaaaaaggtggcctggatcacagctaaatctctttccatcattgtaagtctgttattccacatggagagtaaaaaggagtgaagaagtaacttctacaattcagagtagtctttgcagccagagccaactgatactgctatggtataaacgttacatgcccccaaaactctcgctgaaacctgaccttgaaagtgatgggtgttaggaggtggggccattggaatgggattagtgctctcacaaaagagaccccagagaaaccctcacattttctatcactcgaggacacagctcgaaggtgccgtctaagtggccctcaccgcacaccaaacctgcttttgtcttgtacttatcaccctccagaattgtgagaaataaacttctgttgtttgtaagccacccagtctcaggtattccattagagcagctcaaagggactaagacaaatagccaccataaacacctaaaggaagctgcagatctctagttccactaaggtggaggagccatctccccaggtccttcctctcccaactgaaaacccgagacagaacctcagacaaccctagagagaacacagcaagcaggcccaggaaaactgaagcgggaaataggacaggctgctggggacctcaggacttgagggatgacggacagggagtatgccgttttcctcactcccatgtatcctggacagcatgctgcagaagaaacctccaactgggcctttccaagaggcgtagataacagctccatgggaggcctgttctccatcgccaagggactgaaaagagggtgacctaacaacagaaaaccactccatgactcctgccctactctagccaaacagcaacgggaaaaccacaacgcccctggcagcagccccacagcaccgcgtggccagagtggggagttgatcttccagcccatccccagcccaggggaagcaggaggtgctctgattccaccaccagatggtgtcagcaggccgatctcccagaccctccctggcagaagcaggcagaggtgatccggctgccctgccaaagcagtgttagtagggcagttatctaacatcccctcccagggttacattagtggggctgagcagtgagcagtgagctaagcctccacctctactaaacagcaacgggtgggtacaaggtggggttagttagttgacatgacattacacacacccactgaaccagacagtgcaaaacagggttcatgggcccatcggctctcccagccccagccttgggtgtctgggcacccagtgggtactgagtcttcgccccatctggctaattaaagagaacaaaagagaactctcccatctagcatcaaagagggagaatcaggtagtagaaagtgggcctggttggcatgttgtacctgacccccccacccctggtggggtcagcttccctcagagggaagctgagttctgacctctactctgcagaaacaaggtatgaggcagccctctatggtctccctgcttcctggtgtcagcagtggctgagggagccaagcttacacatctcccccaacaactggacacaataaagcagtgtgcactggggcccctcttttgtttggaaagtaccagcaaagccaaggagaaatctgaacttccaacttacctagtagaaacaggcagaaatcttagaattgaaaaatataattaaacataattttaaaaacaatcagtgaatatgaggcaaaatcaatagaatttactcaatctgaagagagagaaaatctactggaaaaaaatgaacagtctcaggaacttacaggactaacaaaagcactaacattcttatcatcagagttccaaaagagaggaagggactggaaaagtatttaaagacataatggctgaaaacttcccaaacctggcataaaacgtgaaactccagattcaagatgctgagtgcaccccaaaaaggataaacccaaagaacccatgacaagacacatcacaattaaacttcttaatactaaaagacaatcttgaaagcagccacataggaatgacacataacttagttgagaacaccaattcagatgacaagggatttctcatctaaaaccatagaggccctaagaaagtggcatgttttccaagtactgaaagagatacatcaactgcgaattctatcttccgtgaagatatccttctggactgaaggggaaataaagacattcccagaaggagaactcagaggagttgttactaacagacctatcattaaagaactaaggaagttctctaaacagaaaggaaatgacaaaagaagaaagcttagaacttcagaaaggaaagaacattggaaggggaaaaatggaagcgactattggtagactaacagtactttcttaaatcatatttgatggttgaagcaaaaataacaataccaactcattcagtgctcaatgtacatggaggaaatacttcagacaattatattggaaaaatggggctaacggagcctaaagaaaagtaaggtttctactcttcagctcccatcataaaatgctgtgaccattgataccagtagacttagaatatatatttcacacacatactgtaatacctggaacaaccactaagaaaatgatacagagcaatatattttaaaacaccataaacatatcaaaacgaaatcctagaaaatgttcgtataacccacagtaaggttaaaaaacaaaaaaagaaacaaggaacagaggaaacaaaaaacaaataacaaaaaggcatttagacttacatatattatcttaaatgtaaatggtctagaccatttaagagacagattgggcagactagataaaacaggtttatctaaagacatgccatatataaaaaacttatctcaaatacaacatatgcagatggaaagtgaaaggatggaaaaagataatactatgttaacattaatacattaatgttaaaaaagcagaagtgctattaataccagataaagtacattttacagcaatgatagaagattggatccaacctgaagacattttaaatgtgtaaactccaaacagcagcacctcaaaagacatgaagcaaactctaatagagctgaaaggaaacagctggggatttcagcaccacattctcagcaactgacagaacaagacagtaaaatcagcaaggacagagaagaactgaacaacacaatcaaccagtaagatctgaaagatgtatatataacgaacactctacccaatagcagcagaatacagatgttttcaagtacccaagcagcatagatcagtcaccaaaagagaccatatcctgagctacagaacaaattctcgacacatttgtaaaccgaaatagaataaaatatgctctctgaccataacagaatcagaaagaaaacagtaacagaaaacacacttaggtatttttggaaataaaacacacttctaaataacctagggtcaaagaggaggtctcaaaggaaatttaaaaatatatagacagaactcaatgaaaatgaaaacacaacataccaaaacacgtgggatgcagctaagcagtggtggaaaggaaatttctagcgctgaataaatgcgtacattagaaaagcgaaagggggtaagactccaccatctctgctcctgagacatggctgcttggtttgtggatggcagttccaaggtgaatgcacagcacgctgtttggcaggctgccattctaattgaagaaaatccttttgcttttgagttatttatagcttatgattgagtaaagtatactttcatgagcaaaatttacctttctgagttctccaaaatttggaaactactcatgagtattcttattttatggcaatatagttatttgcataagttcagttaagaatctgttttcttttgttcagtcaccaaaatagaccatatcctgagctacaaaacaaaccttgacacatttaaaagaactgaaattgtatagagtatgttctatatgcaattggagacatgggttattttaccaaggctttgactgaatagcgtattttcagatatgaccagactgctttaaagaataaaaagccccttgaaaaaagacaggcctggtaccttgtctacacagttcccttacaaggttcctgatcttcgataagcaaagaatgtcattttccgacaggcccaggaacctcaagatactttgggacctcgaggagaatggaattcacccgatctgtaggtattacaggcaatgtttgctggcaaattttcagcttggctttcaagcctggaggcttctaaaagtctaatctgagattccttatgaaaaaattccagcaaagccaacttaaaaagagcctatatggccaatcactattcttgttgcactttatgcaaataatcaggctaagtataatgagactaaaatgtattttgcaaataaattggtccttggtaggaatggggaaactggagaaaaaaatgtgctccaaagaaaactacaatacctgttaacagattctagccctaaccattatttttgagtttttattatttgcctacaactcaaactgcatcctgaattacttcctagctacaagtctctaaagaagaaccgagttctaattttcttcatgttctttttcattataatctttgtgtgcatattaacagtatttatctcgttttacttcttcccagaaaaccagaatcatggtattctgaggactacaaatgattcaacaaagcctgagaatctccctcatttggaattccactgtgcccgatttattttccattgccaaggcactactggtaaagctatacaaaatgaagcacacccactgaaggttcagggaccatggcagaagagcaaggcacatgagactgtaagagccagattgggagctggagtgtggaggccaaacaactccatcttgtatgctaatctgctgtgttaacttctgattaaccctggttttgcgaatgcctccaagatttctattttatctactgttccttgggtatgagcatgtacttaccatcaatcctgtccttagtttgatattatctttccataaatcctgaacttaagccaactgtcctatacatcccttctgaagcatatatacactttccctatggctcataagccctgggtctggagtgtaaccatgcacggatctaccatctcatcttgaggctgcccgagatagggtttctgtttgtaaatacctattaaatgtttctttctgagaaaacaataagaagaaaagagaggaaaggtctcaaaacattattccaagtgtctgtctcaagaaactaggaaaagaacctagcacaaagcaagcaaaaggaaataataaacaataaatttaataataggaaagtagagaaaaatcagtggaacaaaaagctgattaaaaaaatcaaaactgataaacttttggaaagactgacagagataaaaaagacacaaattaccagtattagaaatgaagcaggggttatcacaacagatcctgcatccattaaaaatattggaatgctacaaatacttttcacattcataaattcaacaacttagaagaaagggaccaattcttcaaaagctacaaactatcaaaactcaactgggaagaaacagacaacctgaacaatcctacaaaaactaagaaaaaaaaaatctataatctaaatgcccgcccgccccccatcccccccacccccgcccccatcccccgccaaaaaaaaaatctcctggcctagatggtttcactacagaattctacattgagaaaagaatcaataccaattttacacaatatcgtcctgaaaataaaagagggaacccttcctaattaaggttctgatataaaaaccagtcttaaaagaagacgacagacccctctcaagaacttaggcgcaaatactctcaacaaaatatcgacaaattcaatccagcagtgcacaaaaagaattacagaccctacccacgcaggatttgtctcagacatccaagagagacttaacattgcaaatcaatggaacgtaccatatcaacaggttaatataaattaacatcatgggatcatatcaactggtacagaaacattttataaaatctaacatccatccatttacgacaaaaactctcagcattctgggaatacaggttaaaacttcctcattcttttaaagacgacccatataaaacctacacttagcatcatatttaatgattaaaaacagaaagctttccccctaagattggggactaggtatggatgtttgctctcaccactcctagtcaacataaacactagaaattctagctggtgcaactgggcaagaaaaagaaatgtacacagatcagaaagaagacataaaactgtccctatttgcagatcacataactatatagacctcccaggaaatctatgaaaaactcttagaattaaggagttcagcaaactgcacaacagaagaccaacacacaaaaatcaattgtatttctatatactacaagtgaacacatagatgctaaaagtagggccaggtgtggtggctcacgcctgtaatcccaacactttgggaggccaaggcgggcagatcacctgaggtcaggagttcgagaccagcctggccaacatggtgaaacccatctctaataaaaatacaaaaattagctgggtgtggtggtacgtgcctgtaatcccagctacttgggaggctgaggcaggagaaccgcttgaacttgggagttggaggttgcagtgagccaagatcgcaccagtgcactccagcctgggtgacagagtgagactgtcacaaaaaaaaaaaaaaagagaagtaaaagtacaataaatacttcttttaatcctccctgagttccagctgtgccagggccttgccagaacatgcaaacacagtgtccttcaacaggtgaatagctaagcaaactgtggtgcatcatctatggaatactattcagcaataaaaaaacaaggcactattgttacacaacatctccgattaatttcaagggaattatgctaagtgaaaaaagccaatctcaaaaggtcacatacagtatgattacacttatacagcatccttgaaatgacaaaagtacagatatgtagatcagatgagtggttatcatgggtaaggaagagacagaaaggtggctgtggctataaaaaggtaccatgagaaatccttgtggtggagttgttctgcatcttgactgtggtggcggccatacaaatctacacatttgataaacctgaatagaagtaaacactcacagacacatgaaatggactgcatgtgaaactgatgaaatctcaatacagtagatggattctgttaatgtcaactgctggttgtgacagtatactataattaggcaagatgttaccatcgtaggaaactgggtgaatggcatatacaatttctttgtattatttcctataaatgcatgtgaatctgtaattatctgaaaaaaaatttttttaagatgtaaatttaaaattgggtaactaacaattaataaatgtgtttggaactagtaaagaaaaatatctttctcttctagcactttctctccccacttaggacctaaaaagtttccttatttctcttggtgtcaaacaagtaactttggggtttcagagacagagctgggactccctcgaagacacctctattgggaggctccaggcagcctgaaggtgctgagaaagcatgtgctctaccatctactttttgaagtccgaatataccatggaatttaaagaggtaaaacaaaactgtatttgcctgaagaatgccgctgtttacaatgctcatttaatgtttaaaatgcttacaagattctgctaatcacttccattctcctaagtcaaccaaacaacccaaggagtaagcttcatggaagtgatgtgccctgagtgggaagagtcaagcctggcttgctagagcagcactgcacactccagctcctctgtgaggccagcctgtttagatgaaacagaacaccagccacaaatctaattgtgcatttttctagtagccatgtttaaaaaggtagaaagaaacagagaaagtcaatattaaaatacattttatttaatcaccaatgaccatatgacaaaatgctcaaggaagagggagagaggtggctgtggctataaaaaggtatcatgagaaatccttgtggttgagttgttctgtatcttgactatggtggtggccatacaaatctaagccagtaaatataaatccaaagcacagtgaaagatcacctatatcctctaggatgactactgttaaaaaaaaaaaaaaaaaagtgttggtaagtatgtggagaaactggaacccttgtgccctgttggtgggaatgtaaaatggcacagcctctatggagaacagcatgatggttccccaaaaaattaaaaatagaattaccatatgatccagcaattccacttccaagtatatatccaaaaaaattcaaagcagaatcccccaaaagatatttgcatacccatgttcatagcagcactactcacaatagccaaaaagtggaagcaacccaagtatctcctgatggatgaatggataaatgaagtatgtgatatacacacactggaacaaccttcagccttaaaaaggaaggaaattctgacatgttgcaagataaatgaaccctgacgacattacgctaagtgaaataagcctgtcatggaagagcaaatactatataaatttcacttatataaggtatctgaagttgtcaaattaatagacagaaaatagaatggtggttgtcagaagctggggggagggggaaatggggagttgtttaatgagtacagaatttctgttttgcaaggtgaagaagttctggagattggccgcacaacaaaataagtgcacttaacactactgaacagtacacttagaaataaatggttcagatggtaaattttacgctttgtgtttaactgcaatacaagtttatattttatttaacctatatatttaaaacaccatttcaacatgtaacccatatgaaaacaattaaactattttgcattcttttttgtctcctcaaaatccagtgtgtatcaataatgacagcacaactcagttcagactagtcctatgtcaagtgcttaatgcatgtgtggcttccctgctgagtagtgctgagctagacctcagctgtcaccactacgtggcaaaccttacagctagatccaggtaattaaaaacactttggcagagcagaggtcaggatctttttcttgctacctgccttcttcaactttatttgtctgaaaggctaacaggcagagctggactgactctcaacatctcctgggcttctcctctttgtcaggcactcgctagcatctgcaggccattattccccgcccagggagctcacaaactaaaggaggggtcagacaagtaccagctataagagaagtacccacaagacgctgaggaaaaaaaaaaaaaaaaaaagaaagccattaactcccatctgtgaattccaatgtgccagggaacaagtataaaatttaagacatttactaacatgacactagggagcattcctccatatcctgacttttctcaactcttatttccaattgtactgactacactttagtgtactgactacactttaatttccattaaaaacacatatggcataaaacactcatccaaaaaggcactcagtaaaccaacacatgtgagtgattttgataaaaataatcagttattcactaaggtatcatttgtcaagttaatcctcccagagtgtaaggagactaaaattgaggaaaagtgaaaaaactgtatctgttgccccacagagaaatatattccttgaacttgtcttcagaaaaatcagagacataaaaggaaaatatgaaaacagtgttaatacaaacactcaactactatacattcctcctaagacttgactttctcattagaacaaagttttgcaaaacaaaacttcaagacacactgatctctaccccaagttgctgagcaaaaaactgctttgcagctaaaggagcccctggctaaggcgaacctctttataacctcacatttgtgttccactagttcaaaccaatcataatgacttctttgtggaaaatgtattttgcaataaattatcaaaagcttcattgaagaacttcatggatagggttgagtaaagaatactaaacaaagtcaagagaaccacttatcaactcagcattatttcagtggtcttcaggcatgaactaagactgtagaatgtccagagaaaattatggactacataaattgtaaattttatgcttcaatttaagaaactcacatctggctaagtcctttcctcccccaaccccaactcatcctctcccaaaacaaatctcccaaaaacttaacactgaaaacttacctcggtacattaactttaaacaaactcctcgtaacttctcatttaatcctatgcattaaactcttcatcacaccatctactgaaatgcagctaatactataaaattacacctcaggatccactactttacttcacaggtataaccattagctgtgcataattatttagattatgatctttgaagccctgtatatttcatctcaagtaacagtgcttaacttataattagcttgtaaaatagtatttatcaacaaaaaaagcatttgtgcctgtctttacattaaaaaatacactatctcacccactattcccagttccagggaaggagaaactatttccatgcattaacccatcacctacagagaccaatgtatgcattttgcttgaaagggaactggttagagaaaatagcttaataaccacaagtgtgaagcttttgttgtgaaagtgtgaaaagctaataccttccagagggtctttaatgcacgtgtgtttcacgatacacaccataaagccctgttaactcatttagtaagcaaggatgttatagtaagcgagaatgatcatatatatgggggagcattttcatgagtacaacaaaaactacaagccaagaacttctaaggctgaaatgagttcacgagcagtagtaacagcaataataaaacttccagcccctttccctaaggagggaccctaaaaaattacctcctggcatttggcaagagacgtgcagccagcatgtgtagctgctgggatgtctgtcatttctccccaccacctcacaggtgtgcccaacctctgacaagtgaccaccactctgaggttctttccaattctataacatgggcaaaggcctgcctgatttacctcactgaagcctatgaagacagagctggatggtatttagaaatgtcattttgttccagtgtctgttctgatgggtttgttgagttagccttcatcatgaggtacaatctaaattataatagactctgtactgggtttcctaattgataactctaccaacttacttctatcttgttcatgtatggcaagctaatctggacaaatggtcaatgtgattgactactgatcaagacatgaaccttttccattggtggggaacagcaagtcgatcaacacagactcagcccctcaccaaggttacccaaagtatgtacccaaagtcacatgctgtaggttcaagggccaaatcaagtctgcagatgtttcttttcagcttgtacaatgttttcaaaatctgaatcagctgtcaatgttgaaacagggtatctggcatcaattttgcattcctaggttatcttgcaatataggaaaacccaccctgagaccacatgccctcacagccacaattaggtgtggcccaaacatagaaggggcaaatactctccaatttaccagtctccaccaggtcagttccttccatgattttgctgtgggcctctgtggtatttatgttagccactcttggttcaaaccctactactgcctttaatccctgaaataaaaacctacaacctaatctgattagtactatgtccaaaccctctgagcaataagcacaaagaggaatttaggcagaaaacaaaccattttcatggttctatgttggtactgctttcatgaactagttcatttttttaaaagtgttattttcaaaaatgattgtcatctttctttacacttttgattattaagctattttctgtaaatgatcagttccctttcaagcaaaatgtcattactatgtaaagcctggtggttaaaacacactttagcttaatgaagacagacctgaaagctaatgtttggacctcaactcatcactgccacaaaagttagtaactttgtaaaaatgttgatgtgggccatgcgcggtggctcacgcctgtaatcccagcactttgggaggctgagacaggcagattacaaggtcaggagattgagaccatcctggctaacacggtgaaaccccatctctaccaaaaatagaaaaaattagctgggcgtggtggcacgcgcctgtagtcccagctactctggaggctgaggtaggagaattgcttgaacccgggaggtggagcttgcggtgagctgagattgcaccactgcactccagcctgggcgacagagcaagactcatctcaaaaaaaaaaaaaaaagttggtttgatagtttgacacatcctccattcccatctaaagatggaataaatcagttacggggttttaaaaggggattttaaatgccacacacagccttcaagcagattcaaccatccacacgtcaactgcctcttacccaggcattgcttacccattgcactgagatagtggttgaaggcctggcaaggaggacttggggtttgtgttgatttgtcacaactcatgggtgctgggctcctgtctgtgtcaaaagagaaatacccactggaggatcgagacagcagggaggatcttctcataaagatgaaaagcggggatctggtagcaaaagggccagggctggcaggtggggccagcgggccctgagggctgccgtgggggcagctgtccccttcacctccgtgattgccttcaggattaccttgtggctctgtctgtagggaggtaggggccccaggtctgagctggggaggcctctccgcaggctgcaattgtctaccttctcggtcacactcagaacttacatcagaaggttgctttgccatttggtctttttttctgcaagtaaaataaaaactaagattattttaagcaaaaaaaaaaatcgatgaataaacaaattagctctcacctagcgattaaaaattcttagggttaatcccaaatactttgttctatacttttctgacaatctcccaaataaaaaaattgcacctaaaataataaaggtgtaatttttttttggtagagggtacccccaaacaaaatacagtaacaatgtcaacagcttgcggaactggtgcacacacacatgcgtttccagagaagcagctaatctgaagtctattcgtgtgtgctctttgcccaggacagacttcttcgagtaagtcagaaactcccagcggctctgacttcccggggttaggtaggacgccggagcacaggagcgggcgcagatgcagcgattgcaggcggctggccgcgttccctgctccggccccattgtttgccgaaaatgctgagggcagcaagtctggggaaggtctggcagcggccgtcagtcgtagtaagtgcgtcacaatagagtttgtaactccagcgcggctcggcccggctctggcgctctctccgcccgtgctccctccctcccgctcccgtaccgcacgccgcaccgaatcagacagaacttctctgaggtgcacaccgtgaggtgcacatctctaaatggggagggggcggcggagggcgacgaagcgaacgcctgcaaggtctacaactaggtccgcaggctaggcgacaccggtgcgcgccgcgccgccttcatcccacagaccctcccctcagaaggcaatcacaccgaaactcacgtccgcgccttcccttcagagcgcagcgtccgggccagggaccaagccccgcggcgtccggcccgcgcccttcgccgaccgggcgccccctgaccgtcaccacgaaagcagcgcaggagacaaagcccgggactcgggttcagagtccccggcgcagcgcaaagcccgcgccttcccgccagcccgccgccgcgctccgccgggcagccgagggctccgcacgccgcgcctctggcccgcgctgccccggccgcagccgccgggaacatcctccgcctcctcccgctcctcccctcgcgctctgcgcccgccgccgccggcaccgccgacctccccgcgccgctggcgccgggtgcccgcgttcccaattggtccgcgcgcggtcgctccgcgccgcagccaatcggcagccgcggtgggggcggcgcctacgggtcaggccgccaaaggcgaggcgattgttgacaaactcgcctccgagcgctgctctggccgtggtcgtggcggctgccgcttcgtcggaggatttgagggccggctggcccggccaccctgcccatccctgtgctccttccggacacaagccttagcagctcccgccgtcctggacagccagtcacctggagacaaagcaggacttgcgccgcgcccggacccgcagggccatccccaggcccagtcctcgccacttgtccttgttttggcccgtcgggggcagaccctaacggccgtcaccgccctggctgtggcaactattctcctccaacaacttcctctctctcctggtgcgccgcagacacgagtcaaagccgaagagccacccctggccgcggacgcgcacgtccgcgaccatcgagtaaattcacaccctccgccctggcgtccgtcgggccctccaccagcagcgccaaccctggggcaacaggtcccagagggcacggcgccgccagcctgcaccgcgaaccgggtcgggtgtgctcgggcatgcgtgagccgctaagatagcccggcccagggaccgagcaggttctgccggccgcgactagtcccctgcgcggtccaggtggtcaggggaggacctagatttctcgctgccagggaatcgtgcggatggcacaggccgcaggactcctgcagagcaagcaggggccccaggtacgcttgagaaagcgaacgcagcagtggccccgaaaccttggcctgaatgagtaaaaggaaaagccgtgtctcgtcagttaaatcaccaccgcagttccgcaaatcctccgcaacaggcccacgcgccccaaaaaaccaagacacgaaacaccctcacactgcgcggccgctactctgagggcgccggagccggcggcgagactttccagctgggcgcacagcccgatactacgagcaggtcctcagctcccgggccggcgccgaaaggcacgcgctgcctctcctcctgcccggacctacgacccttcaccaggcccgcgcgcagcatcccgtcccaagccgcacttcggccaagagcctgcaggttccgcgtgaacgacttttctttaaagagaacctgcccgagagggaacccgatccacacggatccccacctcccgccggcgacaagcggcgccgatgcaagcgtctccgctcgcacgtgcacgggaagcgggcagtaggtggtgccgttcgggctccagcgctagtcttccttcggtgccaggcccgcgccccgggatttggaggtatttaccttgcgtttctcagtccgagagtcagagtcagacatttgggggaacaagggccaagaaagggcgccgaggcggtggcggcgggaacgcagcgaaccgaataccgcgatgatgcgatcgcagtgtggcagggttcgcagggtggctgcaagaatcaagtggtggtagtggcggcggcggcggcggcggcggcggcggcggcggcggcggcagcggcagcggcgctggacgcagagctccaacaaactgcagaccaggcggctgcgcggagcgaagtgaaacctgcgcggccctgcagcccagctctggctggcggccccgctcctacgcccaatcactgcggaccccgcccccgctaggtcccgccccggcgcgcgggctggcaagctccgcccccctcggcgccgcggccgccggcgcgtgcaggctcggacaggtaaaggcgggggttgccccgctgggttgcctcccgcgcgcgccgccgtccctggcgtgtttaccggagtaactctgcctgctggcggccatgtgcgcgcccatcccccaccccgaagtgtaccctagcctcccgctcacctaccccaacccggcggcggccgcggcgtgcgcggcacagagggggcgctccggtcacagcctccgctggcccggccggcggtgtgaagcctcgggaggcgccctgcgctctcactgtgccctgagtttctaagccgctctggggcaggcgcggggactgggttggtcctcgcgaaggcgcggggcgaggtctttgagctctcctccctctgagggtccctggcgccgggcgggacgcggatcagcaggctgcgcatcttcctcgcccgggcctctcgcgggactcaggcaccctcctcctgccaccccgcaggggctctccagcttttcttccgcgcccagtcgccctaagagacagaggccgtgggggcaggacgcgcccagaaaacggccaggcgcggtcccagtgggcgtcttcgccgcctcccgggtgagggcgggaggcatgtgcaaagcaggtaaaatagggaaatgaaaaaagcactcagaaaaaaaaatccttttaggaaaaaaaaaaacgaggtgaatggcggcctccaagtgagagagaacgttgcgcactgcatttggctaggacccccaagatttgctgggctcgcagataacctcgtaggagctccctcgactggctgaggccagtgaaggcagaacagctgagttcgggccgcggtgcgggagcgcaaaataccccgtccctcctcccctcccgcctccccacccatccctttcctccctggagtccgcagcacctcactctacctcccaggagaccaaactccatgccgcctctccagtcctctgagtctgcacccgggtctgctctcccaacgcgtggctggcgccccaaccccggccctcctgtctgctcctcccgcgcctcagttccccagccccagcttctagacaactgcagcgggggtgtgggaggtggatcgggaaatggaacatcccgcaggtgaggtcaggctagatggattaaggaaactctgtaaagggaccaccctacacaccaccgcagccggcagggagaaggaaggggccttgccgtagaggagcaagtgaggaggcgttgtcccgccgtccggccgcctggagcagtttttaaattcataagcgcttctgtaacgtcagtgggacacagcgcagccccatgccaaagtctcagcgcattttcgggtgaattttgagcgaggtgaaggaggccttgggttcccggagtcgctggaggacgcgcgtcgggccccgcccagttatttcgctgcaagagggaaaaggcacgagcgtggacacggctaagtagactcggaggccggagatcggtcctaaccgggcctcgaagttcctaccgcggacgaactttgctcttcgcggccgtcccgcgtcgcacccggggaaaagcaacacaacttgctgcgcgggctgagagcccgaagcccgccgcacgccgcaatgctccgcgctccccgcggggtcgggcgactcagacagggaccggaaaagaaccacgcagaagaaagccctatttcttgtcgtctgttcctgtgcagccttgcagcctcgccgcccccgcgtcgctcgctctcgcgaccctgtgaacactttgaaaaacaagagtcgggggaagcaacgggctaagcgctgctatttggggcactaaaaggaagccggccagaggtggcgggttcatgcgtcccccgagacccaggccgcgtcgggggccaagagcccttacagccttctcccgcgccgtcgggaggtcctcccggaactgggccggagcgcagagaacgcagtgtgagaagggcccatgggttttaggtcacctccttcgcgctggacgcgggcagagcggtgtccctttctgtctctgccaagagacgtggagggagggagaagggaggatggcttgtgctgaaagaaacaagaatgaagtcgggcagccgggatctgagaaatgggaaatccatggcccttgttcgggaccacaggctttgccgacgtggtctctcctagttccgaaattgcccaggcccgcctccccaccctctgcaagcagcgggaacgacttccacatcgcttaatttctttattaaacttttcacctattctcttctaaaggacagactacagcgtcagatggtaaaaatgttttccgcgccttgtcttgccgtacggaaaccgccggcctgggaggacaagccgagttcttgttttgccgagagcaaaactctaggctcccacttccttctcccagtccgtgcgtttccttgcagagccccagagcgtctgattcactgaaatagcatcacttgctgaaccaaaccttttttcccgctcgcggaaagagtggagcttttttcttttgtctaagggtgtttgcttttttttttttctttcactcggcaccacagtttttctaaatcactgggaatgtgagtcaccgctaacagcaggagacctttggcggcacccggctgtggggcgcgctcgcagcggggagcccaccctgattgtctaggggatccggcactgaagttgggagaggttgcagtcaggccaggctgggtttcagggaaagggcacagggatccagcgcaccaggcgaccgtctggatctctttcctagcagccagccgcgcacctcgccagcctcggcgggacctccgctttgccaccaaaatccccgagagtggcggcccagcgggtgccagcccccggcctcggccacagctctgggcgtcggtggagcgagcgtcgtggcagctgctggcgggccaccacacttcccgccacacccgttagagcttggctcccagcttgggccgccgggagcgcgcctcttcccgtggccgcggctgcagcggtgcagggtagaaagcccacgcggcccgcgggttggagattccggcgattggtgcgtggaggtaggtgtgtggaatgttaaaggtcgagatcaccctccgggcatcatccttcaccgagtcgcacaaatccagcaactgcaaaacacaacacaatgggacaggtcagatgttggcacacttacagccatctagtgacagcagctttcagcccaccaagcacccgcacacacagcggccccggaaactagtttccctttggattctcctgtggaaactgttggccatgaataaccctcggaagccttttttgttttagacattcccaactctgacacctagcccagtggaaaccccggcttttcccgtaagggggtgggcgtggacgtggggtcggtcggctttgcccccaaattagccgggaactcgagaccaaggtctgagaatttattaaagctccctccttggtccttcctccctggtccttccctccgctcctctctctttgcctcccctgtcgtcccctcctctccacctctggagtgcctggggtgccaccctctggcgcgcagagggaactgaacaggaagagcctccgaacaggtgaaccactagagacctgctccagtctccccagactagcgccttcggtcctgacctggctggcagtaggccatgattcttgaaattcagtacagtgagacggcggaccaatgctaggcatcttccgcctggccgctgcggaaaatccatctgctgttaacgccaatgccaaggaacgccgcggatgcccttggttctggcagccactggaaggcagggataagacattcccggcggataggagagggagatgcaagtcagtgttttggaagctgcactggtgtatttttatttcattttccatggcttaggtgccaatgtatttttttttttattttcaggaaaaaaagctaccaaactaataagattgtttttctaaaactacacaagggcagagggacggctttcttttcttctgatctacacattgtactccatttttcaagttttcggccagtggtaaatttgtttcactccccaaatcacagtaaatccccaggttttcatggtttatttttacaggtttaacaacatcacttacaccagccccacctttgccctcacatggtggtcatgtctgagccgcactgatgttgttaagatcacagtttcccttgcagcagtccaaaacgccatttcaggttttcagagcatttcaggttttcagtgaggtcccaaggaggaaggtggaggaaataggggatggggaatatagagggtagggatatggtgggggaagagcatgaattgtaatagtccaacaatacatcttccctgaaaatgtgctctattacaccagtaatttctaatgaaaaacttcattcttcacacactgtggttaagcatcatcaaatcagtactgaaaagacctttgatcgtatttgcaagatgcactaaaatgaactttcactgaccaagatttcaaagtttgtaattaatactcttgaaaaatccctgactaatctgtcaactctcaacgtctttaaccacacagttcaaaaccatgaggtggcgtacacagcccctaaactttccacatattgtcatatgattattcaagataattttccctttgggtttgcattatgaaactcaaccaactttggtaatatattcaccggtgggggaaatacaatgatttgaatgagtgtaaaatagagtatgggttttatctatctggtgccaaaaacagaacgtagggccagaggtaggaattaaatgaggcagatttcaatataaagaaaattttaaaaaaataaacttgaaaaggaacccaatggctggtgaaaaggagggtttcttcactcataagtgttcagggagtgtgccctccaatggcaccctagagaagaaaaatgaactggctgtgaagaggagttgactgccaagattctttctaaatctaaagttctggagcagtttaaaatactccttctagccttctccatttttcctagactgcaacagaaacctcagaatgattattgtctcaatggacggatccggcatcattcctgttagttattgtttgactcttagttattgtttgactctgattccaggtacccacccacctctgttcctggctgtcaagatgataataataattaccatcctttcactcacaaatggtatgctggattcctacccagtgttaggtacaattctggactttagaggtttaatggtacacactacaggaacaggtctcacatcgtgaagctgttgaggcgttttaaaaatttttaaaaatatatgatctctttaatacaaaataaacttgagaagataatatagcattgattattacacagttacagtatttttattaccagggggtatttttatatggggctaagcagtgtattattaaagtttagttttgttaccaaacatgcttccatactataagcataaaaattgcacatagtgtaggggtcctctgccctgccagtttatgacccatttatgctggacaaagtacttcaagcttacccatatctttacaaagaaaattcaccagcttttgaaaaagacaaatgaataggtatactttaaaaataaaaaagtatgaacaagttataggttcttgcaaaaacattttttaaggtcaaacctaaacatgggcactattgctctacaagcaataagaatgtacagtccactggaaatagccagtgagtggaatttgagaatatctgctttaaagaaagcagaagcactcagccctcaagggatgacactgtgtttgactatattaatatgtatatttgggagtgagggaaaaattgtaacatcagtttggcttcccacctccatctagttgcagtactcaatttatttttctgctctttttgactctccctacagtttccttatttcagttgggagagtaggatggccaaggatgggcagtgactaagctttgcagtcctctgaacaaaccatattttcccagcatggcatggtgttagtcctataatagatgttcagggtgggaagtgcccagtacacttggagggacaccccagctattcctaggactccatgcagaaggttttcctgcctcttcccatatgtctcacccctgttctcagcataagatgaccacatgctgttttttgtgaaaaatcccttacccaaacttgaaatgtcccttcattagcccctttcgtctggctaccttggtagagtctttttctccatccctttaatctgggctgagttatgacttgctttgccagtagaatatggggaacatgtcactgtgtgatttccagagtttaggccttaagaagctttgaatcccccattatcactctcctataaccgtgagaatacctgctgtgcagaagcccagtctagcctgctggaggacaaaaggccacgtagagatggaccaaggtgccttggccaacagccagcacccactgccagatatgagagagaggccatcttggacatcctagtcctgttgaactcagatgactgcagccacaggagtgatcccaggtaagactagccaaagaactgtccaggctgcctgcccacagaataagtatcagtcattatcaccggttaatgcacagaaatagaaatttttaacctgactaagcaaaacaacaaataaacttacttgctataaggaatcaattccacctcctttccaaaaagaatctctatgcagccaactcttactttctaagggattgttagatattggtgagccattaatgtaatttcctgtccattatttttcagttgacttcattttaggttaactagattttgagctagaaactttacaggaaggggaaccttaattaatgaacaaacatcttttaatctaaaagatgtgatgagggaataagattaaagtggttggtaaaatgaggttctgtgctacttgtggctgtcatttatcacctttgcttctgctgtgacacataactggcattctggcaggtgcctctggccacctttattccatgcttgtctcgtgcaaccctagtccccaatcaacaattcatagcttgttactccagcctttgccaaggatccatctctgctgtgcagtatctatgctttccacattccatcccggagggccaggcaggtaaaggcatgaagtacagaagggagctacttagctgtctttgacttagtctgctctatctccagcatctttataacaatgctatgtggcaacatatggcactttacatatgtaaccaaggtcttcggtgttctgccccatgctgacatttcctggacaactactgtgtgccagattacagaggagggctttaggttcactgtcttattcagtactcataacaactctatcaggtatcaacccattttacagatgagaaaaccaaggcttaaagaatttaagtcacataacttgtaactgatgcaactagagttttaatccagggctttttttttctaaagccttgtctacccttttgccttcatcttttcccccagtgcctcactgcttccagttgctggaggatatgtggtgctgcactgacaaatgcctccaccactgtggcagacgtgtgacccttgacgttcttcctaagtcagaatctgtattctgtgtgtgcctagtgtggagaacatggatctgcccagccacactggctcagattctctgagaggaccagggcagtaatggtgcccaggagtactctatgatgttgccaccggaggaaggtgccaaggatatcggcttcagagccagctaccatgtgaaaagtccagcttgatgacctagaaggacctttacctgcagaaggacaaggcttcaactctgttctgcagattctccttcagtaaattgggagtgcccttccacactggtcaacaggcccctccctgctgctttggatcaccaccttaagtcaaacacaattcaagtgccttcaaaagagcagcacatggactggcaaatcgtgactggtgaaaatgggcacaatcaagtagttaacctgcacctattctcactttttgcagacttccaaactcgctgaatgcacagaggccttggcctggcttatctcctcctcgctcacttatcctgaagaattgctttccctttagacaaacattctgtaaaggatcagatggtaggtctgtggcagctaatttcccatcttagtccttatgcctgactaagcagtcaatgaaagaaaaataaacctgaaacactcacacgaggcataatctcatagcgtgtgctgtgattctacttctctcaatttacccaacaactactagaaaggggagctccattcctgttttcattgcccactggctggctcctccagggagggtcagaccttagcttggtgcgtctcctggtcccaggaacacatacattctcattggttttctctgcaaccaagtttcattagcataaaatgacattccacaggtctattaaataatcaggactccagctaatattttctctgaatcaatttaaattatattttatgttgatttgttccttcagttgataaacaatatttagcataatctgaaatgttagaatagagaaattgccttccttaccaaacaacaacaaaatcacttttgtttaccctcactaaataattaaacttgaagaaaatttacctttaaaatgtcctttctactgcaattttcttcaactaaagagtacacaatttggctgtttactaagtattttgacaatgtccactttggtagagaaaaagggctttgaactctgacattgccacttccaagccatactaccttccttatctctaagatggaaggatttagtaaacttggcgcaggttgattatttataaatattattgttattatcatgggttctctagttagtaataaatacaatttctttctaactctggtatttccatgacaaagtttgcttaatcatcattacctaaaacaagaatgctgagacagaggcatcaacattaaccacttaataagaacttctgacatttattcatactgctactgattcataagaggaaaagtttaaaaagaagacaagtgcatatacctttccctttagaatacaggaaaccatataaatgttttggcaatgggattaaagtaaccacaatgctgctcatagtagcattttctacagacaaaggcatttacatgaaacaagaaagaatattcaattaggtagttgtaataaagctggagtattagctgcacacttctcatataaaaaatatggcatcacagtggctcatgcctgtaatttcagcattttgggaggccgaggtgggtggattgcttgagctcaggagttccagacaagtctgggcaacatggtgaaaccccatctctacaaaaaatacaaaaattagccgagagtggtggctcatgcctatagtcctagctatgcgggaggctgacgtgggtggattgcttgagcccaggaggtggaggttgcagaaagccaagatcatgccactgcactccaacctgggtgacagagtgagatcctgtttaaaaaaaataaataaataaaataaattaaaaaaacttaatcaactgatagtttagttttgtaagtacaaacccaaagaaatgcaaacatactcaagaaggaataatcttcagtcaaaaattttcaagaggcaaaatccccacaaactgccaaaactaaaaatacaataagagtccaaagttattatggagaaattctgtgtaagtgggtcctggaatattcaacttcattgtcccaaatgatctgaaaatcaactgggagggctcctagttaaaatgtagatagattcaagagaattttgctccatggttacaaactgaagaatctgaacaaagtaaaaatcagatgttttatggggctactgaaaagcactatacataagaaagtaacgttaatgaagtgatttcagagagatgagctctttcttggtaagccaacatccacagaagcttccacacatggggtaggtgcctgttttggggacaggtggacagaagactgggcctaacagagatggagagactttgaagggatgagaaaaatggccagatggactggaattgggaagaactcctagcacagaaacaaacacttggcctagcgattcttaccctcaacccagaattttgctatgaaagcagcagttcatggaaactgaaaagcagaggaaatttgcatggtcccatgtatccttgtggtgcatagactttggagctgcgctggagttcaacccaaaggtgaatcaaagatatctgaaactgtagttcaccattttcacagctcaaactctgaaagaataaagacggtagtgtgatggggtgggtggactaagcacagtgaactcagtctaagtaaagcagctcctgctcaacctgactctaggaggaatcttaatgactagaccctgaccctaaccaccagacaaaagaaaggaaaataaacaaaagaaagtaaaatctgttatagacaatgtttgaagtacaataataagttattagacctgcaaagaagcaggaaaatgtgaccccaaatctaaagaaagcacaatcagtagccgacttagagatgaccagttaccggaattaatggacaaagatttaaaaacaactattataaatgtgttcaagaatttacaaggagaaggccaggcacggtggctcatgcttgtaattccacactttgggaagctgaggcgggtggattgcttgaagccgggagttcgagaccagcctggccaacatagtgaaaccctgtctctactaaaaatacaaaaattagccaggcatggtggtgcatgtctgtaatcccagctacttgggaggctgagacacaagaattgcttgaacctgggaggcagaagttgcagtgagccaagatcatgccactgcactccagcctgggtgaaagagcgagactctgtctcaaaaaaaaaaaaaaaaaaaaaaaaatagaaggagaaaaatggatataatagattaatatgggatattttctgagataaatgtaactcctaagaaagaatgaaaggaaaattctagatctgaaaaaatgggatatttgagataaaaattcactaatgagtttaacagcagagtgagtattgcggaacaaaaatcaataatcttgaaaacagattcatagaaattattccaaatggggcaaagagaaaaaaaaatgaacaggccatcagtaccatgtgggaatatattggcaatccaacatacatgccattggaatctcagaagtcagaaagaatgagacataaaatacttgaagatgtaatggttgaaatgtttctaaatttgatataataaaacatcttccacaaaaatattcctgacaatcttattcataacatcagtccataaacaccttaaatgtccattaataggagaataaacatttttttcaatacaaactgtgttaatgaaagaaaaaagaagtgagtcttaagtcttcagttattttttcttcccacagatgagtataagtaacactgcaccttaatacctatggaatgatgcagctgaggtcagctggaggtaacaaggccagttcctggagactctgattaggtgagttctagagagatgagcatttgggaggacagatgggctgagccgatacaatgaaatactactcagcaaaaataaacaaattaatttaaaaaaggaatgaatcatcaaatatctcagaaacattatac

SEQ ID NO: 3 - DNA, 60510 bp, Mus musculus
ggagtcagtccctagagatctgtttctctcttcatcctttcaagtcttctcaggtttgttttactaaagtatctagggtgtcctctgtggttaagggaatagggaatctgtcttctcagaatgagcattgatagtgacttctgcacagaggataggatgggatttacgcaagtgttctggaactgagcctcaagcatgctagagcagcatgctcccatgaagccatggctgtggcccagagtcctttctagagaactttctgaatccctcaggccctagatcagttgactcttggagtcccactttacctgagccatttcttgtcccttggcctcatgctaaagagtcttccttgttgcctgtagcttttgctacctaatctaagctccgggaacagactgccaccagcccctgcccaaagaatattgaatccgaggatgaaaaacagacacacacagttgttcaatttcaacttgccttattggctcaattgcagggcattattaatctctgaggctagcatgccctccccaatactcttagctcagtaccctaaatctgtcttcaactttagttgttcagttacctttaggcccagctcaacaccccatctctcccatctggagaagcagcctatggctgatactcccaagatttcacatggattcacacgttcctctgaaacatggccaaaactctttccttcccttatgtctgctagcctgtctgcagggacctggaagtcccgcctattccttctgtccagcaattggcccatggcatctttactgatggatcaagaaccaattgggaaacagaaccttagcatcagacccacccctacccttgctacactctttgaccttgggacctttttgcctttcatctaatctagagcatccctcccagtcatagctggccctacagaccgatttccaaacagaggagatccctctgcattgcattttccattttaaaaaaaatgttttattggaccagtgagtaggctcagttggtcaaggtacttgccaccaagcctgatgacctgagtttagttcctggggtccacatggtagaagggggaaaacaggctaccaaactaccaaaagttgttctctgacttccacacgtatggtgtggaatgttttaacactctcatacatactacataaatgttaaactatattattatgtcctccctactttctaggagtcaaaatgcaccctttatatatagtgatggtagatgctattttctgttatctttaacaaaaactaaagtttaaagtttgtagtcacatactgcttcccctaaaattgactttgtctttctttttcttctaccttaaacatattaattaaaaattaacatggaaattggggctcattttgcaaacactgaaatatgtaaatttcagtatactttggtgagttttgacagagggcagactatataacacagaatttaatcacgttggagaaagtgtccattgttggagaagtttctgggagccactttcagtccctgccttccctgacccctgcagttccgactgtgtgtgtaactcagttctgcttgtagaacttgagggagcagacagactggctccttctgtgcagtgtatgtctgtgatgtgttatcctctgtatcctccccctacacacacacacacacacacacacacacacacacacacacacacacacacacgtatttctttatgtagacttctctggcctctccctgtctctactccctccccagggctctttgctctaaaactctgctgtgtcatggcctccagcaactggccttcacctccaggtgacctcaggcacagccactgatacagagtcccattgtctcagagaggcagccgccatggatgctaataggcatgctatctcaccacgttaatattcatctctctgacatctgatcatgttgataaccctttcaagtacttactactcattgacatgtcttaatatttttgtgaaatatatgattttttcctctgtcctattaaaatctgcataatgctatgtggtaggaatttgctagacactatcaatacaagaagttttaattttcccatcctgtggccaaatcattttcttaatatcttttgaaaagcatcaggctttaaagtttggtgggctataagtcatcggtttttaattttttactcgcgcccttgtggcttttctaaaacctttttgcctaactgaaggctgtaaagataggcccttaagctttcctagaaagcaaatggcatttgcttttacaacgatgtctgcttcctatctctaatttctgagcataggatgaggttgaggtagaagtgggataactgtcataaaattagccaagtatctaatcatgacatgttaataaacttgccttttcccattcaagtattttgccttctctggggagaatcgactgaacataagattaggaggctgcaggggatttaactcatatttaactccattcattgacttgtctattatttttattaattttatcttgactgttataatcaatcttatattggataatacaaatctcctatgtattgtatctatccttttggctatcctatttttttaaatttctctatacattttagacttgcctgtatatttccagcctgcatttatattgactctcctctccatttggaaagagttgatgctattgcagtctgttgaacgtgaacatggcacgtcactccatccggtcatttctctccagcagatctttttaattagcaatagaattcttgagcatacctgacgacattaagccttaatttgcatgttcttaaagctattaaatggcacattttaattgtacaaattccagttatatgttccagatgtattgtagacacacttattcttgtacattggcttgtacacctaagtctactaagtccatctcctactggactttagcatatggatttatcattattaccaagaaggtatgtgtcctggacttttgagtttcatggacacaaatgcttttaatagcatcttgtaagggctcctagttctagttaggatgggaaaggcacatagagagctttgctccccgtgtgaagaagataaggaatctggaccaagcaaaactgtacgaggaagaggagctgtgctcaaaatgatgaagtcgagaaatgaggtccttggggataaaccaaagcccctggtgcttcaaacatggggtgagcggctgtctagaatgcagacggacagaaatgtgggcttactgatgtgagagactctaaaggaagagccgaaacatgagaaccaggaaacctggagcgcaataacagcgctgctcccgcacgtccacggtgtggaatattagactggtggggtggggagcgcagaggtgacctgaaggggcagcaaatctcactgcatcccagctaaaggatttaagcacacacagtttcctgtctgtaagaagggatctcaggcttagaagcactccctggagacaccgaagggatggctgtgtttagtgctgtatttcatgcatttgtgaggtttctgcccttgaagaaatttttgtaattgaaaatcgctccctctcagttatgtgcttatcagactaaaccatcagttgattcagataccatattcttcggtattaaaggtgtgaaagtgccgtgctgcagttctgtgacaaccacctaattgagtattctttctcgttatgtgtaaatgcctttgtctgttagaaatgctaccaaacgcagccctgtggttactttaattccattgctgatcctttcatatggtttcctgtattctaaagggaaagccatacgcacttgacttctgtagaaacttttcctcttatgaatcagcagcagtttgaatcaatgtcagacgcttttattaagtggttaaattgatgcctctgtgtcagcactcttgttttaggtaatagtgatttagcattctcactaaaggaaatgccagcgcataaagaaattatatttattgctaactagagaatctgtgataataatcatggaagggccaggcaaacatgagatcctgggttcaagcctgtagattacaaatcaccaccaccaccaccatcatcaccaccaccagcagcagtaacaccaccatttttttcatttgtgtgtgtgtatatatatatatatgtgtgtgtgtatatacatatatatatatgagtgtgtttatatttttaggagcacatatgtgtgtgctcactcatgtgcatggacatgcatgtagaggccagagattgatatcaaggattatctttttttttaatttgtttgctttttcattttgttttgttttagagatagggtttctctgcatagccctggctgtcctggaacttgctctgtagaccaaactggcctcgaactcacagagctcccctgtccctgctgccaaatgctgggatcaaaggcgtgcaccaccatgacctagcctaatattttttaatccaataaagttggcattcagaattagtcaaaatacaaatcttccagggagacaaatgggtagggactgagtcagaacaaggcctctgggtgtttagtaagaagactagttgtatgtcacatcagggacaaagatattaaccaggaataatacagaagccagacatggtgctgcacacatttcatcctagcacttaagaggcagagatgggcagatatttgttagtttgagaatagcctggtctatctagtaagtcccaggctagccagggttacatagtgtaacccggtatcaaaaagaaaacaaaaataatatagaaacttcattccactaatagcttgaattgtgtccctatcacatctctggattaaaccacattttctcatttacttgaaaataccctttcctttgtatgtctgtgcctggatgtaagtgtggaccgtgtgggagccagtgtccatataaatgttttcctcagtagctctccatccctctcccttcttccttctctctccctcctccctgcacacacacacacacacacacacacgcacacgcacacgcacacgcacacacacacacacacaccccacacacactctctggccagcaagtcccaggaacctcctcctccactccccagagctggctggcatgtcagctgcagacttacctgtttagctgatgccgcccatttgctagcatcggtacaggtcctctcgtgtgtggcacgcacttcagcaactgaaccatctctccagcctggaagactcccttgctttttaaaatgatttattttctttttcatttatgtgtgtgtatgtctctgtatccgtgtatatacgcacacatggatcctatgaatttgaagttacaggcagttgtgaccacatgtgggtgctgagaactgaaaccaggtcctctgcaagagcagcaagcacttttaactgctgagccatccccagccctgcttcctcttctgttttttgtttgtgtgtttgtttgtttttggttttgttttgttttgttttctcaatatctaggttcatcagaaccaatcaagatggctgaaaataatgggcaggaaattactgttggaaataccaaacagtcctctagagatggatgtcgactccatcgggttcctttcaaaaaatggggtacaattgacatagcaaacttatttgctttacatttctgggcagaaaccattaatagtaattaattccacttctgtgaggctgaagttctttgggtaatcttatgtgtgatcattcctggggttgcagtcaagtgggcacaacagtactgggctgtggggaggcgaggtgacccctgctgcatcagcagtgggggctgcctgttggcctaggctccttagcatttcttcctcaggttcccatcccccagcaggtgatgctggacagctagcggtatcagcagcacaggagaacaagagcagggtcctcagagcctcttcaaggcctagcctgtgcaattcactttcaccttctacttgctaaatgagccatgtgggacagatataaagagcatagcacagtgtccaagcagggaaggagccgctcatttgactagctattcatctctccatgtgtttcagcttgggtttcccccaaaaacatctggagctggaaacagaggcaagacacacagaagcaggcaaaccttgcacagagagcaggtagtggtcaggaaacacaccctgcaaattcctacatggccagggccttgctgaatggaagtaagaaagggggtgggaagcttagagactgctgcctccaggctacctccttttcctggctggataaggcagtactggaagagtcaaacaggagagaagaaagaaaatatgcaagcaggtgggcatatggaatcaaaggagacaggaacccttcccctgggttacagtcacatatccacactcggggcctcctgatgccccatgcttctgcttgctttctggcttgtatttgttatcttatacatctctgtgtgtgtctgctaggctgtatgtgcaccatatacatactacacacagacacacacacacacctgcagaggccagaagagggtgatagatccctcggaaaaggtgttacaggtagttgtgaaccacctgacctgggtgctgggaacaaacttgggttctctgaaggagcaagggctggtaaccactgagtcatctatccagtccacattcaagcttttttttttttaatgcagattgtatttttaagatttatttttgcttacatgtatgtatgttcactatatatgtccctggtgcccagggtgaggatgagggggctgaagagggaactccatcccctggaactggaggtagggacagctgtcagccaccatgtgggtgtcagtgactgatcccaggtcctctacaagagtagcaagtgtgcttaaccattgagccatatctccaggtccctacccaaaccgccttttttttttttttttagaggccctgaaactttgcagtagcttcctgctgtaagaggccatgactgtctgcagtgtgtagtatgcacgtaagcttttcaagtcctgtgtggtctctgatgcaggacagtaccacagttcgaatactgggagtaaaaggaggttaaagattatgctcctgataggaaaagacgaatgggcatgctccgtggaagccccgccccgccccacctcacccctccagctacatattctgagttctgttgatataaggatgggaaagccagagggtgcttcaggctattccagagcctgaggtttagaaactatcctggcagtcaacgtttggtttccctagccagttcaatgctcttttctgacacccgtggtggggtctcactcctggagaatgaggagcacagaaataccattcttcatcagcatttggtctttcctttttttttttaactctttcttatagcaaatagaaatcactttccataatttctacctctaagtctatatttcacactagacaaaccaaacacattgtgttctttcacaagccttctttcaaagtgagtttcccccattggccgctgcatgacaagagttggcctatctgccttaatgaaacccacagggagcattatcttgaataattacatgagtacacgtggcaagttcaggggctgggtagaccatcttgtggttttgaaatgtgtggtaaaaagcatcaagagttgacagattagttggggatttgtcaagagtattaattacagacttggaaatcttggttagtgacagtctgtcttgtcgcatcttgcaaatgtgatcaaagtcatttcggaacttatttgatggtgcctaaccaaggtgtgtgaagaacgaagcttttcattagaaatcactgggaagtggggtgcattttgaaggaagagggccttgaattgcactccccttcacacttcttcctcctcttcctctttcttttggggagggcagatgggggggggtcttaaaatatagatagcacacaaggataaagttgggcccataaaagtgtttttaaagctacaaaaagaaactatgaagcctggaggttgttgtgatcagtcagtccaagacatgtatagcttaacgaagacctcaaatgtcagagtacagtatgaatttgcttaggggaagggaaaacaggtctctccccttgttcagatctagaaaaatcatcctttattttggcttcttgcagggatgagtgggcgggtcggtactggcatctaaatcatagaaaatgaaatagaaacacagccctgtcctgaaacctccctcccttcttctgggaagtctgtcctgatggacctccactgcctagcagagtggatggaccactcgttgattctgcgcaactggagaggccggaaagtgattaacgccgagccttggtttgtttggtggtccgcagcagtctctgaaaccctccttactgccttccagactctgttggcacccttctggtgagacgaggcagatcttttcaatggctcatctagtcagaagttctcgtcagttgcctctgtgcaccagagggtggcactccagaggtggagaggaagggcgggaagaaggaaggaatgaagagaaggcagcattaattctcagagctaggtctctagttaccgaagtatcttagcaaagagccgctaccctcagtcccttaccgggggttgggggggaaaaacccctctaagtttcgaccggacctgggggtcagagtcttagagattttaaagaagtcacagcttgtttagaaacaataactttctgtgttgtggggaacccacattttctgcacttctgaggggcagacgacaagtcctccttgactgcgcccacatctgacctgaccctctgtgccatgttttgcagttgctgaatttgtgcgagtccgtgaaggatgacgccctgaaggtgatctctgccttcaacattccacacatcaccatccgtgcaccaaaaacaggaatccccaaccccggggctgccgaggccgcctacccggcacccatgcaaccgctcgtgcgggatgcggcgcgcgctcaactggccaagctgtgagccaggcgagaaatttagtgtcccatcttccaagtatttggccagagctggagcagaggccaaagtggcaggtgcagggcagccaccttggggattttggtctggcagaggaggtccagctaaggctggcgaggagcagggcaagttgtccgggagagggagccatagatggataccccactatcacagtgacttagcctggtttgtagcctcgcctggcctttaccttgacttctcccagccatggccctggatcccccagacaatcgtcttcgcccaccgcatggtgccaccaaagatctctactgtcagtggtgactcatattcccagagacttcgaaaagctctggcgctgggttaaaaaaaaaaaaatcaaaacataaaaatcaaacacccttaggcaaaaggggtggaggaaagctccaccctctccaagctcgggcaaaagttcagcgagggatgattcgtgaatcaggcttgctccagctttgcgaggaaatgcactggcgagagcggagagcttgagcctgcagtcgccctagtctcaccaggtaggtgatctccggaccgcacgaccatgcgcgacaaacgctcctccgcgctaaactgttaccaacccttcagaaaagcatagatgtgcaaagattaataaataatagaaagatgctcccgcggcttggagaggtagggctggctggcctggggaataattggaataaagtgattttggaatttggagagattacacaggcggaaatgaatttctcatttgtgttctgacttggtgttgcccagtttcgttctcatctctagccatcgactcgctcccctccctccatatccgctggcagcctcagtaaggcaccagtgacccactggcccttcccacgctgctcttctctgctgtcaaatccggtcccaggagttcttccgacacagccagagaaagctgaatgggcccaaaggcccgcggctacctgacttgaggcacttggtggaagctcccctgactgccttgttccctggtgatgcaagagcctccgcctccaggccggcttcctaattaggacctaaaaaagagcacatagcccaacccgttgctttccccagtgcctgtatattttcttttagcatgtccagggttgcagaatcggaagactccagagcagcctgctcctacaaagaaacaccagcgcttccccacccccacctcccacccctgtatggttcttttctagtccaagtatgaggcgcctagctccacgctgagggcgcagaatacttgctgctggctttggactcccagagtagcagtagcagattgggctgcatgggtgggatgccgagtggccaaggcacagtactgcttcacagaccttggtcaggacagacctggatcggcggtgtacttgacttcatccacgcccttgccctgtgcgctcttgtagcgatcacccctgacctccagcaggagcaaggctttgccttgaacaccccagcttccctgggaaccaatggcttctttgatctcactcaggattcacttgagaagctagactttagcatggggctgtgctgtgtcaccgtgacgttagatccgcatacaaacaccaaaatgaccaagatggcccaacattgattgggacggcaggtcgcaacacttgttctgcaagaaaaggctacgtcctacttactgccagcctggatgcaggttgggtagcccattaatagagtttccttaatctcgtgtggggagtgggacgttccatttccagagcagcttttttgggccgccgctatgagagaaggggctgggggtggggatgcacatggcgccattgacttccagacttctgttggaatcacaaaggcctcaggaagatcaagggatttttttttcgacccccttatggttttcccagctcggcctgaactccgctgctccatggtcgccagcatcggcggaccgatggatagacagttcctggcgtacactgtgagccccaaacatttcgaggctcccaacaccgctcatggcacaaccgtctttccttggtagcccccctccttttccttgtagttattcttttccagctaactttctcattcccctattttatatgcttgtcgtgcccgcccatcgctccctgaagcttcccgcttctcttgtctctcaactgtccttctcaccaccacctctgcctcttaagtaactgggcactagggaaacaaacatataaaccacaacaacaacaacagcacacacacacaaacacaacactaaggagagcctaaaggaggacagaaggcagaaggcggcggcgacgaagaatctcgcttgaggcgcagacgaagaggggtgagcatcttgctgatctgagtcccccggaggtcaggaattctaggaaaggacagtcaaaggccagtgcccatccttgcaccaatctaatcctcatggtttggggctgagaagctgtgcaaagcaagggcggagggacgccttctgaggcttccaactggcgcccgcggccgggctggacacagagcagtgtaccctgagcgccccctaagttccgctctgcgaggtggccgccacgggcggacggggaggggcgggtacattctgagtggaggatgggcgagcatgcagctgcccgcaggccaagacactagggtaaacacgccggggtgggcggcgcacgcaaactgcaggacagccggcggggccaccctccccactacctgtcgcagcctgcacgcgccagcggcctgggggccgtggggggtggggcttaccttccggcttgccgggggccggactaaacgggggcggagcccgcggtgattgggcgcgggggcgggggctcaactaccgcagagtctcaagagcaggctgctttcacttcgctccccgcaggcactgggtcaccagctggttggagctctgcggtccttgccatcgtcgccgtcaccggattcctgcagccgctctgcgagctgtgttccacttggattcacaccacctccgctgctcccgccgccaccgcctcggcgcccttcccctggccctcgtccacccaatgtctgactctgattctcggactgagaaacgcaaggtaaacactccgcgactcccggggcgcaggctggggatggatagaagacaggcgccgcagcggcttcatctgtctctggtgtcgcacgtgcgggtggaggcactggtttgtcccgcgtggctgcaggaggcgaacgctgggagtcgggtcgaggtcgctgcgtgccaaggcacttttggggaagggttgtcggcactgaagctgcgggcacttagccgaagactgggttgggacgcaatgccgcacgaggggccgctgaggcatctctcgcgggcaaggagggcgcgtggtctcggcttggagccgaggtcccgcttcgtggtgccggtagtgcgtccagccgggaagcgtcgcggcgacccagacggcccgggagaagtagccgcgcggtagcggcgggcgggtagacttaactcttcgctgacgcgggttcattgcggaggtttgagtattaaaatcacacgcgcccagactttgcttgtacccattcaagtcagtttggccatagtggtcaatttcctttccggatgtccctggcggcccggttccttttgcgaccgtcctgtggatattgaggaacaccgtatctacaggagacaagaaaccccgtaacccccctaggaccacttaggctacgcgtattccaagccccagctagccgactactcctagcccgattgcaccgggacccagtcgcataggctggcggacccctgagctcgcaagcctattgcccacggggcaggcactgcttgaggaaggctaactgaacagtgggggcagaggtctggatgtgcatgcccgagacccgagatggtcgttcatatttggttcgtgtcggtagcactcggtagcacatggggacacagcaggtgaagttgctgagaagttcttcaggggactgcggaggcattagggacttggctcggaatggcctggagtgcgatcgtggcctcgcggatctccgaggggtgcgtgtctcgctttgtctctaatgtcccgctgccctggcggcgggaattcccgcaaagcgcgcgccgtcccggcctggcccaggggtggggcggggcgcaaagcgaagctgcccggccccctaagttccagccggagctgcggtggccggcacagtctgagcggcgctgggcggcgagtttgtcaacaatcgccttgccttcggctgcctgacccgtaggcgccgcccccaccgcctctgcccattggttacgatggggagcgactgcgcgcgggccaatgggggagcactggcagccggcgccaggggcgcagggctggcggtgcccgcgcggcggcgggagctgcgcgctaggggcggagcgggaggaggcggaggatgatcccggcggcggccggtgcagcgcgggccagaggcgcggcgcgcgaaaccttcggctccccggcggagcgtggcggagggcggacgggcaggcgcggggccctggagcccaggacccggctttgtttcccttgcctcctcggtggcgacgtgcaggggtcgttcgatcggcgcaacacgccgcgctcggaagggaaggggcggacgtgagtctcggcatggtggcccggggagggaaagagtcagccttgcgccgggtattgccaagaacgcgcagctaggtgtggaactttcaaagggatgtctcttaaggccctctttggaagtgtgcacattccggcaaggttgcacccgagagaagtggtttagtgtttggggtggcgcgcagggcaggcagcaggagggaccttgcggccgagggcgctcgacccgggcggagctgcgctcggagttacaaactctattgtgacgcacttactacgactgacggccgctgccaaaccttctccagacttgctgccctcagcattttcggcaaacaatggggccggagcagggaaggcggccagccgcctgcaatctctgcatctgcgcccgctcctgtgctccagctccgcatctgagcccgggaaatgagagcccgctgggattttcagacttgattcaagtttgtcctgaaggaaagcacgaaatgtagacgtcccgcgagctgcttctcctaaaacttctgtgcttgtgtgtgcgtgagcgcacaggctgactccacaagctggggagctgatactttgttttgtttggtagtccgatttagttccactctgcatcaaaataaacacaccttcattattttgggcgcccctttggtcttacttggcagatagtcagaaaagtaaacaacataacaaagaatctgaggttgactctagaattcttaacaaatggatgaaatgattttaaaacttaatttgctgaagataatcgttttgttgtcccccctccctgtttccttgcagaaaaaaagaccaaatggccaagcaaccttctgatgtaagttctgagtgtgacagagaaggtggacaattgcagcctgctgagaggcctccccagctcaggcctggggcccctacctccctacagacagaaccgcaaggtaatcccgacggcgaaggggaccgctgcccccacggcagccctcagggcccgctggccccaccggccagccctggcccttttgctaccagatccccacttttcatctttgtgagaagatcttctctgctgtcccggtcctccagtgggtatttctcttttgacacagacaggagcccggcacccatgagttgtgacaagtcaacacaaaccccaagtcctccttgccaggccttcaaccactatctcagtgcaatgggtaagccatagctgggtaagaggcagttcatgtgtgcttgtttgaatatcggtttcaaggctgtggggagcatttaaagcctcatagaatcagtcaagtgattcattctatattttgatagaaacaagatgtatggagatctcaacaatttttttttaacttgcaaagtttgtgtcgtgaatttatggatgtacaaacatcaacttactgagttgcaaagtttgaatctgtggccttctagccaaagtttatagccaaggtacagttggttttaaccactaagcttagatgttaatgtcattgtgttataaaatagtttaataaccaccaggcatgtaaaaggaagtgattgaacaacttggtcatttctgaagacagcctctgcaaagatgaacagcagagccaacttagaaccccaaagatgaatttatgccccaattctcctttaagctcatttttgcttcaagggatttaatttagtatggatggatgagattagagtgtagatttttatttctggggctacagtcagttgtagaattttctaaaaactatattcttaattttgagatttcatgcataaaatttcctcaaactcgtccacttccacaacttttcccagatcagttggagaatcttaaccaagtggcacaaaatatccacggtgatgcctggtacaactgatgagaagacagctgatggggacagtggcactttggagagtgtttatcccatcagcattaaagttgcccctgattctgtcctgcaggacatgagttcttggagtacaagtgtttccatatcacatcatcaccaggcgagcagattttgaagtcagatatcccaatctttaaacgttaacaattactttagatcctatagtcactgttaaaaggcggattgagatttgactcttaagacctcttagcttgtgccttgggctatgcacatttctggtacacccctcaaggaaggatggctctgcatgttgcttctccaccaaaagaaaaaccatttattttgatccttatcatccacaatcatgtttggtatgtgtccggccagtcagacttgtagatgacattaggaacctgcccatggtgtcaattaaaacatgttctctatgaaccactctggggactgttaagccctcctaacagaaggagctgggagtcttgtgtactactctggctattgctttcagacgtacttctgggcaggcacttgctaccattctaccacgaaatacacccagcatatgggcatgtgccgagttaacaaagctccctggtataagtgcttaaaaacctgtgtattttaagaaccctctggaagctattagagtcttaatactgtgagcttaagtaatggtctctgcaggtggaataatctggggaaatattttctcctttcctgttcactaggagtagtggctgagttagggcattctctgatgtgaagatagtcacaattgttttattttgggtcccattctatttaggaagctaattacagtgtaattcatcataatttgagatgactgataactgagctttaaagatcacagtctaaattcttaggcagagttaatggtcatagctgtgaagtgctaactagattgcacttccagtacattgggatgatgttagcttgaaggttaatgcgtgagtttacacagcgagtgactggggttaatgcactagagttggtttctatccgtaagctctggagagatttgcttggggagggggtatgttgggatgggatggaatggggtggggcagaaattactgacagaataagaggacttagccagatgtgaggttattaaattagacacactcaagagtttttgtccaccactgctggttttctgaccaccctcacaatcttagttctgcctgaagactacttaggctcagctaaaaagtgatctctttatcttttggacttgtttaatatttttgactcaaccattaaaatcttcaatgctgcttttgataagttattgcaaaatacattttcacaaaggagcctttatgattggtatgaaccactggtcgtcgcacagaggtccagcttagccaagggctcttcttctcggctggcaatttgcggtaggagacagagtatgccttaaaaaccatgtccccctctcctctgatgtgttgagattggacctaaagctttccccattaaggcagactctcctacagagcagaaccccaggttcttgtatctttgctgcactgaggaaggaagggtctcattggagatacctggcaagcagataccgaattagagatgtcggcacagtttcctctgcatcccactgttttgaaaaaatcttgcaagaacattttgtttactgtttggaagtcgttttactcgatagcagcctccatatactttggggggatcaacttgccaaaccatttcttgaacggctgatgatcttaataaaaaagaaccttccccacacccactgactgcctttcctagtgtttttttatgccacatatgtttctcacaccagttgatctttgcacacgctctccatctgaagcataatcagtatgaacttggaaatgcaaagcagatgaatattgattgtcagcagggactccgaggtgtttgtgaatgtcttcagctttggactggcagagcagaattccatcatctttacaacccctcagcgtcctatgcaattggcctcggcgctggagcgcgagcttcctgtgaaaggcaggacatcctgcagatgccatcgtggctaacataagacacctagacgttggaacctgtggcgctctgtctgagcctgtccgtggggttgtgttttgttcttacagtgttgggaatggaactcagaccccacataaagcacatatctattcccagcatatctgtgttggcacgggaggtgtgccccctattatagacacaagaacatgggtacatattcacatgagtaggtgaagtaatttcttgggccatctccatagacactcgggtcatgtgcacgttagcgggcggctcatttctttttcttgccttattgcactgactagagccttgtggtcttgttagatagaagtgataaaggttgtctgaaggatcgtcggttttctgcttagagagtaaaatcattaactagattagttataggtatttggggatacttgtttatttatctttattaatttttgtttataatctttattaatatttattaagattaggaaattttaaccaaactccgaagttcctgagaattttcagagttaggttttaatgaaatgtttgtaccatgattctgttagcctgttggcatggtgtggtacagtgttcaaacactgttaagtgctcttatatgcccgggataaattctacttgggcaaaacataatttgtgtacaatgatggattgaattgaatattttattatttttataccttgaaaggtgtttgttggtgctgtttgctttctgtatcaaggcctgaatgagttcagaaatattccctctcttttatttccagaaggaactatgaaaaagcagtcttaagttttgagggtttttttgttttttgtttttttttttttttgagacagggcctcatgtagcccagggtagctttgaacttatgtgtagccaaaggtgtgctgggtgctttatcttctgatcctcctgactccgcctcccagatgctgaggttacagacatgtgccactgtgcttctgccagagacctgacactcggcccagagtgtctcttggtgatatcagagcacccttggtcttcctggtcggtttctgtgttcagtcatcctttccctgaggcgcccgccttggtgagaacagacagttgctggtgaattctctttctgcctattggggcttcccagatagaggcctctgagcaacctgcctgggctctggagacagtgagaagagtaggcaactgccccagagtctgctgagaaccctgaagccctcccctgccctccttctcattttcctgggctttgcagtgttagtggtcattcaaggaggagggcctggcagtggagctgctcctccctctgggaacaggtctgaatctttcacctaggtcttgtttgttgtttgtgggttttcttactctgtttagatgtcgtgacaattccaggttgcctggctcaatggtggctcacaacgccagaggctgagaatctaaggtcaggtagatctggtgtctgaaaagctgcttgttccgacagcagcatccccaaggtgtcatcagtaggggaaaggttatggtgtctctgaaggcacttagcactcccaggggaccccacattttaatactgaccatgtagtggctatggaacatcaatttagactaaggttaacttgattggctacagagaattcaggattttagaaatcacctctcttccttgtgttttgctattgtctgcatgggataacagtagaaagagaattagcggctgagagtggtggtgcacacctttaatcccaggaggcagaggcaggtggatctctgagtttgaggccatcctggtctacaggagcagttcttggacagccaggactgtatacacagaaatcctatctcaaaaaaactaaaaaagaaaagaaaaaagaaagagattaaaattttagctacaatcctctttttcataaccacactgcctgtcactactctcacttgccctgtatgactagtggcgtaacctcaggctattctctgttgcttcctgtatgtgtggataacccggtctaatttcaaaatagataatgccccttggggcatttattaaagagaatcccaagccttatagttgtgtgtgattggattctaagatagagagatgaactggagaggcattggttttactttgtgttcagggtgctggtggaggcagattgcagtgtatctgtctgcttatagctggtgctgtgcacacacacacacacacacacacacacacagagagagagagagagagagagagaaagaaagacagagagagagagagagagagagagagagaggatgagaataagacagcctgagggacatgccctggcttgttcttttaaaagatgacagacttgttaatagcaagtttggttctaaagaagttcttaggactaaaaggaagaagaaactgtgcttaactgtaagtagtacagacacagatgtgtgactttttgctactgaaggaaagaaaataaaaaaatcacctggacaactataatagtgtctactgtacatctggctctgtaacctttgtttcgggcatctgcagcagcctgccactgggtgggtatgcatgtccccctgtgtgttagactcttgctgctggtgaagcaacacctcgcagcagcctgtattagaggttcttccagggacactgtcccctatcaattcctttgagggctgcctgtatgtgcatactgtctgaatggaacatctccagcccatggaaccctgtcagctgcctgccttggtcacctctctctgcagccttgtacaacaaaccactcagagaagtctgggcggaatcttggctgctcctctgctgacccaaggaccacggtgcatctggcaagtctatttgagctccagttttctcttccatccagtgaggacctgcattctctacgtgctgtgggagtttgagaataacccagcagacacgagtcacctaggaaggaactcagcacttctccttgcctcccaggaagtgtcccagctggtcataggcatggctgatatgcagtgttctctactgaccgacatctgtggaaaagaccagcccttctggaacccactcacagggagcagtgtggtcgtgggaatgtcacgctgggtaattcagaagccctctggttccagagtaaacaagcaaaaagggaaaatattttctagaaactcgcttgaatagggtgggaagggaagtgtgaacctgctgcaggcctgctgatggacctgaacatcaccctgaggggaaccttggcttttctggcaaatctttggaccgtggagggacatctggaaaccctacccacaccggctctgcctgccttggggctgagcctaggccacctgctggagacggaccatttgtggcagaaatttgactagagttcagaaatgtgtattttgaaaagaacagtctcgagacagaagcggagaagcactttcccctgcgggtcagtgttctggaacagcttttcaaagcaaggggtatgctttttatcactggaaggcccactgtctgaatcgtcaagactttaaaaaatgcctcccttcccctgtatctttccaggtgaggagctatccttagcttcgagttgctataggaagtttccagcccttacagatgaggctttcccgtgctgggcaaacccagcattcacagcataaaacagcatctacttaatggcaagctgaacttaggtctctaagaggccaggcctctttgtccccgagtgttacttaggatgagtcttaagtccctggtgtctgtgggaagccctgacttcactttgctttctctaactctgaccagagccccttgtttcttcggagagctgtggtctgtcccctgattgatgttgatgataaagggatgcgggctcctcctgttgttgccctggcctttccttttgccaaccagacaagagagggtggcactgatgacttgtctccccttagaacccatgtccttctggctcgtgtgtgtgtgtgtgtgtgtgtgtgtgtgtgtgtgtgtgtgtgtgtgtgtgattggggctcacagttgatgccacagccatttagaggcacgactctaactgtgtgtggtgtgggcatgaagtgtctgttttgttttctgccttttcctaatgttaaagctagggagtgtgttgtctaatgacgaaaccttgccttacggtcattggcgctgctgcctggccctctgcacagtacagtctactatgtatgcttgggcttagctctgcatctttaggaatgaaagtgggtttgaagctgaaactgaaaaataataaaaaccgtttcagctcaggatgagtgtacatgttaagttgaaacaggttgaacactaacagttttcagctgtcagctgtcttgagaccccacccctcaccgatcaatagattatactttcaggtatggagtgtagtttccccgttcttactcctaaaagatctaaatataagcaatttaagaataagtgagaaatttgagagtttttaaagattttttttttgcctgtaattgtgtgtgtgtgtgtgtgtgtgtgtgtgtgtgtgtgtgtgtgtgtgtgaagagagcattggagccccagaaatggcaggtgcagacagctatgagctgcctgatgtgggctctgggaactcaacctaggcttcttctgtaaataagagaagcaagtgtttttaaccattgtgctgtcttaaaggggaaaggatctgtttgacctttgggaatgcttgtatatgaagaatacaggctgtacaggccgtgttagatgttactattctatagcataactgtgctagagaaaatgcaagggagtttcttggggctcagtgggataacacttgtcatcaagtccaaggccctggatttgctccccagccctacaaatagtggggttcgtttcttgttgatttcttttgtatccttgagaaatttcttagcacaaaatagtgacaatgaggttaggaggaatatgatgttaagggtctatgagaatacaaaccttggttttacttaaactcgtgtgtggattcgaagcagctcagtgacttaagaggaagatggactgtttaggaagagcccgtgctgtcctgtgtgatgtgtcccgtagcagtcccctcgcactttctcagctgaaagtctggcctagacaatgcaagggctaagggttagctttgtgtccacactcttcccgtgctgatcctgtgatgaaatctagtggtagaaagttttagcctgtgaccccgcctccatggagtcttggtctttccactatgatagtcccattatcaggaaaggtaactggagctcttacctgactcaggagggtgtggaggccactctagtggtcggagcacaggagagcaacgctccactgttccattacaccggggattttttttttcagaatgtcctcgaactgtcttgcttgggtcatgagtcttgtgcaacagagctgccagcagctgtgtctgccctgcctttgtgggcgagtggagagacatgtcaggagcttgcgcagatgagtggactgtcaccataaactcacagagatgacagccgttttccatgtcttcctgcacctgcagtcgccatagccagtatttgtaatcagaacaaacctattaatcgtggttataaatttcactcttaactttgatctttatttcattctggtgtcttcccaactgagaagtcacctgtatggaggcggggcatggagcacagttatgttatatttgtacactttggactgtttctctgcagcctccctcagactagtgtcacaaagttggcccgtcaggtcagcggtgaaggaacttggctctcgcctcctctctgactaattttatactccctctgtcaccacaagaattggcaagctttctttgacagcagcgtttagtttagttcttcctacgtcgttgttgtcgtggtcgtcatcgtcgttgtcgttgtttgttggtacaggactggctggcattggcctgtgttgtgtctcttcgcggaaaggtgtcaccttcagcctggatgtgtctaataatatgcttctggggttgtctgggggaagagtctcaaagcccagctgagacagacatttaaaccattaactgtccaagcacagtgattgtctttgcagttatgcaaagcagtgtctggaattaaggtagaaggcttattcttttcttcccacaagatgggtataaaggaagcagctgcctgtgttaagtgggaagttttcgttgtctgtcctcacagcgagttagccgcgacgaccgtacatctgtgttgaattactgcttcagtttgtatatggctattataaatgctaagttagtaactaaggccttcattagaagaaaaaacaaaaaaaggggggaaaaaaagcccaggggtgacttgtagatgctggttgacccttgttgtcatccggtgtcttggtctctgttgtcactgggataaaaacatgattggaaccgtacatgaatttagggggaaattattgttgcttgttttctgccactggttttaagttacatacaggaagccatagttaactctgaaaacccaggagtctttattttatagtgtgaattcttagcttccctcaccctcggcccaatatgatttttgtctagaagcaatttataggttactgtaacttggggcttttgcatcctttgtttctggagtctttaagtgtgttgatgtataggggggttgcatgtttgtcttggggttagacttttcatacatagctcaggtttgcctcaaacacaccctatagtccaggctttcctagtgtttggggttgtctgtgtgagctaccagcaaggatctcaaccccaggcctcactcatgccaagtgggtaggtgtcctcctgctgagctgtgtcttcagtccaggccgtacttgtggtccaggggtggaaccgagggttttaggctcactcgattaggagtgtccccctatgctacagctgcagccctagtgtttaaaggatccctatgtggttcttttgattaatgaagtaaatcatgacatgcgctgtctggctagaacaggatattggtttcaggtttttgtactaaatcaagtacaaaatcaaccctatttattgtattgagttttgacgttatttttgcttattcaagtaagatgcagtcagatgcctgtaaccttctgaacataaacaatgactgtgggcagagatggagctgttcaaagacttagtggcacaggactgaagagatggaggcacaggagcacccagggtcctgacataactggcgagtgtgaagtgctgccatgtgctgttcagagcagtgacgtcagcacggcgtgattggaggcaccgtctgttatggtggtactattccccgaggcatgttaatgagaggagctggcttaggatcaggtttgggaagtgtggcagctttgtttattaaaaagaaaggtactatgctggcgagatgagtccagtggttaaaagcactggctgctcttgcagaggactaggggttcagttcccagtgcccatgtggtgactcaccccctacctcgctccagttccagaaggttcaatgcccatttttctctaccacatgcttatggtacaaacagacattccttacatatgcacctgtatatgcaaaataaaaataagtaaaatccaaaataataataacaaaaagagttgggggttgagaggtcccggtacaccttgagaacaggacatctgaccctggaagtgagcaaaaaagccaagaaaccaggtagtctgtcaccaacaggctcccagccatgcttcccctgtgcttctgggactgagatgtccctggatgtgggccctgcagctcaggctccggacataacctcctgtgtctaatgtcttttagtgtgagtttgggggacagctcagatggaagccgtaatgagagaccttctgatgtaggatggaatgaatgagaaggtactggatcttagttgccgccaggtttggtctttattgcatgaaacagaccttggtgaaggggaaaggccttgtgaatactagtttccacgtctctgtccagcttcagcctgggactagggctttgcaaaccgtctgtctggaaatggatgaaagcagcccgttccgacctattagctcagggctacatgacagcagcggggaggacacgccggaagagcgagtggggaagctctggctttgggtcgtgcacttcattatcgagcattttattccagcagctgtttgtaaggcgccggcttgaattcatgtgacaactcaggcttgacacaaatgtgcgccagagaaaaacagactgagggaaacctgagctcttaggctgcagcgtgctgttgctttatttttatgtctttctttttacttttatggatatgttatttgtatgtgcacctgtttgtggtgtggttgtgtgtgtgtgtacacgctggtatgcagatgtgcagagaccagaggtgttaagtgttttcctccattcatctgagccttagaccttgaaacagggatctctcactaacctgaaggtcacagattccactaggctggttagccagtgagtcctggggaatccttctgtctccatctccctagggctagggactcagcctcacctgcacagccccctcttaactgatggcgccctcttcctacagacacctgcatttttattactaatagcttttattttcgtcaagtggctcagtgggactagtagatttgtcttatcaagaaataaaatgatgtgagtaaaaatgttgacctggaaggagcttgaggctggggagtggggggattgaggggcggggtgcgcagggagactgactggttctgggtgggatttctgagtacaagtttcaaaaggagcttctggtgacattgtgcgtcccctcactggtggctacggagatctctttgccttgggctgactgggaagagacaggacaacttggtccctttaaggtgtctttgaaagctgcctgagcacaccagcctgtcacttcattccttctgtgggtatgtctaagtagagattacatctgcaggtatttaagtgagcagattattgtattaaaccaacatcccagaatttttttatttgccccactgaaaactgagcatcaaagcggctgcttgtagacatttccacgcccaacccaccatacttgaagtatttcttagggctttattttatagctggtttgagtccacaaggaagtggttctttgtagaggcctttataagtgtgagtggtcccctcagagcgtcctcggggacagagatacacagccctgatatggctgatgagaggtgttttttttttttcttcctacagtccatgggccaattgccctcgactgtctggtgtgttctgttgtgtgtttgaacgatcaatactttcttcaaagacacacattccatctacttggacatcaggaaatcctttctctgttctgagttgaatattgatttggcttaattcattgctggttactttcacatctaatctttggggattactgaccatctaaagacagctgaaattctcctgcaggttttgagttggctcctgctattgctacaactgtaatgccaatggtaatgggagtaggagctgccctgtagttaaggagactgagctagccagctcccaagctgaaaatgcaagccagtgtgctaggatgtgtgcttgtgttgtttcactgcgctgctgcgacagcacaggacaactggcagaatggctgtgaatgtcacaatgtgaccatggtgctttgaacccattgctgctcactgcaacaaagtctcagcttgatctgctagcagccacttccccttgatattaataggtactgagttttgaagataccttgtattacctcatgacttgaaaaagtgttagccaagtgggtgacccacatcttgcaccactaaggccctttggcatcaggaatgtcctcctttctcttcccctgaaaaatgaattggtatggtgccatagaaaatcacgttactgataccagtttttggatttcaaaaaggttattttttgaagtttggatgaaaactcagtgggcagaggacacttggcaaagtgtctgatccagcacataagaaagtttaataatggcatttgttaaaagtgaggaggaagaaatgtggccctggccctgggaagtcccctctggtgcagtttagtggcctgcaggcttggagccttgctgcaagtctcagcttcacagtatatctgtggtcgcaagcactctgtttcgtctgcttggggtgtgcatgtgcgtgtgtgtgcacacacactcatgcatgcacactcatgtcaagttcccagaatgaaagttccttaaatactgaaactatgttctgagggtgaaaatttttatgtgtgtgtaaaatttcctccttggtttaaaagtgtggccctccttagaaaagcttttgtaaacagctttcttgcgaacacatatcaacacttgggattctcaggctcatcactaatcacagaataaactacttgtggttggttcttaaccgtcttagactgcattatctttgtgatgggctgactgtgggagtaagtggatgcatgcaggacagagtgacaggagtcaggaaggtggggtggcatgtcttctgggcactgtgtccccagcccacaggcgccaggtgcatcttcagaagatcgacaattgggatgtctacatactgtggtcgcctgtgcttagggtggctgtgaaaggggacaaagccacgtcgtgttgggaatggaaatctcacgtctggctcactctatgctgtagagtggaccgaggggccctattctttgctctacttgttctctcgtggcacaggaccaactatgggactcactagcattaggctgttgggggagctcagtggaaagcttccctacaccccatccctgtacctcaaagaaaatagtttgtcatctgagaaataatgtttgaagatttcgtcaaacagcataccatatgagttacagctagtgtaccttaaatacagaagaagaagatgccttctaaagtactctcaatagaatttttattatataaacttagtatattgtggctgaaggaatggttcagtggttaagagcacttgcagcaaaatcatgaagactggagttcgaatcctggcacccaagtaccaatccagacatctgcccacagataccagctcagagtccaagcagagaagacaggattgctgagatttgcagacttccagcataatggaggaaaatgtgagtcccaggctcagagagagaccctgccttaaaacgtagtaggcagagagggatggagaatggcactccacccacccttctggactctacacacaccaacagaaacatgtgtactcgtgcacatagacaaacatacgccaatctttttacaaaatgtacagctagctatagtatttagcttggtgcatatctactgtgtgcatgctacttgtgccttgtggagtgggtactagccttaattttcagttttgtacctcaaaaaaaaaaaaaaaaaaaacaacaacaaaaaaaaaaaaaaacaaccagaggagggccagagagattgctcagcagttaggagtactggctgttcttgccgaagaccttggtttgattcccagcatccacatggcatgcacataaatccatacaggcaaaatagttcctgaaactattttaaagcacacctatccaggaggctgtggctccgtgatagaacacttgcccatcatactagcatcacagacagggagaaataaatattcctgatccttataaaaataaaacaccagccaggtatgatggtgcatgcttttaatcccagcacctggtgggtgagggcagatagatctgagtttgagtccagcttgtcctatgtcgccagttccagctcagccagggaccgggcagcctctaagacagaccagcctcctcggcaagtggtgtttatattgtaacagctttttaatattacaccaaagtacagctgatagtcttttggtaacccagagctattgccagccaattacagtttgggctaagcctgacctaaccattatcttgggttaatacactgtcctgacaccaccagcacagatcagggccccaggcctaaccactgtttctggtcctttgttctgtgtcttttcaggatctggtgtgtggatcttagcacctccatcatccctcccaccctaagcctccttgcagggatgtggggatctgtttatatctgcacacctacttgtactaacagcctctgaacttttttttttttttatgggagaaacagactgtcttcttatctccccaaacaacagggcatttatctgtaaacaagttgagcttggccaccaaagatccatagctgctggcagcatctgtgtgcttgctaagtgctagttttgataagtcaagttgtgacccaggatagctccttcaagtggtgtacttcagctccctggacctcatctgagcctccctagaacaacctggctcatggtcatttgttgtacatcactgaatatgaccacacagtaaacactgggtaagtgacttgggtcacgccacctgactttgatctattttttacccattgtcttctagtacttggcttttctttgcttccaaccccaaaggtgaagctagatagctctcttcggtgtgtatggggagaaagagtgaactgtgaaggtgggagaggtgggtgacaggacctgtcatggcggcgtggtgcctcccagacctgctcagctgggtaggtgtgcatcccggtgaggacacaacagagcccctagagagttcttgacggtcagtacttacaaccactcgtcatgacccagctggtgctggtccgtgcttgccaccccagcacttaggaaagtgagacaggaggggtgagagagacctgggctgcacagtgagatggtgatttgccacttgtgacaccaacgcctcacaaagctgacaacccagaaggacatggaactgatggcttgctccattcacctgacatagtgtcaacctttgggtttcttttttccaattaaactgtagttttaatagacttaataatagtgctaatattagaaatatttgtgcttaaaagaaagtatggccagtgtaattttttgtgattggatgtgacttcctggtctgacttagcctaaaaatttaattcctccatgagacttctgtctcctgtgtagtgatgtcccctctgatactgagagtaggtagcttaatggaacacagatctcccccttactgaggacttatctgctcttttaagctcttagtagtttctctctctctctctctctctctctctctctctctctctctctctctctctccctccctccctccctccctccctcccttcctccctccctccctctgtttctcctctccctctgagaaatcctctcagtgcagcccagcattatcctcctgcctcgggttctggagtgctgggattgcagctgggatcatcattaactctactggaccatgggcaacccttggtcagggaagaggtggcaagcgttttgaaaagaattagctaagtcacttgcatatacttttgcctagttgtgagtctgcagtttatggatcttttacaaataaaaaagcaagatgtaatgtttttatcaacagtaggttttttctactttactgagtggggaatttagttgtgagttgcttgtgctttaaaaattggagaggtaaatggaagcccagggcgggtgactaatgtgctcttacagtgttacaacataacattaacattaacttggtgttatggttcagtgtgggggcgggggaaggaggacaggatctcactaaataggatctcccaggttgacctggaactcatagacgtatatgtgtagatcaggctggcctcagactcacaaatacacctgcctctgcctctgcctctgcctctgcctcctgcaaccttccccaatccaatctttttctcttttctcaaaaatacctttaactcccaaacccaaaacacttccagcctacgtgtggtgtttgcagacttgagtccctctttgttgactgagttaatattcagtcagagcatgcagttagcatgcagttatgctcccatctggatgatttactgactccactgagcctggagacagccaccttccaggcatctctgatttctccttactaggctttggaacggacaaacatttcttcaggtttgaatttttcctaggaatttatatcttgttctaagaccaaaagtgggtatttcactgagagattaaaatggtatgttctctgatggtttgtgtatttttttttctagtgtagttctagggatggaccttaggacttcatgcaaactgcccccttaaatctctctctctctctctctctctctctctctctctctctctctctcacacacacacacacacacacacacacacacacactataataataattaaataaagaaatcagtgaaagttagttctctgccttcaccatgtgggttttgcaccagtccctgctgtgtttctttggtgatcttcattgaactatccttttgagatgggagtgtgtgaggctgggccggggtgttttttcattctcgtaagtccgagtctccaattcctgccatcactctgtaatcacctacacactgactgctggttcccctttgttttgctcatcaactggacacaagctagagtcttctagcaagagggaatcttaattgaggggttacctacatcaggttgcctgtaggtaaatctgtgggggtattttcttgctgtggaaaggctgagctcgctgcaggcagggccaccctggtatgaaagcaagctgagcagcctgtggtgagcaagccaggcaggagtgctcccgcgcactgcttcttgctcctgcatctcttcttgcactttctccctgacttctgtctgatggactgtgatcaactgtgtgagccaagtaacccttctccctaatctggtttcagttagcactttatcgcagcaacaggacatagccagctaagacagtatctaaaatgataccgttttcacagttctaaacacagggtcgagagttcccaaggccagggagcttccagaagaccagagtgtgttaggtgggtttgttcctggaaacttgtgtgtggtgttctaagtgttgtggacctcggtgtgatttctggtttctttgcctcccgagcagcttccatacgacagtctcaggaggaacctgaagatctgcgcccggagatacggattgcacaggagctgcggcggatcggagacgagttcaacgaaacttacacaaggagggtaaggacctctccccatccccagagaaagtgcaactgcggagatatggcccccttctgcaccttacgttatctctctcctaattctgctctgacctggtgcatctaagggtttggctttaactgagatagagtgtgaagttgcaagaggtattttatgtgcaagagacctcaacatattagtgcttagaattcttttaaaaggttattgatacacatgaaatagctccatgtagctatgggcacatggtcttcagttcctgtaaggtgcttctccacgtaggcagagccattaaattctgtagtcactcagccagggctcgcagcaagagagccttgtcctgctgctggcttttcccatttgattattaaactgtgttaggagacgagtcatcaatagctataatgtgaacctagtggaggctgaataagggtagctggctgtcctgttggtatttatttaaataataacgatgacaacaataacatagtccagcatcttcagaagcagtgtgtttaaaaacagttttgatatggaacaaagacacttgtctgtttgaggtcctgcttcctgtggactacacttttggggatgtaggctttgactctgaggtacaggactgctgtgagtgggtgaccagttagcaaagagtctggaggtaactttggctccttttcaaattcattcaaatgtaacctctcgcctctctggagagatgccagtcaagggaccctgagatgtttctgtctttacatagacatctcccgtggagctaccggcccacactaagtggctgctccccagactgcttgagcagccttgttccttttgagtagcagatctatcagggagtcccggatctcgagaataatctcagccccacttcctgctcttctgtgggacgtgttgggggacgaatgtgtgtgctatagtctggcttctgtcataatgggcactgtcctgttgatgaatggactgaggagtttttcatgaaactgtgtgtagcccacacaggcttcctctccctgacgtggatcatgtcacagaatatgaattccttcttagcctaggtccaaaatggcagtcttttgggaagaatggttgattttataattcaccactaatgctacatccactaatccatctgccttgttttctttaaagagattttagtgtttgtgttggtgattgggctggttaactataagaggccatagtatgtttgggagcctggtccttctgttgagggcaggggtaggggacatgagactatttgaagagagtaaggggctacatctgagtcttgggctggagctggggccagagtccaggaggatatgccatttttgatgagtttggagagacatggaagtgtaggtatgaactggctatgatgctgtgtctgtcttactgtaaatgccctcagggctggacctggtgggtgggtacgccccaggagggacgcagctgtgggcaggcctttgtactgctgggacatgtacaccgagctgagctggcgcaacaccccactcgggttgtgtcagctcctttgtctgcagagccaggcacgctgatggatctttcgtacaagtttgattttaaaccataaggtaaggacaggggactaggaggccttccccgatgggagtgatggtcggtgcagctccctggggactgtgagtggttagtgatgacattgtcagagtgagtagtcacattctatggcccgccctcaggaagggtatcagggtaatgagtgattcgagtcctgtgcagctaaaatacggactgccccagattcttctctagctcagcttgccttatagaaggtgagactatggctgcatgtggtttgcctcctaccttcttcccaatgttattttatagtttcgtgcttatgtatgcattttgtggtggttgcatcggttgttttttgttttttttaaacaagccacatttatatatcctatccttttaaatataataaatgtcaataaatactgttgtactattttgcaagattttatactttattttgtatgtctttttttatttctctctgtgtgtgtgtgtgtgtgtgtgtgtgtgtgtgtgtgtgtgtgtgtgtgtacatttgcaggctactgtgcatgttatagaagtctgacgataacctgtgggagttagttctctgcttccaactagcagacctgcaaacttctcagcagttttccgtcctttgcctcccgtctcaccagtcctgggattacagatgcacatacccccacttccggggctcttatgtgggtctcaggagtccaactcagaccatgaagctcctgagtcggggtgctgttgctagatgagccatcttgccaagccttagcatatcttaagcaatgggttaagatccactgctgaaatccggtcactaataaaggactttagctttcttagtaggctcgagaaagggatagattccaggctaggccctaattcctctaaactgaaggcaaatattctccagatggtggttatcagcggccagaacacagtgacccctaaagccacaggcaccagcccagctagttagaagagcagcattgtctgtcatcacaccagtggtccatggttgaaccctggggacaggaagccaggccggaagtggggggatgatgacttcaatggcttcacctacctgaccggattcactgaagtctctaaaagatttaaagtctacactggggtgatttcttctcccagggttgttagcatgtattacttacctcacagagcctgacaggatatcttcccaagttaccaggtagggaattagagacactattttgtagttgtatgtttagtccatttaagagcagcggggcagcgtgagatggtgctgtggaggccgaggcaggaggtcagaagtgaatgcccaggcctgtatgcccctgactgctggactcccagagccccactgcagtcagctatcactaggagcatgcatgctctatagcatgggaatttggagacagcttttcacttggaaaaacttcaagaaacatttagagaactttgttaacatgtagccccggcaccccccagtatgtcttgtcaacatgcgctttcaatgtgtgggttgttttatccatgccccaccttagcttattcttaaaaatggttttattgattctttgagacctccatacagtgttttgatcttattccttccccctcccccacctccctacactcacccaatttcatgttctctttataactcatacaagtattcacaagatgatcaggaaacaaggctggggcagggggagcaaccacgggagcatttgccatgaggttgtatcatctgcatagaacagggaagctgcatccgagaagtctcagtatggtcgcctaaacaagatctgagcaaggacaaccctgcctgacgtgcgggtgtgcacggggggggggcactctcacgagatgccaccccgcattagcactgcagtgtgtgctttctgagagtgtgaatatcctctcatacctacatgtcaccacatgtaacagtcataatcagcaaatggatagtgtccccatgctgtcttagaactgcagacctaaacttcttctctatcctgaaatgtccctagacattggaggagggaaacccggcctaaactcatgcattgcattaaggaacactctggcctggtaactcctctgtctttggagaggcgacatttgtgcaggattcaggtagtttgagtctaaagactccctgtatttcttttacctggtgcttgcatgggtcgagggttaggttttatgctcccgtaggaacggtgcagaggcaagctgtctttggttccttccaccgagaggtgtgcggtggctgccgctgacagtgtagagccaaggtggcgtcttcagtgtagaagtattcgttttctccagaatggactccagagcttaagacagaggagatgaagccgcactagggagaggctgtgccttctgaaagattttcctgattgttatgcccaggcgctgtaccaagccttctaaaccttggtgtctactctgcagtgtggtacccatctggaagacttaggaggatggcaggggctcttcggggagctgttcagggagtcagtgggtccagagagaagctcagagggactggttgttggaaggtcatggagaaagcaggcagtttgcgtttagctgagtgctgaagggtcattcatatcttgcagcctatgtttgaagcctcttcgtcttcgtgtcagggatgcgtcaatgttcgacaaccccatttcacactcatctcccatagctgtcatcagggccgtctccatggctcagctgccgctcttatacccatacctgggccaggtgacatcaagtgcatgtcacatagtcctcagcacctgtgggcactaattatgaaagatgtccacttgtgggtattttggccatgggctaggttgctgggaaaggcctgtcagccctttagggtagctgttgaggggatgtcctccaagtgcccagcctaaagctaagacccctgcagatgggacagtgagtgagtggaaaccctttgtctgatcacaagaaacaccttttggtttacactgcttccttcccccttggtctgggacatgtgcaggcatgagttgattggagtgtacacagacaacaggagaacccagcatcagataaagtggagctaaaacgggggtccacacagatcagctttgataaaacacaagtttcactaaagcaatatgcacaggagcatttgtatactttaaacttgaagcctgtccgtctcgctttcctaagaaagggagcccactatgctatctgactccgtgcttttagaaatgacggtggttcctataaatcaccaacaagggagaggccgaaattatagcttgcttggatgaaaccaaccagagatgtgtggcctcgggccatgttctccagaggccctcattaattgaaagctggagtttaataagataagttgctttcttaaactgttgccattaaaggcatgaatatcaatgtaaaatcacactagatctgactcacggaaggatggggtctcttcacatggtagtcgcaggtccctcttgtagcaaacgcagtcactaggaggtaaggtgaactgttatctgctcttgtctgtgacacaattgtgtgtcgcagttggagggagcggttgggcattttggttttaggctttgttcatatctgaactgaaccacacatgccacctctgtttagtgactggaggtggcgagtgcttcggtttctcccctgaggcaagcggaaagagctgtgttattcactccatagcattgagctgcttttctgaatgagggttccctgtagctactgagggagggcagcttggctcgtcagcaagtgcaccccatccagagccacggggtctactctagtgtcggatgctgaaccctgcgtgctcgagaatctgggtgccattatcaccccgttctctgtcacgttgagtggtgccaggaaccctgtccacctggctgcctttacatgcttcggacatgcttttgaagcaagtgcgttggaccctacaggcgcaggctgcatctgtctgggtgtaggcaaatatgagaggagactgaagcactggggtgtgttcgaatggctggcggggtgttgggctagacatccttgtgttgatctacaccacacaccacgtgtgagggtgctgtggggcctggcaggtgctacacctgcagggctacccggccgttgtgggatagggagccgtgaacgtgcaaccaagaggaggtgcaggtgcccggaggggaacttcaggcaggttctcagggtaattttttttttttttaaatctctggaggaggaaatgaagatgcaaagaaaggacggtttggcccttctgcagacacataaaaataataaggtgattgcatcatcccttgcctagacttcacctcgctgaaccaaagcaggaggttttagttgtggttaaagtgtgttacatcccacttagcatttcagaacagcatgttcctgccctgagttgagtattttgtccctcgtagctctcacaggagacatactaccaatcttgaaccctgtttggctggctgtagagcaggacccgcttctggttctgaggccagcctggcaggatccccaccaagcagaactgtgtgtcacacctccagggtgggtggagagatagcctcccgctgtgagtgagattgtgaagtggtttctgtgtccctataaaaggcctccacttttaacagttactgctatacgacgcagaggagataggatacacgtttggtccttgagaatatttgcagtctgtacataactgtcaagccagcgtggccatggtagatctgtgacgaccgctcagcttgcttgctgtgctggggggttgtggggggagcacatttgttcctctgatgttcagaggcattacgtcataccggtagggtgcctcttgtgcactgtctccagccgtctcgtgatcgctaagctatgagacccaggctgtttagatgcacatgttctctttgtggcaaatgggaagtgaatgcagtccctgggcagccgttgcctggcctcgaggcagccgtgggcattgaaccagcatggaaatctcagtaaattctctgtctgagggtggagagaggggaaaggcctcatggctgctatactcaacattgtttagacggctgggttaggatcccatagaggcgtggtatagctgtgttgtgggtacccctcagcctcctggatggctcactcagtggtgaggatggaggccggtgcaccatccaggaggacgttggcattgccttctcaggagtcagcacctacagcagagactgccagagtccttcctggtctcacagtccaaaattcagtttcctatgattacttgccttacatgcaaacctgttagaagtttaagactcttcagtgtgggcattgtatgtaaaacacccatccaacggagggtgtgcctattctcggacgcttttgtctctaagaacttgggataggatactgtcagtctataaaaaggacttatttattcatcttttatttatgtgtatgtgcgcatcatgtgtgtgcaggttgttctcaggacagagggcagtggagcccctaaaactagatgtacaggcagttatgagccatctgagggtgcaaagaacccaggtacacaagaagagcagtatatgctcacagccgttgagctgtctttccagcccaacaccaccatttttgccccactaccttgactgccaggaaacaggacttgaggttatgttgccacaggtctcacctctgggtcttcttgatgtgatttgaaatctctctcaacctttacctttagttgtgatgtggttgttactccaagcccccctcgctggggtcagctctctgcatagtgctgtgtcgcgtgcgagctctacacaggaggttggcatttgcgctctactgtagcagaatctgagctgcattgctgagcttactcgcagggtctggtctcgcatcccactccacagatccagtctggaattcccagcctcaatcgttgagaggcagcgctgtgtggactccagagtcgcctctgtccacaatcattgctctccattctgggaatttgagtgtgaggtcctaggtgtcacatgccttctaggtgtgagttggatccagcttacctgtcctggccctgccacctcttgtcctgacacctccagccatttgtagtctggggcaaccacacgggccctgtggggttgctttaaaggcttaaaagcctgaaatttatttttcagctggcagtggcagtgggtgactcttagacacacagtcctaagggcactagaacatcttttcagggggctgcttgtctctgatgccttaaaaaaaaaaaaaaacccttcccacaactgcatcaggataatagatcgcccaagtatctttatgacttagtagttaatgtctccgcagctctacggacctcaagtcgaacatcagtctcggcagcaatggtgtcttcacattccccctctttgacttatttatgctgtgcctctcagtgtttatagtcacaccttaaccccgccccagccagtgagttcatcttagccaccttggtggaggtcctgccccgtagacagccatacctgagaatttggaggactctgtggcccatgtagaggggttgccaggagggagaccttattgtactttcttttctgcttcaagaggttttaatcaggaggagcggtctgtcttgtaccaggcagcataggtgtggtactgagctgtaccccagtccgcagatgcctctgggagtgcctgcgtgtgagttactgatgcagacacgctggacacaggccaaaagatggctctgccaagagctgagggcccagggaaaagaagctgatgccctcactcttgctgtgttttctgttgttgtctctctagttctacataagctgtgagggaccttgcagcacatagatgtcttttcccctgaacagtgacatttaactgatgacacccaccccgcccccactgcagatgatggtcattttgaggcttgacatgtcctggcccaagcacccaggggcctgtacttcctccagcctgccagcctgtcaccaggtgtgtgtgtgtgtgtgtgtgtgtgtgtgcgcgcgcgtgcgcgcgtgcttgctcactggtggttgtgggacgcttggcatgatcctttcaactctcctgctccttaaatcaaaggttaaggttaactgaaggctaagctcagccttgggttcccttgtaggtgtcaaggagcactctctccctcacaccctgatcctgagcattaagccctggcttcctggctttattctgcttcagctttcaactctcctgccacaccacactgctggcaccacagcacacagcagcaccacacaccacagcacacggcagcaccacaccgctggcaccacagcacatgcaccacactgctgacaccacagcacacggcagcaaacaccaggctcagaatgaggtgcacctgcagcagcctcattgccgaatctgatgtaaggtagaaccacccctcctccagctgttttctgttgtgtgggccacatgtgctgggccagaggagcagctccagccaccgtgccagctgtcaagggatttctggactggcactgtgctctgaatcagtactaatggcttcctccattgaatgttgtccaaaagcaattgtttgcttgttagaggctcgtgccgtgctgtcacaccagcccgagagggcggcacttcccccaactctcacccccacccctgctccaaggactgggccttccctttgccaaaatttcctgcattcccatgtcagttgccgcctttgtacatgtcttctcgttaaccttgactgcagtcaccatggtccacctgtcaacctcaaatggttagccagtcactgtctccccagttgttgctagaatttgaagcttatcaagtgtaagcagttgaggcccctcacttgggtgacccattctgggtgtgttgactgtcaccacccagtcagccccagtgcctggttatgcagagggctgcggtgacataggtcggttacaagtcttcccaccttggattgatggtttagtcagtcgtagcacatgctttctttgttttagtgaattgtggttctattttgaataagcctctttcggcctattaatattcgtcctcaccaaaatgaactttccccagagttagtctcacacaaaaggggcaaagtaattttgaaagttaaatcaaaacaaagcaatcttgtgtgtgtggagccgataaaatcgcagcctgtggtcatgggagcacctccacaggaatcgctgacataaggctgatttcctcccatcttgttatggaaggagaaggggaaatgccctggccccttgagcttaagagctgtgtaaacagtggggtgaggagagctcccctcacagctggtgtctgcggggacctatggagtctgagaaggaacagacagtcccagtctgattcatggtcattcccagacagtccttgggaacctttcccaccaaaatgaaaggggggggggggtgtcggaggctgggatagccacacagccaggtcctgtttgtgggttagtcatttaggaaacaactagggcctgcttcagccttgactttgaaccaggttgtggccgatggcattgaggcaaatgtattcctttgcctttcgttgtccaatgagatgagtgagaaccagatgtgagcactctggaactctctgaagggcgctctgaagtcttcacatgaacccgaggtttcgttctaaacagtcttcagattgtaaccaacctacacacgtcacaactaatgactccttcttaactgccctttccttcctgggcctgatgtgggagggtggggttgactcagaccctgtcttccacagtgggcagcccctctgggatcattgtttatcctttgcagccagaggcacatcccttccactttatttagtttctttggggcacattacccccaaatcactgcttcgtcaagtcaatcacagtggccagactccacctctgagagagtcctaacctgtctaaatatcagtgaacgtggctggcagtacagaaacccaagttcattcttttcttttcctctgctccctcccacaccctcagtcacgtctcctgagacaccaatcatcagtgacctggcgtggctcctgtccagtacccatgtgaaggttcacagttccgggatagctttggaatagtttggtcttctgttcgctctgtttccccagtgatggagagttcactcggtacacttgtactccatgatgtcacatccttcccccctggaatttgagtctccctgcaattcagatgggctatgtctcttgccttgcatacgcgccttctccagattacgagagagttgctaagaactctgcttctgttgttgcaggtgtttgcaaatgattaccgcgaggctgaagaccaccctcaaatggttatcttacaactgttacgctttatcttccgtctggtatggagaaggcattgacaggatctacatgcagccaggatacgtggcggacatggctcttgttcagactgggagaacccccacgcgtcatgtccctctcttggtgctgcgacagtgtgtccagtggttctatcccagagagatgtgctgagcatggacagcgctctgcactgtgtcgatgtgaacggaacctctgttcatcaccacatggccgagttttcagtaaatatttgttgtgaatgtaaacaagggagggcttttctctttttaatgtacagatcctaggaacagagaaatatgcaagagaggtgtttacatgtggcgtgttaatttttttaaacccactttctttgataactgtttttggggttttttttttttgtctcattttctttcagaaagtaaagctttttagccaatttatggatgatttttatactcaaattcttaacccactacctactcagaggattccataaccctgcagtgggaactgagccagctgatttataaggctgccttagtttatttttagaaattactgtacagaattttttaaacaggaagagtatggtgttgccctctctcctctgccatggcctctttgagtttccttttgagttattactaccaaaacagttcttaggaaatggaatgagttcgagcggcagaggttctgttctggtacgccacttccactttgtaaatatttacctccttagctcagttgctcctgtagcagaaattcacacttttcctgcttccctcaactcctcagacccctcggtctgtctccacacggatgcgcagcttcagcccagggtatcttcaagtgtattgtgtcagcaagggctaggggctgcccggattgtgcccagctccatcaatcaagctgactcacgggaagggctctcgtgcgcttcactgcactgcggtggctgtgtttgcctcttttatcctgagaggacgtgggctcacacaccgcttgctgaagccgctagctccactggttgctggctttgctgccgccacaggctctgctttgctgtgtgtatcaggtgagctggagcccacgctttctcggggactggccaggtcatttcaggagcaaggagctcaggtgatccttttccatgcttcttgggatgtagccctgctcaccccacctggcctgtgattcctgaatttcatctctattcccttgagttaggggctggctctacttccatcagttcccagacataggaagcttccattatgccgagtaaagcacttgtcttccacaagatgtctgcctgctttgctctctccattttcttaatacttggatcttgttgggcttacttgtgtctggggtgggggtgaggtgctctttcttggtccctgccccttaggaccacagcccagacatttggtcagttatttcaagaccaggcaggactggaagtgcacagcctggtggaggagcactttctaacctgtggagagctgtggcccagctccagctcctcccaaaacaaacggcacacgtgtaggcagacagccaggggagatacaaaaaaggaccaagaggaaagagcatgggaggagtggggatggcaagccctctcacttctgagaacttcagacgtcaggcagcttgctcaggaagctttatgagtttcctcgcaagtcagcagtgccaacgactgtttgcttttggcctgtagaaagccagtggtttttcttatgttatgaagtagagaaatccgtttgttcatactttcctctgtgtgtgtgtgcatgtgtgtgtgtgtgtgcatatgcgtggttgtgtgtgtttatatgtatatgtatattacctataagcttccttctagattgagatcatctgattccaaatatccttatacatttcccagcttcgttagatttggtgtggtttgaaagctgttttggcattctcctcctttcctgatgtattgagcctgctcatggttcccatgaggccctgtggttattataagttggtgttaaaactgcaaccatggctctcacacacacacacacacacacacacacacaccaaagacatacttggtcctgggccatgcccccctcctaggacctccattctcatgtgccagtctccccgactggagcactttactgtctcagccccatggctctgtggcagtgcctgagcaggtgcagaagctccagagccaggtcccagtgacatgtgtggcccccaacgcatgcttacctccagcctggggctggccgctgaagcagctcatagggaaataagagattctatgaattgtagaagtattcaagaacaggatgcggcacccagaacgtaaacatgactggatgtccctgtactgtatctgtttgttagagtgcaaacgtcgcctgcagacagacagtgcccctgcttactgtgggtaggcctttgtacttaaatatattctctctcgtttttggtaggacagaaactagatctccctccccctcgtgtgtgtgtgtgtgtgtgtgtgtgtgtgtgtgtgtgtgtgtgtgtgtgtaaacataatgcgggttttgtgccttgacaacctccccatgtgaggtttgtaaatagtgtcctgtgacttcacctcaagttgtaataaacatacaaaatggtgtcctgagtgattcttcaaatttcttttccagaaaagaattgatgaattgggggaaggggcaggggtctgaaaaatcagtttaaagtctctctattaaagtatgtaatgggtaatgtctgcttctcctatttccttccagtgttgtatatattttgactatttattagattagaaagtcatgtttcactcgtcaactgagccaaatgtctctgtgcaattgtgttccctttacctttctttgtaaaatattgtacagcataaatgagtaaaaaaaaaaaaatcactgtttttccaaacttctcataattaaggatttgtaaataccataggttcttcttctgtgtaatgtgccctactgtttcataatgctgtaacttgtagagatgttgtatatttattttccgcttatttaaatgtcttaagttcttgaaagtgttgacatccctatccctgacagccctgccatgccatgaattgcttcagctcctgataaaggaggggtagtggctggttctcttcccacaaggcggcttctgctttggcttctggcattcagtgcttgggttctgccgcctttctgatgaaatgagtgttttgctgccggtgagataccctaagatgctagcctggaagattggactctaagaaaatacccatcaaacccatttttgaagcagctggcttctgagaaaaatcagactcaccagtaagttggccacatctttagagaagtattagcagcagatggggaagaatttttttttccttaaattgaaagagtatctttgacaactcagtgttgagagaaatattatcctgctgcctcttgaggtactgctgaatggctgtcctgggtaagagaagggctggtgggacctgtttctagagcatttgccaaggccacttgtgtcaccaggacactcgctggctaccgtccccacctgctgtgtgcttcctagtttgaggtctgtggactgaacttacctataccattcggctcccttcccgttcactgctttaggccagcccactcctgcttccctctacagaggttctggcacccacgtcaagatggctcactgaagctctagagccatgtgacttcatggaaatggttttgtcttcctgctgattcagcctggtgcctgtgtgtgtccatccgctcagcacgtctgcatgcgggtcctgtccacacgtgtcgctaaatcggcggggaattgcctctcaaacagcgttgcacaaagcaccctcaagttcccagcaaagtacttgatctctttcaaatgtgtgttattgtctaggttctgtgaccactggtttctgtacccagacctgtcaggtatcctttagtgaacagcactgatctctgtatagtccccatcactaatgtcagaacccagcgtatgtagcatttgtattgcagtttccctggcttcctttacgttttgcactgatgaattttgacagggtaattgccactgtacctgtgcaatactgctgtaaataactgcagatttttttaagaaactcaatcttttatgttcttaatgaattttatataaataaaacttgcgactagctttcatgaactgttcgatgtgtgttcttataattggccgacaactgagggtgcatgtagatacaccccctccctgatttcagtcagaacacattgacttcatggagagtttgtaactccttgcttggtaatgagtgtgtagtatatatggttagaagctaaccatgatggacagttttgaagcaatgacaaagcatcccgcccacagaatccgccgtgactcagaacttgggtggaaaggtgttgggaggtagagaggtcgggagaggactgttctctggtcagcttacaggaggactgctcatctctgggtgtagactaagttaaaagtggcgagcccctgagacactgttgaggggaacaagctgtaagggtcacatgaatgatttggctgttgggatctgaaacagttttaaaccaggcatgtattcacactgttaattaattaggggctttgtaaaactcaacaacttgttgcaaaggagttgtttgggctgccacccccagtcctcatctgggtagacacctacatttttccagagtccttttcttgccatgtgggtgcacacatgcccacctaggcgtttttgcataaatgctctaactacatcctttacctagcaacaggtcatagatctttctaaaatggttccgcttcaccctggctactgcatctgacactgagacaatactctggcctggctcgccgacagctgccaccagaatgctcactcaccttctgaggaagctctgttattggcatgctcgcacttgcctggcgtgggaggagacactggccctcctgatttaaatgagacctgttcacagctcccatgacaccgggccctattggcactgtcatgttgtttgaagacagtgggcttatttttagcaacttgtttcacattttcctatcaatgatcaacttgttatgcataatgatccttcagcctgttgcttcttttcttcttacattctattgtgaaaatgttcacgtacatgagaaagtccactgtactcagcagcatccacacgacttcctggctcttacgctgaatgttattctacgacaacgacatgccagcatctactgagaggttgggttttttttttttttttgcatatttcaaagttagagtcaccagtaaactccttcctaaattcaacatacttgccattcgttgtttttttttttaattatcattaaagataatttttacatacaataaagcacagatttggggctgaggagttggtagaacggttaagagtgcttcctgttcttgcagaggacccagatttgttccccagcacccatggccagtggattacaatcatctataaatctatttacaagggatcaatgcccttttctggcctcagatctcctccccacagaaacatatatgtaaacatgaataaaaataaacattaagaaaaaaatatgtattcagcatgcgtttgttaaggttcaactgagggaacaactgtcacccatggaccgacacttgagaaagttccttcccaggccatgctgtcctccccaacccacccctgctgccccgaggagaggcctctgctggttttttccactgtaagttacttctgcctacttcccaccttcatatgagtggaatagtccgtgtctggttcctttcggtcaaggcaagttccagagttgtgttacaaggcctagcgatcagtagttgtctaatggacacctgaaccttttgacctttggaaatgacaatgagcaaaagtttctgtgacttttcatacaaagtgtcagttaccaaccaagaagccagatttcagtctctcacgttgatttctgtgttttgtccctgcttgtgacaatctctttatgtcaaggttttaaatatactttattcacataaccccacagtttgctttttcttcttaacccacctagagttgctttttagtgacacacagtatgactgtttctacaccccatacattgtctgcctatcctggagtggcctctcacatggtgttctgtttctctactcttctctctcctctctccctccaacctttttattcatgttattagttttttgttttccgtgttcttccccaccaccaccactacccacaccttctgttctgtgtttgagtctacattaactcaggagcaagttgccatttcacctatatggttcccactgcttttgtctgcatttctttagatgtagttccctacccagtttccaagtctggaatcaacgtagctgaatgtgagggtcatgaaaatttgacaacagtaaaaggtttctggatgctcaatggtcaaaaatgaattcgaaatgagacacatgaggaatcaggggtaccctggccccgctcagctttgttgggtcttgcgattttcctgcagccttggattgcacatcagtatgtcatgctccactgagtcaaagtcagtcccacctgagcaaatgctacctcagctcatatccaacagtcctgccagctatggatggaactcttactgcacttggtaattttgcttgtcatggctttatcacaaaaaataaagtttaatatatttttttaaccttcattccttaacatgaagctattgcgagtgtatcattggaaaggatcctgttagaatgtttggttggaaaaatggccattcacgctctcttttcatggcacctcttaggctgtcagccatgtgaagatggagtttcgcagttgtcagaagcccactgaagtaggcgatgaatgcagacattgtactttctatgagaagcccatggccacagaagtatctgctggccgatgctctgggtggagagtggaagggtaatgtggttgggatctgtgatgggagcaacaaacaaggtttccccaggatgcagggtgtcctaacccgggcagagtgtgcctgctgttgggtaaagggcattcttgttctagaccaagggaaactggagataggaaacacaagtctgttctgggatgcactgtgaatgccaatcagtgtgctcagcttggttattatttaaaaaaaaaaaaaaaaaaaaaaaagaggaggaggaggaagaactcctggactgacagacactactatgcctctgcacttgacccaaaagagcttgcagaatctgaaagtttttgagtctaagaagacgatgcctgccgatatgttgttagaaagccttaaaaataagaaggtcagaagcccgggaccaaagcacccaaaagattcagtctcgtgttacttcctgtgtcctgcagcacacacactgacatgttgctctgaagaaacaacacactgagagaagtgatagggaaggctgcagaacatgctaaagcagtaacaaataaataaccagacattgaaaaagcagaggcggggggtgggggggcgggaatcgctgtttgtgttgctgacttgagtcccacaccatgtgcgtgcctacacacatgcgcaagtgaattttggcctaggattggggcagaatttccaacaatttctaaaatggccctaaataaacttctgccattttgtactatgtatttattcaaggcagtatcctcagtggagcactgatgattgtaaaatcaaaatatccgtcaactgaaaaataccgaagatgttctgtaacctgcaggattggctcttgagccgtggtttaattcctggtgcaaaatcaaaggagcacttctcttaggagcatttttttgtttttgtttttaatagccaggctgtggtggccctcagaaggcagaggcgggtggatctctgaatttgagcctaacctagtctacagagagagttccaggacagccagagaaaccatgtctcaaaaaaagacaaataaaaaacttaaatgcatcaaaggttgttttacgtttctatgatttattgccaataaatgatttgtgcatgtatattatatacttgtacaccctgggttgtgtaaatgtttctccgacatcaaatgatcacaaatggaaaagatttaaggagcgttggctgattccatacacttggattttcttcctttaacacctccaagtgtcttggcttatttgaagggtgggatatgcatcgtctggcatccagccccatacagctctctttatgtgcctggtacccagtgtggcttctgcctgtgaacgtctcccctgcccacggtgcagctgaggacaggctcagagccaattcaacgctctttcccagcactttgcatctgggacaagtacagtctggaggacagcaaccaaaaggctgccagaggcctgctgccccctacttggctaagatgctccgctacaccgccatcagcaacagtttcctcttggtctgtggggcaggtgcccgcccctccagcgagttctctttgtgctcaattagctgaagttggcctctgttgttggcaactgaactgctgactcattcctacctgtcaggaaggctgaataaaagggttgcaagaagttctctacaaacagtatgaattcagagggtgtgggggcaacaagctgagggtaaaaatgccctgtggggcaagaccaaccaggacagagctgctaggagttgcaaggtatgacaagggtgtctaatctctggttaacttacacttggcctttgtctcctgccaactcttttctgaagcaagcctgaaattctcattcgtatcgccacggcgaagctgtttcaactgtcacaggccgctgctctcccacaccttatcacttcattacaggtcctgctgaaagagcctgggaagctaggtttccataactgcttggcttcacctcctaatagcaagcttggggtgaattaactcttctaataacctctttctcatgtctaaagagcaaacttgggtcagtggctttggaaagtacactaaaaagctggagagacagctcaggaagtaaaggtgcttgctgtcaagactgatgacccgaattcaagccatggtagaaggagaggactccacaagttgtcctctgacctccatatatacaccatgacatgcatgcaagcaatcacacacacacatacactgcaataattttaaaatatattagacatcaattttaaaaactaatttagatggccattttccttaaacaattatttaagttttaaggccctatcacgtgtctagcacagaaaagaatggtaagggtttaaaactaggacatgccaggaagggtgaggaaggaccacaggaaaagtcaaaggtgggatttccaggtgggaggctgctttctgagtatggttggtctaaggctctatggggtgtctttcctcttccatcctgggcccccagagcttgctataacgacccccataatggcctccaatctttggatacctcttacctgtgagacaagcctcgaagcatcttattttcacctcagaatgaacagtcctttcacgtaactaccaccagataggcagactgagttacacagtctaggccctgtcacagaggtccctgagctggtccatggcagagccaggatgaaccgaggcgcgtggccctgcctgagcacgcacgtgtggtcacttccctttcttttctggtgcaatagagctggaccgggaggatgaggcagccagggtcggcctccagcccggtgcctgaagaaagccttctgtagagtagttccagccattatggggacttctaagtctggagtttgatacaaactcatcctgagggaacccatctgtgggtttaagtgtcaccaagagtgcttcagccgcacctaagcggctcaccttgcagacttcctgttcgatccttcctgtctactctctacatttcctgtttagttctgtactttctaatactgatcttcccacctagtctgaagtcctgccgactttcagcttgtcccaataattctgtctgtaggaaggtgtggttcggctgattcaacacaggctttccaccatcgagaataacttcccacgtaacttgttctatttaaagtcattaaagagccaggcatggtggcgcacgcctttaatcccagcacttgggaggcagaggcaggcagatttctgagttcgaggccagcctggtctacaaagtgagtttcaggacagccaaggctacacagagaaaccctgtctcgaaaaacctaaataaataaataaataaaaagtcattgaaggcatcagaatgccagggtaatggagaaacaggttcagaagaacctggatatggtcttcccaggtaaggtgggggaagtcttatttccaattcaatgggaaccaaatccatcttttatgtctgctcttccaaatgcttttgctttagacctagaacagagaagtatttggaacccagagattccccaggacgcagcatctctacagcacctggcagacaggcttggagcactgaggccacagccctggttgacagagtggtcccttttttgcttgtcttacatgtccctgaatcctgaaggagagtgaattgggcatggtgggaggctaacgtgtcctactcaagtgtgaacgtgaagagcctcacagccggatgtgaacacccccagggattccaacaggccatgcccagccactgctgctcatcgggagacatgcactgtccagttttcttgtctgtacagaaaatgagttatggtccgagtgggtatagtgcagggtccaggtttggctcgctcaagagctttgaaacttggttctccagacaagggttcatctccacagcaaaggcagaaccttcccgatgtgggtgagaacagctcatcctgcctgcccatgacctggttcaccccaagctgacagtcccattggagataatactttcatcctgggttttccaggatgccagggctgcccaaggcccttgtgacagaagaggggtcagtttagcccctagtagattccaataagttgcttttttggtgtctctcaaccctgacctcatgtcaatgtttccttcttcctgctaagaagcctgacgcccaaagcctgagatgtaggagctctgtcagatcttctttaaaagtaagccaattctattgccttcagatctggggactatccaaaggaaagcatgaaccaaggtcattgagtgaccttttgaaaaggacattggagtgggggtggggtgggcagaagtttgtttttcctctgtcagttcctgccaagtattgattccgtctaggtgaaggtgaaagggttctcttgtctctaatccagacatctgaaaagacttctgtttaatcgtgcatctattcatcctacaaatgttggttgagtgcctatcacctggcaggcgcacactaattcaagcacccaggaatcactacggacaagacgcttgcacggtaggagcttatcttcagtaggttgtaagacaacaaacaggtgaacgagtgaactctctctccagcgtctggtgaatgtgtgaaaaagcaagcaaggcccagtgtggtggcacggctctgcagaggggtttcagccagcacagcctgtcctccatgaccccagaatgagcaagaagcagccagaggagtgtagtccaaaccgacagattatagacatggtaatcgggggcaagcagaaggcaagctggtacggctggaacaaacgggaaatggtgcaggcataggcgtgagaagcagactggctgaaggccaggagaacgtgtccaaaactgagttagctccgactttggtgggtaggggaaggcttttgtcaaagagtcccagcagcggcaagggattgtttagggagatcccttccaactccagattacacgagaatgagcttccgtatgactgaaagccagccatgacctagggtgttctgctgcttattaacaggacatatgggagacaaatggtaaagacatacaaataaaaaagtctgataatatcgatgtatcattcagagactgttagtgctgggggttgaatgtgtctcccagaagttgaggtgttggaaacttccctgagtcatatgatgctgtattttgtactggagcctttgtggggggcgggggggggtaggattatgtgggtcacatgggtagtaaatacattgattacttttctatactatgataaataccatgaccaaaagcaacttgtagaagactttgtgtatggcttgcagtcccagagaagagtggggggatgcttggggtcgagtggctggagcagatcacgtcttcaaccacaaataggaaacagagagagctcactggaaatggggtaaggctagacaccctcaaaacctgtcccctcctcttgtgacatacttcctccagtaaggctccacctcctgaaggttccacaaccttccttaacagcaccaccaaacaagaaccaagtgctcatataccggaacctatgggagccatttctcattcaaaccaccacaggggaagactcatataacttcattaataactttgtagcatgaacccctagctagcatgcttattctgtgtcaacatgtgatttctaccaagttatgattcaggaagaacactctagccagatcttaggcacatatggtaccaagctcttgaacttcccagtctatagaaccaccagccaaataaactcttctttgtaaactacccagccttgggtgttttgttacagcaacagaaaataagccaatgagatctttatttttagacgtgcatttaagtatttagagatgaggaaacaccatatctcaaatgttcaagggggggaaatgtgcttacaggtgtctcaggagtgggttggtgtttggtgtgagggaggacaaaggaaaaaggaaatataaccaagtggtataatgatacctgaggggtctgagtgaaggctctgagtacaaatcttctccacttgttttgcacttttctctgaaatactcaaggataaaaagcaaaaccctgccaatttacttcaaaggaaaaatgtggggagtgtagactgaagctttatgtatttaggcatgcattacagtgagacactctcataaaccaaatgccccaaaacagaaacttatatgtgtgtgttccagtccacattggtgcacacatgtatatgcacgtgtatggaggccagaggccaatatcaggtgtcttcctcagtcactccccacctcattttagagtctcttgtacatcattgctctaattcagctggacttgctggctagcaagtctctgaaatcttcacatctctacctcccctgggctgggctcgcttgtatatactgctgtatggatatactggcttcttatgtggttgctagggaacccagactcagatcctcacatttgtatggtaagcatttgactgactgagcaacaccccccaacacacccccccgagaagatttgctgttgctgttattgttattgttgttatcacagacagttgctgttattgttgttgttgttgttatcatagacagatgatggacccaatggtcaatcttcacccccatatggagcagctgttacacacaggccagatggtaaaaaaatggggcatcctccagcccaggggtttttgtttgtttcttttgatatataaaataccaggggtaggagcccatctctccaaatctcccagaggctctactatgaaagtgactgcaaggtgtgtctggtccccatagcctctggatcagagagcttcccccaaattctcatggatgactctagaatctggggagcactccagcgctgtagttggatcaaatgaaaacacgcagggtaaacatactgaaggacaggtgcttgctgtttgtttaaattggttgtagttgcaaaatgttcaattctcatctctacttccctctgccaatttgccctggcccaggcactcatgatgcctgccaaaggcagggtgagtgggaggagagagtaggctggagggcccagggccaaggccatggagggagcaggtgaggcagctccaatctgcgtgcccagggagagcccagtcatcaggtgagtcagagcctgctgttgacaaacctaaagggccaggtgaggtcagagagaaggaggagccgtgagtgtgccctgggaggcagaagagatggactttcacggctaacccgtatcagtgatagcatggaccactgtgggcttgatatcccgctcagtggggtttgatgcctcagaggatcttggcacaaggcaggcatcatcgcctccttaggaacaaagcctggaggatgtgcagaaggttctaagactcccttgcagctatgcagagaaagaggaaagtggtcctttgcactgaggtccaacccaccaacactggccccagtagtagaaaaactctttaagaaggggatttccagctatcagtatctcaaaggctcatccagagatggctttttgtgacagctaactattccagaccagactttctcctacccacccatgtggggctgggctcagcccaggtgcccctcaggccatttagattgccccaggctgatctcctgttgacttgtaggtacatgtaccttgctagttatatttgaagttgtcctctgggctgaggctcagccctctgacttggtaggacctgaggggaccagttgagttgtaggtacttgtagcaccatctgctaggggactgggaggcatttccatgcctggttaggactctgaggtaaatcttcctcatgtaagccggatcccctcttggcctcttgaccttcacctttttgtaaaaaaaaaaaaaaaaaaaaagtgcatggccagtaggatccccaggacataaaggtgctgtgcctatcccaaggacctgagatcaatggggaaaggagaaaaccgactctcacaagtggttctccgactgccacatctgtgcctgctatggaatgcttgcacgtgtgtacacacaacgaaatgtaaccattttgtttttaaggagaacactgggcccattcaaatgaacagcctctgggccctgccaccactgtgtgtcctctgaagtccctgtgagagtctctcctcagaattccacagaggcaggatttgatgtggggactccccagaaagacgggttggtaatcgttcacacacaacctctcctttcagacaggtcgctatcagaacctggtggccactgtaaagcagcagtgtccatgtgtcatccgaaaatgacacttgggcaaaataaatcccagtaagcagggctctttcctggaacacgccacagactgcttctcagaatgcccagttcactcctacgggtgcccttgctctctcagggaacctcctcccagacagccagaggaggattcattttccagccttccctgaccaccactcagtgctaccttcaaactgcatcctctggcctgcaggccttctgcacacggtgagcttgcagtgactggggactgtcaaggaggatcaggcccagggttctagtgctctgggagactggggctgtgtgagccccactctttgtatctccagtacttttgaggacagcagaattcttcgttcagggaaagaccatggctgctccatcacagacacgatgagcaaacacaacattggaagggaaagagagcgtccttcccagttccctccaggcctctagtactattcttggtgggactgtctgctgcggggcctttctcagcacagccctgggcaatgggatagagaagcactgagacccatgtttctttgaactctctttcacaggaaatttggcttcaaattcttgtacaccagaaggccaaggcagccttgggacaggcacactatgtctcttatctgatgatgtctggacagaggcctctggaagctcttctcggagcatcaaaaagaggcagctggtgacctcatgggtcacgactttattccctccacttgatttcaaaacatgggactgaccttcctagttcctgtcggggcttttaagttcagacatgcagacagacagacagacagacagacgagatgtgagggagtacacttgttgctcctgtgacta

SEQ ID NO: 4 - DNA, 60510 bp, Mus musculus
tagtcacaggagcaacaagtgtactccctcacatctcgtctgtctgtctgtctgtctgtctgcatgtctgaacttaaaagccccgacaggaactaggaaggtcagtcccatgttttgaaatcaagtggagggaataaagtcgtgacccatgaggtcaccagctgcctctttttgatgctccgagaagagcttccagaggcctctgtccagacatcatcagataagagacatagtgtgcctgtcccaaggctgccttggccttctggtgtacaagaatttgaagccaaatttcctgtgaaagagagttcaaagaaacatgggtctcagtgcttctctatcccattgcccagggctgtgctgagaaaggccccgcagcagacagtcccaccaagaatagtactagaggcctggagggaactgggaaggacgctctctttcccttccaatgttgtgtttgctcatcgtgtctgtgatggagcagccatggtctttccctgaacgaagaattctgctgtcctcaaaagtactggagatacaaagagtggggctcacacagccccagtctcccagagcactagaaccctgggcctgatcctccttgacagtccccagtcactgcaagctcaccgtgtgcagaaggcctgcaggccagaggatgcagtttgaaggtagcactgagtggtggtcagggaaggctggaaaatgaatcctcctctggctgtctgggaggaggttccctgagagagcaagggcacccgtaggagtgaactgggcattctgagaagcagtctgtggcgtgttccaggaaagagccctgcttactgggatttattttgcccaagtgtcattttcggatgacacatggacactgctgctttacagtggccaccaggttctgatagcgacctgtctgaaaggagaggttgtgtgtgaacgattaccaacccgtctttctggggagtccccacatcaaatcctgcctctgtggaattctgaggagagactctcacagggacttcagaggacacacagtggtggcagggcccagaggctgttcatttgaatgggcccagtgttctccttaaaaacaaaatggttacatttcgttgtgtgtacacacgtgcaagcattccatagcaggcacagatgtggcagtcggagaaccacttgtgagagtcggttttctcctttccccattgatctcaggtccttgggataggcacagcacctttatgtcctggggatcctactggccatgcactttttttttttttttttttttacaaaaaggtgaaggtcaagaggccaagaggggatccggcttacatgaggaagatttacctcagagtcctaaccaggcatggaaatgcctcccagtcccctagcagatggtgctacaagtacctacaactcaactggtcccctcaggtcctaccaagtcagagggctgagcctcagcccagaggacaacttcaaatataactagcaaggtacatgtacctacaagtcaacaggagatcagcctggggcaatctaaatggcctgaggggcacctgggctgagcccagccccacatgggtgggtaggagaaagtctggtctggaatagttagctgtcacaaaaagccatctctggatgagcctttgagatactgatagctggaaatccccttcttaaagagtttttctactactggggccagtgttggtgggttggacctcagtgcaaaggaccactttcctctttctctgcatagctgcaagggagtcttagaaccttctgcacatcctccaggctttgttcctaaggaggcgatgatgcctgccttgtgccaagatcctctgaggcatcaaaccccactgagcgggatatcaagcccacagtggtccatgctatcactgatacgggttagccgtgaaagtccatctcttctgcctcccagggcacactcacggctcctccttctctctgacctcacctggccctttaggtttgtcaacagcaggctctgactcacctgatgactgggctctccctgggcacgcagattggagctgcctcacctgctccctccatggccttggccctgggccctccagcctactctctcctcccactcaccctgcctttggcaggcatcatgagtgcctgggccagggcaaattggcagagggaagtagagatgagaattgaacattttgcaactacaaccaatttaaacaaacagcaagcacctgtccttcagtatgtttaccctgcgtgttttcatttgatccaactacagcgctggagtgctccccagattctagagtcatccatgagaatttgggggaagctctctgatccagaggctatggggaccagacacaccttgcagtcactttcatagtagagcctctgggagatttggagagatgggctcctacccctggtattttatatatcaaaagaaacaaacaaaaacccctgggctggaggatgccccatttttttaccatctggcctgtgtgtaacagctgctccatatgggggtgaagattgaccattgggtccatcatctgtctatgataacaacaacaacaacaataacagcaactgtctgtgataacaacaataacaataacagcaacagcaaatcttctcgggggggtgtgttggggggtgttgctcagtcagtcaaatgcttaccatacaaatgtgaggatctgagtctgggttccctagcaaccacataagaagccagtatatccatacagcagtatatacaagcgagcccagcccaggggaggtagagatgtgaagatttcagagacttgctagccagcaagtccagctgaattagagcaatgatgtacaagagactctaaaatgaggtggggagtgactgaggaagacacctgatattggcctctggcctccatacacgtgcatatacatgtgtgcaccaatgtggactggaacacacacatataagtttctgttttggggcatttggtttatgagagtgtctcactgtaatgcatgcctaaatacataaagcttcagtctacactccccacatttttcctttgaagtaaattggcagggttttgctttttatccttgagtatttcagagaaaagtgcaaaacaagtggagaagatttgtactcagagccttcactcagacccctcaggtatcattataccacttggttatatttcctttttcctttgtcctccctcacaccaaacaccaacccactcctgagacacctgtaagcacatttcccccccttgaacatttgagatatggtgtttcctcatctctaaatacttaaatgcacgtctaaaaataaagatctcattggcttattttctgttgctgtaacaaaacacccaaggctgggtagtttacaaagaagagtttatttggctggtggttctatagactgggaagttcaagagcttggtaccatatgtgcctaagatctggctagagtgttcttcctgaatcataacttggtagaaatcacatgttgacacagaataagcatgctagctaggggttcatgctacaaagttattaatgaagttatatgagtcttcccctgtggtggtttgaatgagaaatggctcccataggttccggtatatgagcacttggttcttgtttggtggtgctgttaaggaaggttgtggaaccttcaggaggtggagccttactggaggaagtatgtcacaagaggaggggacaggttttgagggtgtctagccttaccccatttccagtgagctctctctgtttcctatttgtggttgaagacgtgatctgctccagccactcgaccccaagcatccccccactcttctctgggactgcaagccatacacaaagtcttctacaagttgcttttggtcatggtatttatcatagtatagaaaagtaatcaatgtatttactacccatgtgacccacataatcctacccccccccgccccccacaaaggctccagtacaaaatacagcatcatatgactcagggaagtttccaacacctcaacttctgggagacacattcaacccccagcactaacagtctctgaatgatacatcgatattatcagacttttttatttgtatgtctttaccatttgtctcccatatgtcctgttaataagcagcagaacaccctaggtcatggctggctttcagtcatacggaagctcattctcgtgtaatctggagttggaagggatctccctaaacaatcccttgccgctgctgggactctttgacaaaagccttcccctacccaccaaagtcggagctaactcagttttggacacgttctcctggccttcagccagtctgcttctcacgcctatgcctgcaccatttcccgtttgttccagccgtaccagcttgccttctgcttgcccccgattaccatgtctataatctgtcggtttggactacactcctctggctgcttcttgctcattctggggtcatggaggacaggctgtgctggctgaaacccctctgcagagccgtgccaccacactgggccttgcttgctttttcacacattcaccagacgctggagagagagttcactcgttcacctgtttgttgtcttacaacctactgaagataagctcctaccgtgcaagcgtcttgtccgtagtgattcctgggtgcttgaattagtgtgcgcctgccaggtgataggcactcaaccaacatttgtaggatgaatagatgcacgattaaacagaagtcttttcagatgtctggattagagacaagagaaccctttcaccttcacctagacggaatcaatacttggcaggaactgacagaggaaaaacaaacttctgcccaccccacccccactccaatgtccttttcaaaaggtcactcaatgaccttggttcatgctttcctttggatagtccccagatctgaaggcaatagaattggcttacttttaaagaagatctgacagagctcctacatctcaggctttgggcgtcaggcttcttagcaggaagaaggaaacattgacatgaggtcagggttgagagacaccaaaaaagcaacttattggaatctactaggggctaaactgacccctcttctgtcacaagggccttgggcagccctggcatcctggaaaacccaggatgaaagtattatctccaatgggactgtcagcttggggtgaaccaggtcatgggcaggcaggatgagctgttctcacccacatcgggaaggttctgcctttgctgtggagatgaacccttgtctggagaaccaagtttcaaagctcttgagcgagccaaacctggaccctgcactatacccactcggaccataactcattttctgtacagacaagaaaactggacagtgcatgtctcccgatgagcagcagtggctgggcatggcctgttggaatccctgggggtgttcacatccggctgtgaggctcttcacgttcacacttgagtaggacacgttagcctcccaccatgcccaattcactctccttcaggattcagggacatgtaagacaagcaaaaaagggaccactctgtcaaccagggctgtggcctcagtgctccaagcctgtctgccaggtgctgtagagatgctgcgtcctggggaatctctgggttccaaatacttctctgttctaggtctaaagcaaaagcatttggaagagcagacataaaagatggatttggttcccattgaattggaaataagacttcccccaccttacctgggaagaccatatccaggttcttctgaacctgtttctccattaccctggcattctgatgccttcaatgactttttatttatttatttatttaggtttttcgagacagggtttctctgtgtagccttggctgtcctgaaactcactttgtagaccaggctggcctcgaactcagaaatctgcctgcctctgcctcccaagtgctgggattaaaggcgtgcgccaccatgcctggctctttaatgactttaaatagaacaagttacgtgggaagttattctcgatggtggaaagcctgtgttgaatcagccgaaccacaccttcctacagacagaattattgggacaagctgaaagtcggcaggacttcagactaggtgggaagatcagtattagaaagtacagaactaaacaggaaatgtagagagtagacaggaaggatcgaacaggaagtctgcaaggtgagccgcttaggtgcggctgaagcactcttggtgacacttaaacccacagatgggttccctcaggatgagtttgtatcaaactccagacttagaagtccccataatggctggaactactctacagaaggctttcttcaggcaccgggctggaggccgaccctggctgcctcatcctcccggtccagctctattgcaccagaaaagaaagggaagtgaccacacgtgcgtgctcaggcagggccacgcgcctcggttcatcctggctctgccatggaccagctcagggacctctgtgacagggcctagactgtgtaactcagtctgcctatctggtggtagttacgtgaaaggactgttcattctgaggtgaaaataagatgcttcgaggcttgtctcacaggtaagaggtatccaaagattggaggccattatgggggtcgttatagcaagctctgggggcccaggatggaagaggaaagacaccccatagagccttagaccaaccatactcagaaagcagcctcccacctggaaatcccacctttgacttttcctgtggtccttcctcacccttcctggcatgtcctagttttaaacccttaccattcttttctgtgctagacacgtgatagggccttaaaacttaaataattgtttaaggaaaatggccatctaaattagtttttaaaattgatgtctaatatattttaaaattattgcagtgtatgtgtgtgtgtgattgcttgcatgcatgtcatggtgtatatatggaggtcagaggacaacttgtggagtcctctccttctaccatggcttgaattcgggtcatcagtcttgacagcaagcacctttacttcctgagctgtctctccagctttttagtgtactttccaaagccactgacccaagtttgctctttagacatgagaaagaggttattagaagagttaattcaccccaagcttgctattaggaggtgaagccaagcagttatggaaacctagcttcccaggctctttcagcaggacctgtaatgaagtgataaggtgtgggagagcagcggcctgtgacagttgaaacagcttcgccgtggcgatacgaatgagaatttcaggcttgcttcagaaaagagttggcaggagacaaaggccaagtgtaagttaaccagagattagacacccttgtcataccttgcaactcctagcagctctgtcctggttggtcttgccccacagggcatttttaccctcagcttgttgcccccacaccctctgaattcatactgtttgtagagaacttcttgcaacccttttattcagccttcctgacaggtaggaatgagtcagcagttcagttgccaacaacagaggccaacttcagctaattgagcacaaagagaactcgctggaggggcgggcacctgccccacagaccaagaggaaactgttgctgatggcggtgtagcggagcatcttagccaagtagggggcagcaggcctctggcagccttttggttgctgtcctccagactgtacttgtcccagatgcaaagtgctgggaaagagcgttgaattggctctgagcctgtcctcagctgcaccgtgggcaggggagacgttcacaggcagaagccacactgggtaccaggcacataaagagagctgtatggggctggatgccagacgatgcatatcccacccttcaaataagccaagacacttggaggtgttaaaggaagaaaatccaagtgtatggaatcagccaacgctccttaaatcttttccatttgtgatcatttgatgtcggagaaacatttacacaacccagggtgtacaagtatataatatacatgcacaaatcatttattggcaataaatcatagaaacgtaaaacaacctttgatgcatttaagttttttatttgtctttttttgagacatggtttctctggctgtcctggaactctctctgtagactaggttaggctcaaattcagagatccacccgcctctgccttctgagggccaccacagcctggctattaaaaacaaaaacaaaaaaatgctcctaagagaagtgctcctttgattttgcaccaggaattaaaccacggctcaagagccaatcctgcaggttacagaacatcttcggtatttttcagttgacggatattttgattttacaatcatcagtgctccactgaggatactgccttgaataaatacatagtacaaaatggcagaagtttatttagggccattttagaaattgttggaaattctgccccaatcctaggccaaaattcacttgcgcatgtgtgtaggcacgcacatggtgtgggactcaagtcagcaacacaaacagcgattcccgcccccccaccccccgcctctgctttttcaatgtctggttatttatttgttactgctttagcatgttctgcagccttccctatcacttctctcagtgtgttgtttcttcagagcaacatgtcagtgtgtgtgctgcaggacacaggaagtaacacgagactgaatcttttgggtgctttggtcccgggcttctgaccttcttatttttaaggctttctaacaacatatcggcaggcatcgtcttcttagactcaaaaactttcagattctgcaagctcttttgggtcaagtgcagaggcatagtagtgtctgtcagtccaggagttcttcctcctcctcctcttttttttttttttttttttttttaaataataaccaagctgagcacactgattggcattcacagtgcatcccagaacagacttgtgtttcctatctccagtttcccttggtctagaacaagaatgccctttacccaacagcaggcacactctgcccgggttaggacaccctgcatcctggggaaaccttgtttgttgctcccatcacagatcccaaccacattacccttccactctccacccagagcatcggccagcagatacttctgtggccatgggcttctcatagaaagtacaatgtctgcattcatcgcctacttcagtgggcttctgacaactgcgaaactccatcttcacatggctgacagcctaagaggtgccatgaaaagagagcgtgaatggccatttttccaaccaaacattctaacaggatcctttccaatgatacactcgcaatagcttcatgttaaggaatgaaggttaaaaaaatatattaaactttattttttgtgataaagccatgacaagcaaaattaccaagtgcagtaagagttccatccatagctggcaggactgttggatatgagctgaggtagcatttgctcaggtgggactgactttgactcagtggagcatgacatactgatgtgcaatccaaggctgcaggaaaatcgcaagacccaacaaagctgagcggggccagggtacccctgattcctcatgtgtctcatttcgaattcatttttgaccattgagcatccagaaaccttttactgttgtcaaattttcatgaccctcacattcagctacgttgattccagacttggaaactgggtagggaactacatctaaagaaatgcagacaaaagcagtgggaaccatataggtgaaatggcaacttgctcctgagttaatgtagactcaaacacagaacagaaggtgtgggtagtggtggtggtggggaagaacacggaaaacaaaaaactaataacatgaataaaaaggttggagggagagaggagagagaagagtagagaaacagaacaccatgtgagaggccactccaggataggcagacaatgtatggggtgtagaaacagtcatactgtgtgtcactaaaaagcaactctaggtgggttaagaagaaaaagcaaactgtggggttatgtgaataaagtatatttaaaaccttgacataaagagattgtcacaagcagggacaaaacacagaaatcaacgtgagagactgaaatctggcttcttggttggtaactgacactttgtatgaaaagtcacagaaacttttgctcattgtcatttccaaaggtcaaaaggttcaggtgtccattagacaactactgatcgctaggccttgtaacacaactctggaacttgccttgaccgaaaggaaccagacacggactattccactcatatgaaggtgggaagtaggcagaagtaacttacagtggaaaaaaccagcagaggcctctcctcggggcagcaggggtgggttggggaggacagcatggcctgggaaggaactttctcaagtgtcggtccatgggtgacagttgttccctcagttgaaccttaacaaacgcatgctgaatacatatttttttcttaatgtttatttttattcatgtttacatatatgtttctgtggggaggagatctgaggccagaaaagggcattgatcccttgtaaatagatttatagatgattgtaatccactggccatgggtgctggggaacaaatctgggtcctctgcaagaacaggaagcactcttaaccgttctaccaactcctcagccccaaatctgtgctttattgtatgtaaaaattatctttaatgataattaaaaaaaaaaacaacgaatggcaagtatgttgaatttaggaaggagtttactggtgactctaactttgaaatatgcaaaaaaaaaaaaaaaacccaacctctcagtagatgctggcatgtcgttgtcgtagaataacattcagcgtaagagccaggaagtcgtgtggatgctgctgagtacagtggactttctcatgtacgtgaacattttcacaatagaatgtaagaagaaaagaagcaacaggctgaaggatcattatgcataacaagttgatcattgataggaaaatgtgaaacaagttgctaaaaataagcccactgtcttcaaacaacatgacagtgccaatagggcccggtgtcatgggagctgtgaacaggtctcatttaaatcaggagggccagtgtctcctcccacgccaggcaagtgcgagcatgccaataacagagcttcctcagaaggtgagtgagcattctggtggcagctgtcggcgagccaggccagagtattgtctcagtgtcagatgcagtagccagggtgaagcggaaccattttagaaagatctatgacctgttgctaggtaaaggatgtagttagagcatttatgcaaaaacgcctaggtgggcatgtgtgcacccacatggcaagaaaaggactctggaaaaatgtaggtgtctacccagatgaggactgggggtggcagcccaaacaactcctttgcaacaagttgttgagttttacaaagcccctaattaattaacagtgtgaatacatgcctggtttaaaactgtttcagatcccaacagccaaatcattcatgtgacccttacagcttgttcccctcaacagtgtctcaggggctcgccacttttaacttagtctacacccagagatgagcagtcctcctgtaagctgaccagagaacagtcctctcccgacctctctacctcccaacacctttccacccaagttctgagtcacggcggattctgtgggcgggatgctttgtcattgcttcaaaactgtccatcatggttagcttctaaccatatatactacacactcattaccaagcaaggagttacaaactctccatgaagtcaatgtgttctgactgaaatcagggagggggtgtatctacatgcaccctcagttgtcggccaattataagaacacacatcgaacagttcatgaaagctagtcgcaagttttatttatataaaattcattaagaacataaaagattgagtttcttaaaaaaatctgcagttatttacagcagtattgcacaggtacagtggcaattaccctgtcaaaattcatcagtgcaaaacgtaaaggaagccagggaaactgcaatacaaatgctacatacgctgggttctgacattagtgatggggactatacagagatcagtgctgttcactaaaggatacctgacaggtctgggtacagaaaccagtggtcacagaacctagacaataacacacatttgaaagagatcaagtactttgctgggaacttgagggtgctttgtgcaacgctgtttgagaggcaattccccgccgatttagcgacacgtgtggacaggacccgcatgcagacgtgctgagcggatggacacacacaggcaccaggctgaatcagcaggaagacaaaaccatttccatgaagtcacatggctctagagcttcagtgagccatcttgacgtgggtgccagaacctctgtagagggaagcaggagtgggctggcctaaagcagtgaacgggaagggagccgaatggtataggtaagttcagtccacagacctcaaactaggaagcacacagcaggtggggacggtagccagcgagtgtcctggtgacacaagtggccttggcaaatgctctagaaacaggtcccaccagcccttctcttacccaggacagccattcagcagtacctcaagaggcagcaggataatatttctctcaacactgagttgtcaaagatactctttcaatttaaggaaaaaaaaattcttccccatctgctgctaatacttctctaaagatgtggccaacttactggtgagtctgatttttctcagaagccagctgcttcaaaaatgggtttgatgggtattttcttagagtccaatcttccaggctagcatcttagggtatctcaccggcagcaaaacactcatttcatcagaaaggcggcagaacccaagcactgaatgccagaagccaaagcagaagccgccttgtgggaagagaaccagccactacccctcctttatcaggagctgaagcaattcatggcatggcagggctgtcagggatagggatgtcaacactttcaagaacttaagacatttaaataagcggaaaataaatatacaacatctctacaagttacagcattatgaaacagtagggcacattacacagaagaagaacctatggtatttacaaatccttaattatgagaagtttggaaaaacagtgatttttttttttttactcatttatgctgtacaatattttacaaagaaaggtaaagggaacacaattgcacagagacatttggctcagttgacgagtgaaacatgactttctaatctaataaatagtcaaaatatatacaacactggaaggaaataggagaagcagacattacccattacatactttaatagagagactttaaactgatttttcagacccctgccccttcccccaattcatcaattcttttctggaaaagaaatttgaagaatcactcaggacaccattttgtatgtttattacaacttgaggtgaagtcacaggacactatttacaaacctcacatggggaggttgtcaaggcacaaaacccgcattatgtttacacacacacacacacacacacacacacacacacacacacacacacacacgagggggagggagatctagtttctgtcctaccaaaaacgagagagaatatatttaagtacaaaggcctacccacagtaagcaggggcactgtctgtctgcaggcgacgtttgcactctaacaaacagatacagtacagggacatccagtcatgtttacgttctgggtgccgcatcctgttcttgaatacttctacaattcatagaatctcttatttccctatgagctgcttcagcggccagccccaggctggaggtaagcatgcgttgggggccacacatgtcactgggacctggctctggagcttctgcacctgctcaggcactgccacagagccatggggctgagacagtaaagtgctccagtcggggagactggcacatgagaatggaggtcctaggaggggggcatggcccaggaccaagtatgtctttggtgtgtgtgtgtgtgtgtgtgtgtgtgtgtgagagccatggttgcagttttaacaccaacttataataaccacagggcctcatgggaaccatgagcaggctcaatacatcaggaaaggaggagaatgccaaaacagctttcaaaccacaccaaatctaacgaagctgggaaatgtataaggatatttggaatcagatgatctcaatctagaaggaagcttataggtaatatacatatacatataaacacacacaaccacgcatatgcacacacacacacacatgcacacacacacagaggaaagtatgaacaaacggatttctctacttcataacataagaaaaaccactggctttctacaggccaaaagcaaacagtcgttggcactgctgacttgcgaggaaactcataaagcttcctgagcaagctgcctgacgtctgaagttctcagaagtgagagggcttgccatccccactcctcccatgctctttcctcttggtccttttttgtatctcccctggctgtctgcctacacgtgtgccgtttgttttgggaggagctggagctgggccacagctctccacaggttagaaagtgctcctccaccaggctgtgcacttccagtcctgcctggtcttgaaataactgaccaaatgtctgggctgtggtcctaaggggcagggaccaagaaagagcacctcacccccaccccagacacaagtaagcccaacaagatccaagtattaagaaaatggagagagcaaagcaggcagacatcttgtggaagacaagtgctttactcggcataatggaagcttcctatgtctgggaactgatggaagtagagccagcccctaactcaagggaatagagatgaaattcaggaatcacaggccaggtggggtgagcagggctacatcccaagaagcatggaaaaggatcacctgagctccttgctcctgaaatgacctggccagtccccgagaaagcgtgggctccagctcacctgatacacacagcaaagcagagcctgtggcggcagcaaagccagcaaccagtggagctagcggcttcagcaagcggtgtgtgagcccacgtcctctcaggataaaagaggcaaacacagccaccgcagtgcagtgaagcgcacgagagcccttcccgtgagtcagcttgattgatggagctgggcacaatccgggcagcccctagcccttgctgacacaatacacttgaagataccctgggctgaagctgcgcatccgtgtggagacagaccgaggggtctgaggagttgagggaagcaggaaaagtgtgaatttctgctacaggagcaactgagctaaggaggtaaatatttacaaagtggaagtggcgtaccagaacagaacctctgccgctcgaactcattccatttcctaagaactgttttggtagtaataactcaaaaggaaactcaaagaggccatggcagaggagagagggcaacaccatactcttcctgtttaaaaaattctgtacagtaatttctaaaaataaactaaggcagccttataaatcagctggctcagttcccactgcagggttatggaatcctctgagtaggtagtgggttaagaatttgagtataaaaatcatccataaattggctaaaaagctttactttctgaaagaaaatgagacaaaaaaaaaaaaccccaaaaacagttatcaaagaaagtgggtttaaaaaaattaacacgccacatgtaaacacctctcttgcatatttctctgttcctaggatctgtacattaaaaagagaaaagccctcccttgtttacattcacaacaaatatttactgaaaactcggccatgtggtgatgaacagaggttccgttcacatcgacacagtgcagagcgctgtccatgctcagcacatctctctgggatagaaccactggacacactgtcgcagcaccaagagagggacatgacgcgtgggggttctcccagtctgaacaagagccatgtccgccacgtatcctggctgcatgtagatcctgtcaatgccttctccataccagacggaagataaagcgtaacagttgtaagataaccatttgagggtggtcttcagcctcgcggtaatcatttgcaaacacctgcaacaacagaagcagagttcttagcaactctctcgtaatctggagaaggcgcgtatgcaaggcaagagacatagcccatctgaattgcagggagactcaaattccaggggggaaggatgtgacatcatggagtacaagtgtaccgagtgaactctccatcactggggaaacagagcgaacagaagaccaaactattccaaagctatcccggaactgtgaaccttcacatgggtactggacaggagccacgccaggtcactgatgattggtgtctcaggagacgtgactgagggtgtgggagggagcagaggaaaagaaaagaatgaacttgggtttctgtactgccagccacgttcactgatatttagacaggttaggactctctcagaggtggagtctggccactgtgattgacttgacgaagcagtgatttgggggtaatgtgccccaaagaaactaaataaagtggaagggatgtgcctctggctgcaaaggataaacaatgatcccagaggggctgcccactgtggaagacagggtctgagtcaaccccaccctcccacatcaggcccaggaaggaaagggcagttaagaaggagtcattagttgtgacgtgtgtaggttggttacaatctgaagactgtttagaacgaaacctcgggttcatgtgaagacttcagagcgcccttcagagagttccagagtgctcacatctggttctcactcatctcattggacaacgaaaggcaaaggaatacatttgcctcaatgccatcggccacaacctggttcaaagtcaaggctgaagcaggccctagttgtttcctaaatgactaacccacaaacaggacctggctgtgtggctatcccagcctccgacacccccccccccctttcattttggtgggaaaggttcccaaggactgtctgggaatgaccatgaatcagactgggactgtctgttccttctcagactccataggtccccgcagacaccagctgtgaggggagctctcctcaccccactgtttacacagctcttaagctcaaggggccagggcatttccccttctccttccataacaagatgggaggaaatcagccttatgtcagcgattcctgtggaggtgctcccatgaccacaggctgcgattttatcggctccacacacacaagattgctttgttttgatttaactttcaaaattactttgccccttttgtgtgagactaactctggggaaagttcattttggtgaggacgaatattaataggccgaaagaggcttattcaaaatagaaccacaattcactaaaacaaagaaagcatgtgctacgactgactaaaccatcaatccaaggtgggaagacttgtaaccgacctatgtcaccgcagccctctgcataaccaggcactggggctgactgggtggtgacagtcaacacacccagaatgggtcacccaagtgaggggcctcaactgcttacacttgataagcttcaaattctagcaacaactggggagacagtgactggctaaccatttgaggttgacaggtggaccatggtgactgcagtcaaggttaacgagaagacatgtacaaaggcggcaactgacatgggaatgcaggaaattttggcaaagggaaggcccagtccttggagcaggggtgggggtgagagttgggggaagtgccgccctctcgggctggtgtgacagcacggcacgagcctctaacaagcaaacaattgcttttggacaacattcaatggaggaagccattagtactgattcagagcacagtgccagtccagaaatcccttgacagctggcacggtggctggagctgctcctctggcccagcacatgtggcccacacaacagaaaacagctggaggaggggtggttctaccttacatcagattcggcaatgaggctgctgcaggtgcacctcattctgagcctggtgtttgctgccgtgtgctgtggtgtcagcagtgtggtgcatgtgctgtggtgccagcggtgtggtgctgccgtgtgctgtggtgtgtggtgctgctgtgtgctgtggtgccagcagtgtggtgtggcaggagagttgaaagctgaagcagaataaagccaggaagccagggcttaatgctcaggatcagggtgtgagggagagagtgctccttgacacctacaagggaacccaaggctgagcttagccttcagttaaccttaacctttgatttaaggagcaggagagttgaaaggatcatgccaagcgtcccacaaccaccagtgagcaagcacgcgcgcacgcgcgcgcacacacacacacacacacacacacacacctggtgacaggctggcaggctggaggaagtacaggcccctgggtgcttgggccaggacatgtcaagcctcaaaatgaccatcatctgcagtgggggcggggtgggtgtcatcagttaaatgtcactgttcaggggaaaagacatctatgtgctgcaaggtccctcacagcttatgtagaactagagagacaacaacagaaaacacagcaagagtgagggcatcagcttcttttccctgggccctcagctcttggcagagccatcttttggcctgtgtccagcgtgtctgcatcagtaactcacacgcaggcactcccagaggcatctgcggactggggtacagctcagtaccacacctatgctgcctggtacaagacagaccgctcctcctgattaaaacctcttgaagcagaaaagaaagtacaataaggtctccctcctggcaacccctctacatgggccacagagtcctccaaattctcaggtatggctgtctacggggcaggacctccaccaaggtggctaagatgaactcactggctggggcggggttaaggtgtgactataaacactgagaggcacagcataaataagtcaaagagggggaatgtgaagacaccattgctgccgagactgatgttcgacttgaggtccgtagagctgcggagacattaactactaagtcataaagatacttgggcgatctattatcctgatgcagttgtgggaagggtttttttttttttttaaggcatcagagacaagcagccccctgaaaagatgttctagtgcccttaggactgtgtgtctaagagtcacccactgccactgccagctgaaaaataaatttcaggcttttaagcctttaaagcaaccccacagggcccgtgtggttgccccagactacaaatggctggaggtgtcaggacaagaggtggcagggccaggacaggtaagctggatccaactcacacctagaaggcatgtgacacctaggacctcacactcaaattcccagaatggagagcaatgattgtggacagaggcgactctggagtccacacagcgctgcctctcaacgattgaggctgggaattccagactggatctgtggagtgggatgcgagaccagaccctgcgagtaagctcagcaatgcagctcagattctgctacagtagagcgcaaatgccaacctcctgtgtagagctcgcacgcgacacagcactatgcagagagctgaccccagcgaggggggcttggagtaacaaccacatcacaactaaaggtaaaggttgagagagatttcaaatcacatcaagaagacccagaggtgagacctgtggcaacataacctcaagtcctgtttcctggcagtcaaggtagtggggcaaaaatggtggtgttgggctggaaagacagctcaacggctgtgagcatatactgctcttcttgtgtacctgggttctttgcaccctcagatggctcataactgcctgtacatctagttttaggggctccactgccctctgtcctgagaacaacctgcacacacatgatgcgcacatacacataaataaaagatgaataaataagtcctttttatagactgacagtatcctatcccaagttcttagagacaaaagcgtccgagaataggcacaccctccgttggatgggtgttttacatacaatgcccacactgaagagtcttaaacttctaacaggtttgcatgtaaggcaagtaatcataggaaactgaattttggactgtgagaccaggaaggactctggcagtctctgctgtaggtgctgactcctgagaaggcaatgccaacgtcctcctggatggtgcaccggcctccatcctcaccactgagtgagccatccaggaggctgaggggtacccacaacacagctataccacgcctctatgggatcctaacccagccgtctaaacaatgttgagtatagcagccatgaggcctttcccctctctccaccctcagacagagaatttactgagatttccatgctggttcaatgcccacggctgcctcgaggccaggcaacggctgcccagggactgcattcacttcccatttgccacaaagagaacatgtgcatctaaacagcctgggtctcatagcttagcgatcacgagacggctggagacagtgcacaagaggcaccctaccggtatgacgtaatgcctctgaacatcagaggaacaaatgtgctccccccacaaccccccagcacagcaagcaagctgagcggtcgtcacagatctaccatggccacgctggcttgacagttatgtacagactgcaaatattctcaaggaccaaacgtgtatcctatctcctctgcgtcgtatagcagtaactgttaaaagtggaggccttttatagggacacagaaaccacttcacaatctcactcacagcgggaggctatctctccacccaccctggaggtgtgacacacagttctgcttggtggggatcctgccaggctggcctcagaaccagaagcgggtcctgctctacagccagccaaacagggttcaagattggtagtatgtctcctgtgagagctacgagggacaaaatactcaactcagggcaggaacatgctgttctgaaatgctaagtgggatgtaacacactttaaccacaactaaaacctcctgctttggttcagcgaggtgaagtctaggcaagggatgatgcaatcaccttattatttttatgtgtctgcagaagggccaaaccgtcctttctttgcatcttcatttcctcctccagagatttaaaaaaaaaaaaaattaccctgagaacctgcctgaagttcccctccgggcacctgcacctcctcttggttgcacgttcacggctccctatcccacaacggccgggtagccctgcaggtgtagcacctgccaggccccacagcaccctcacacgtggtgtgtggtgtagatcaacacaaggatgtctagcccaacaccccgccagccattcgaacacaccccagtgcttcagtctcctctcatatttgcctacacccagacagatgcagcctgcgcctgtagggtccaacgcacttgcttcaaaagcatgtccgaagcatgtaaaggcagccaggtggacagggttcctggcaccactcaacgtgacagagaacggggtgataatggcacccagattctcgagcacgcagggttcagcatccgacactagagtagaccccgtggctctggatggggtgcacttgctgacgagccaagctgccctccctcagtagctacagggaaccctcattcagaaaagcagctcaatgctatggagtgaataacacagctctttccgcttgcctcaggggagaaaccgaagcactcgccacctccagtcactaaacagaggtggcatgtgtggttcagttcagatatgaacaaagcctaaaaccaaaatgcccaaccgctccctccaactgcgacacacaattgtgtcacagacaagagcagataacagttcaccttacctcctagtgactgcgtttgctacaagagggacctgcgactaccatgtgaagagaccccatccttccgtgagtcagatctagtgtgattttacattgatattcatgcctttaatggcaacagtttaagaaagcaacttatcttattaaactccagctttcaattaatgagggcctctggagaacatggcccgaggccacacatctctggttggtttcatccaagcaagctataatttcggcctctcccttgttggtgatttataggaaccaccgtcatttctaaaagcacggagtcagatagcatagtgggctccctttcttaggaaagcgagacggacaggcttcaagtttaaagtatacaaatgctcctgtgcatattgctttagtgaaacttgtgttttatcaaagctgatctgtgtggacccccgttttagctccactttatctgatgctgggttctcctgttgtctgtgtacactccaatcaactcatgcctgcacatgtcccagaccaagggggaaggaagcagtgtaaaccaaaaggtgtttcttgtgatcagacaaagggtttccactcactcactgtcccatctgcaggggtcttagctttaggctgggcacttggaggacatcccctcaacagctaccctaaagggctgacaggcctttcccagcaacctagcccatggccaaaatacccacaagtggacatctttcataattagtgcccacaggtgctgaggactatgtgacatgcacttgatgtcacctggcccaggtatgggtataagagcggcagctgagccatggagacggccctgatgacagctatgggagatgagtgtgaaatggggttgtcgaacattgacgcatccctgacacgaagacgaagaggcttcaaacataggctgcaagatatgaatgacccttcagcactcagctaaacgcaaactgcctgctttctccatgaccttccaacaaccagtccctctgagcttctctctggacccactgactccctgaacagctccccgaagagcccctgccatcctcctaagtcttccagatgggtaccacactgcagagtagacaccaaggtttagaaggcttggtacagcgcctgggcataacaatcaggaaaatctttcagaaggcacagcctctccctagtgcggcttcatctcctctgtcttaagctctggagtccattctggagaaaacgaatacttctacactgaagacgccaccttggctctacactgtcagcggcagccaccgcacacctctcggtggaaggaaccaaagacagcttgcctctgcaccgttcctacgggagcataaaacctaaccctcgacccatgcaagcaccaggtaaaagaaatacagggagtctttagactcaaactacctgaatcctgcacaaatgtcgcctctccaaagacagaggagttaccaggccagagtgttccttaatgcaatgcatgagtttaggccgggtttccctcctccaatgtctagggacatttcaggatagagaagaagtttaggtctgcagttctaagacagcatggggacactatccatttgctgattatgactgttacatgtggtgacatgtaggtatgagaggatattcacactctcagaaagcacacactgcagtgctaatgcggggtggcatctcgtgagagtgccccccccccgtgcacacccgcacgtcaggcagggttgtccttgctcagatcttgtttaggcgaccatactgagacttctcggatgcagcttccctgttctatgcagatgatacaacctcatggcaaatgctcccgtggttgctccccctgccccagccttgtttcctgatcatcttgtgaatacttgtatgagttataaagagaacatgaaattgggtgagtgtagggaggtgggggagggggaaggaataagatcaaaacactgtatggaggtctcaaagaatcaataaaaccatttttaagaataagctaaggtggggcatggataaaacaacccacacattgaaagcgcatgttgacaagacatactggggggtgccggggctacatgttaacaaagttctctaaatgtttcttgaagtttttccaagtgaaaagctgtctccaaattcccatgctatagagcatgcatgctcctagtgatagctgactgcagtggggctctgggagtccagcagtcaggggcatacaggcctgggcattcacttctgacctcctgcctcggcctccacagcaccatctcacgctgccccgctgctcttaaatggactaaacatacaactacaaaatagtgtctctaattccctacctggtaacttgggaagatatcctgtcaggctctgtgaggtaagtaatacatgctaacaaccctgggagaagaaatcaccccagtgtagactttaaatcttttagagacttcagtgaatccggtcaggtaggtgaagccattgaagtcatcatccccccacttccggcctggcttcctgtccccagggttcaaccatggaccactggtgtgatgacagacaatgctgctcttctaactagctgggctggtgcctgtggctttaggggtcactgtgttctggccgctgataaccaccatctggagaatatttgccttcagtttagaggaattagggcctagcctggaatctatccctttctcgagcctactaagaaagctaaagtcctttattagtgaccggatttcagcagtggatcttaacccattgcttaagatatgctaaggcttggcaagatggctcatctagcaacagcaccccgactcaggagcttcatggtctgagttggactcctgagacccacataagagccccggaagtgggggtatgtgcatctgtaatcccaggactggtgagacgggaggcaaaggacggaaaactgctgagaagtttgcaggtctgctagttggaagcagagaactaactcccacaggttatcgtcagacttctataacatgcacagtagcctgcaaatgtacacacacacacacacacacacacacacacacacacacacacacacacagagagaaataaaaaaagacatacaaaataaagtataaaatcttgcaaaatagtacaacagtatttattgacatttattatatttaaaaggataggatatataaatgtggcttgtttaaaaaaaacaaaaaacaaccgatgcaaccaccacaaaatgcatacataagcacgaaactataaaataacattgggaagaaggtaggaggcaaaccacatgcagccatagtctcaccttctataaggcaagctgagctagagaagaatctggggcagtccgtattttagctgcacaggactcgaatcactcattaccctgatacccttcctgagggcgggccatagaatgtgactactcactctgacaatgtcatcactaaccactcacagtccccagggagctgcaccgaccatcactcccatcggggaaggcctcctagtcccctgtccttaccttatggtttaaaatcaaacttgtacgaaagatccatcagcgtgcctggctctgcagacaaaggagctgacacaacccgagtggggtgttgcgccagctcagctcggtgtacatgtcccagcagtacaaaggcctgcccacagctgcgtccctcctggggcgtacccacccaccaggtccagccctgagggcatttacagtaagacagacacagcatcatagccagttcatacctacacttccatgtctctccaaactcatcaaaaatggcatatcctcctggactctggccccagctccagcccaagactcagatgtagccccttactctcttcaaatagtctcatgtcccctacccctgccctcaacagaaggaccaggctcccaaacatactatggcctcttatagttaaccagcccaatcaccaacacaaacactaaaatctctttaaagaaaacaaggcagatggattagtggatgtagcattagtggtgaattataaaatcaaccattcttcccaaaagactgccattttggacctaggctaagaaggaattcatattctgtgacatgatccacgtcagggagaggaagcctgtgtgggctacacacagtttcatgaaaaactcctcagtccattcatcaacaggacagtgcccattatgacagaagccagactatagcacacacattcgtcccccaacacgtcccacagaagagcaggaagtggggctgagattattctcgagatccgggactccctgatagatctgctactcaaaaggaacaaggctgctcaagcagtctggggagcagccacttagtgtgggccggtagctccacgggagatgtctatgtaaagacagaaacatctcagggtcccttgactggcatctctccagagaggcgagaggttacatttgaatgaatttgaaaaggagccaaagttacctccagactctttgctaactggtcacccactcacagcagtcctgtacctcagagtcaaagcctacatccccaaaagtgtagtccacaggaagcaggacctcaaacagacaagtgtctttgttccatatcaaaactgtttttaaacacactgcttctgaagatgctggactatgttattgttgtcatcgttattatttaaataaataccaacaggacagccagctacccttattcagcctccactaggttcacattatagctattgatgactcgtctcctaacacagtttaataatcaaatgggaaaagccagcagcaggacaaggctctcttgctgcgagccctggctgagtgactacagaatttaatggctctgcctacgtggagaagcaccttacaggaactgaagaccatgtgcccatagctacatggagctatttcatgtgtatcaataaccttttaaaagaattctaagcactaatatgttgaggtctcttgcacataaaatacctcttgcaacttcacactctatctcagttaaagccaaacccttagatgcaccaggtcagagcagaattaggagagagataacgtaaggtgcagaagggggccatatctccgcagttgcactttctctggggatggggagaggtccttaccctccttgtgtaagtttcgttgaactcgtctccgatccgccgcagctcctgtgcaatccgtatctccgggcgcagatcttcaggttcctcctgagactgtcgtatggaagctgctcgggaggcaaagaaaccagaaatcacaccgaggtccacaacacttagaacaccacacacaagtttccaggaacaaacccacctaacacactctggtcttctggaagctccctggccttgggaactctcgaccctgtgtttagaactgtgaaaacggtatcattttagatactgtcttagctggctatgtcctgttgctgcgataaagtgctaactgaaaccagattagggagaagggttacttggctcacacagttgatcacagtccatcagacagaagtcagggagaaagtgcaagaagagatgcaggagcaagaagcagtgcgcgggagcactcctgcctggcttgctcaccacaggctgctcagcttgctttcataccagggtggccctgcctgcagcgagctcagcctttccacagcaagaaaatacccccacagatttacctacaggcaacctgatgtaggtaacccctcaattaagattccctcttgctagaagactctagcttgtgtccagttgatgagcaaaacaaaggggaaccagcagtcagtgtgtaggtgattacagagtgatggcaggaattggagactcggacttacgagaatgaaaaaacaccccggcccagcctcacacactcccatctcaaaaggatagttcaatgaagatcaccaaagaaacacagcagggactggtgcaaaacccacatggtgaaggcagagaactaactttcactgatttctttatttaattattattatagtgtgtgtgtgtgtgtgtgtgtgtgtgtgtgtgtgagagagagagagagagagagagagagagagagagagagagagagatttaagggggcagtttgcatgaagtcctaaggtccatccctagaactacactagaaaaaaaaatacacaaaccatcagagaacataccattttaatctctcagtgaaatacccacttttggtcttagaacaagatataaattcctaggaaaaattcaaacctgaagaaatgtttgtccgttccaaagcctagtaaggagaaatcagagatgcctggaaggtggctgtctccaggctcagtggagtcagtaaatcatccagatgggagcataactgcatgctaactgcatgctctgactgaatattaactcagtcaacaaagagggactcaagtctgcaaacaccacacgtaggctggaagtgttttgggtttgggagttaaaggtatttttgagaaaagagaaaaagattggattggggaaggttgcaggaggcagaggcagaggcagaggcagaggcaggtgtatttgtgagtctgaggccagcctgatctacacatatacgtctatgagttccaggtcaacctgggagatcctatttagtgagatcctgtcctccttcccccgcccccacactgaaccataacaccaagttaatgttaatgttatgttgtaacactgtaagagcacattagtcacccgccctgggcttccatttacctctccaatttttaaagcacaagcaactcacaactaaattccccactcagtaaagtagaaaaaacctactgttgataaaaacattacatcttgcttttttatttgtaaaagatccataaactgcagactcacaactaggcaaaagtatatgcaagtgacttagctaattcttttcaaaacgcttgccacctcttccctgaccaagggttgcccatggtccagtagagttaatgatgatcccagctgcaatcccagcactccagaacccgaggcaggaggataatgctgggctgcactgagaggatttctcagagggagaggagaaacagagggagggagggaggaagggagggagggagggagggagggagggagagagagagagagagagagagagagagagagagagagagagagagagagaaactactaagagcttaaaagagcagataagtcctcagtaagggggagatctgtgttccattaagctacctactctcagtatcagaggggacatcactacacaggagacagaagtctcatggaggaattaaatttttaggctaagtcagaccaggaagtcacatccaatcacaaaaaattacactggccatactttcttttaagcacaaatatttctaatattagcactattattaagtctattaaaactacagtttaattggaaaaaagaaacccaaaggttgacactatgtcaggtgaatggagcaagccatcagttccatgtccttctgggttgtcagctttgtgaggcgttggtgtcacaagtggcaaatcaccatctcactgtgcagcccaggtctctctcacccctcctgtctcactttcctaagtgctggggtggcaagcacggaccagcaccagctgggtcatgacgagtggttgtaagtactgaccgtcaagaactctctaggggctctgttgtgtcctcaccgggatgcacacctacccagctgagcaggtctgggaggcaccacgccgccatgacaggtcctgtcacccacctctcccaccttcacagttcactctttctccccatacacaccgaagagagctatctagcttcacctttggggttggaagcaaagaaaagccaagtactagaagacaatgggtaaaaaatagatcaaagtcaggtggcgtgacccaagtcacttacccagtgtttactgtgtggtcatattcagtgatgtacaacaaatgaccatgagccaggttgttctagggaggctcagatgaggtccagggagctgaagtacaccacttgaaggagctatcctgggtcacaacttgacttatcaaaactagcacttagcaagcacacagatgctgccagcagctatggatctttggtggccaagctcaacttgtttacagataaatgccctgttgtttggggagataagaagacagtctgtttctcccataaaaaaaaaaaaaagttcagaggctgttagtacaagtaggtgtgcagatataaacagatccccacatccctgcaaggaggcttagggtgggagggatgatggaggtgctaagatccacacaccagatcctgaaaagacacagaacaaaggaccagaaacagtggttaggcctggggccctgatctgtgctggtggtgtcaggacagtgtattaacccaagataatggttaggtcaggcttagcccaaactgtaattggctggcaatagctctgggttaccaaaagactatcagctgtactttggtgtaatattaaaaagctgttacaatataaacaccacttgccgaggaggctggtctgtcttagaggctgcccggtccctggctgagctggaactggcgacataggacaagctggactcaaactcagatctatctgccctcacccaccaggtgctgggattaaaagcatgcaccatcatacctggctggtgttttatttttataaggatcaggaatatttatttctccctgtctgtgatgctagtatgatgggcaagtgttctatcacggagccacagcctcctggataggtgtgctttaaaatagtttcaggaactattttgcctgtatggatttatgtgcatgccatgtggatgctgggaatcaaaccaaggtcttcggcaagaacagccagtactcctaactgctgagcaatctctctggccctcctctggttgtttttttttttttttgttgttgttttttttttttttttttttgaggtacaaaactgaaaattaaggctagtacccactccacaaggcacaagtagcatgcacacagtagatatgcaccaagctaaatactatagctagctgtacattttgtaaaaagattggcgtatgtttgtctatgtgcacgagtacacatgtttctgttggtgtgtgtagagtccagaagggtgggtggagtgccattctccatccctctctgcctactacgttttaaggcagggtctctctctgagcctgggactcacattttcctccattatgctggaagtctgcaaatctcagcaatcctgtcttctctgcttggactctgagctggtatctgtgggcagatgtctggattggtacttgggtgccaggattcgaactccagtcttcatgattttgctgcaagtgctcttaaccactgaaccattccttcagccacaatatactaagtttatataataaaaattctattgagagtactttagaaggcatcttcttcttctgtatttaaggtacactagctgtaactcatatggtatgctgtttgacgaaatcttcaaacattatttctcagatgacaaactattttctttgaggtacagggatggggtgtagggaagctttccactgagctcccccaacagcctaatgctagtgagtcccatagttggtcctgtgccacgagagaacaagtagagcaaagaatagggcccctcggtccactctacagcatagagtgagccagacgtgagatttccattcccaacacgacgtggctttgtcccctttcacagccaccctaagcacaggcgaccacagtatgtagacatcccaattgtcgatcttctgaagatgcacctggcgcctgtgggctggggacacagtgcccagaagacatgccaccccaccttcctgactcctgtcactctgtcctgcatgcatccacttactcccacagtcagcccatcacaaagataatgcagtctaagacggttaagaaccaaccacaagtagtttattctgtgattagtgatgagcctgagaatcccaagtgttgatatgtgttcgcaagaaagctgtttacaaaagcttttctaaggagggccacacttttaaaccaaggaggaaattttacacacacataaaaattttcaccctcagaacatagtttcagtatttaaggaactttcattctgggaacttgacatgagtgtgcatgcatgagtgtgtgtgcacacacacgcacatgcacaccccaagcagacgaaacagagtgcttgcgaccacagatatactgtgaagctgagacttgcagcaaggctccaagcctgcaggccactaaactgcaccagaggggacttcccagggccagggccacatttcttcctcctcacttttaacaaatgccattattaaactttcttatgtgctggatcagacactttgccaagtgtcctctgcccactgagttttcatccaaacttcaaaaaataacctttttgaaatccaaaaactggtatcagtaacgtgattttctatggcaccataccaattcatttttcaggggaagagaaaggaggacattcctgatgccaaagggccttagtggtgcaagatgtgggtcacccacttggctaacactttttcaagtcatgaggtaatacaaggtatcttcaaaactcagtacctattaatatcaaggggaagtggctgctagcagatcaagctgagactttgttgcagtgagcagcaatgggttcaaagcaccatggtcacattgtgacattcacagccattctgccagttgtcctgtgctgtcgcagcagcgcagtgaaacaacacaagcacacatcctagcacactggcttgcattttcagcttgggagctggctagctcagtctccttaactacagggcagctcctactcccattaccattggcattacagttgtagcaatagcaggagccaactcaaaacctgcaggagaatttcagctgtctttagatggtcagtaatccccaaagattagatgtgaaagtaaccagcaatgaattaagccaaatcaatattcaactcagaacagagaaaggatttcctgatgtccaagtagatggaatgtgtgtctttgaagaaagtattgatcgttcaaacacacaacagaacacaccagacagtcgagggcaattggcccatggactgtaggaagaaaaaaaaaaaacacctctcatcagccatatcagggctgtgtatctctgtccccgaggacgctctgaggggaccactcacacttataaaggcctctacaaagaaccacttccttgtggactcaaaccagctataaaataaagccctaagaaatacttcaagtatggtgggttgggcgtggaaatgtctacaagcagccgctttgatgctcagttttcagtggggcaaataaaaaaattctgggatgttggtttaatacaataatctgctcacttaaatacctgcagatgtaatctctacttagacatacccacagaaggaatgaagtgacaggctggtgtgctcaggcagctttcaaagacaccttaaagggaccaagttgtcctgtctcttcccagtcagcccaaggcaaagagatctccgtagccaccagtgaggggacgcacaatgtcaccagaagctccttttgaaacttgtactcagaaatcccacccagaaccagtcagtctccctgcgcaccccgcccctcaatccccccactccccagcctcaagctccttccaggtcaacatttttactcacatcattttatttcttgataagacaaatctactagtcccactgagccacttgacgaaaataaaagctattagtaataaaaatgcaggtgtctgtaggaagagggcgccatcagttaagagggggctgtgcaggtgaggctgagtccctagccctagggagatggagacagaaggattccccaggactcactggctaaccagcctagtggaatctgtgaccttcaggttagtgagagatccctgtttcaaggtctaaggctcagatgaatggaggaaaacacttaacacctctggtctctgcacatctgcataccagcgtgtacacacacacacaaccacaccacaaacaggtgcacatacaaataacatatccataaaagtaaaaagaaagacataaaaataaagcaacagcacgctgcagcctaagagctcaggtttccctcagtctgtttttctctggcgcacatttgtgtcaagcctgagttgtcacatgaattcaagccggcgccttacaaacagctgctggaataaaatgctcgataatgaagtgcacgacccaaagccagagcttccccactcgctcttccggcgtgtcctccccgctgctgtcatgtagccctgagctaataggtcggaacgggctgctttcatccatttccagacagacggtttgcaaagccctagtcccaggctgaagctggacagagacgtggaaactagtattcacaaggcctttccccttcaccaaggtctgtttcatgcaataaagaccaaacctggcggcaactaagatccagtaccttctcattcattccatcctacatcagaaggtctctcattacggcttccatctgagctgtcccccaaactcacactaaaagacattagacacaggaggttatgtccggagcctgagctgcagggcccacatccagggacatctcagtcccagaagcacaggggaagcatggctgggagcctgttggtgacagactacctggtttcttggcttttttgctcacttccagggtcagatgtcctgttctcaaggtgtaccgggacctctcaacccccaactctttttgttattattattttggattttacttatttttattttgcatatacaggtgcatatgtaaggaatgtctgtttgtaccataagcatgtggtagagaaaaatgggcattgaaccttctggaactggagcgaggtagggggtgagtcaccacatgggcactgggaactgaacccctagtcctctgcaagagcagccagtgcttttaaccactggactcatctcgccagcatagtacctttctttttaataaacaaagctgccacacttcccaaacctgatcctaagccagctcctctcattaacatgcctcggggaatagtaccaccataacagacggtgcctccaatcacgccgtgctgacgtcactgctctgaacagcacatggcagcacttcacactcgccagttatgtcaggaccctgggtgctcctgtgcctccatctcttcagtcctgtgccactaagtctttgaacagctccatctctgcccacagtcattgtttatgttcagaaggttacaggcatctgactgcatcttacttgaataagcaaaaataacgtcaaaactcaatacaataaatagggttgattttgtacttgatttagtacaaaaacctgaaaccaatatcctgttctagccagacagcgcatgtcatgatttacttcattaatcaaaagaaccacatagggatcctttaaacactagggctgcagctgtagcatagggggacactcctaatcgagtgagcctaaaaccctcggttccacccctggaccacaagtacggcctggactgaagacacagctcagcaggaggacacctacccacttggcatgagtgaggcctggggttgagatccttgctggtagctcacacagacaaccccaaacactaggaaagcctggactatagggtgtgtttgaggcaaacctgagctatgtatgaaaagtctaaccccaagacaaacatgcaacccccctatacatcaacacacttaaagactccagaaacaaaggatgcaaaagccccaagttacagtaacctataaattgcttctagacaaaaatcatattgggccgagggtgagggaagctaagaattcacactataaaataaagactcctgggttttcagagttaactatggcttcctgtatgtaacttaaaaccagtggcagaaaacaagcaacaataatttccccctaaattcatgtacggttccaatcatgtttttatcccagtgacaacagagaccaagacaccggatgacaacaagggtcaaccagcatctacaagtcacccctgggctttttttcccccctttttttgttttttcttctaatgaaggccttagttactaacttagcatttataatagccatatacaaactgaagcagtaattcaacacagatgtacggtcgtcgcggctaactcgctgtgaggacagacaacgaaaacttcccacttaacacaggcagctgcttcctttatacccatcttgtgggaagaaaagaataagccttctaccttaattccagacactgctttgcataactgcaaagacaatcactgtgcttggacagttaatggtttaaatgtctgtctcagctgggctttgagactcttcccccagacaaccccagaagcatattattagacacatccaggctgaaggtgacacctttccgcgaagagacacaacacaggccaatgccagccagtcctgtaccaacaaacaacgacaacgacgatgacgaccacgacaacaacgacgtaggaagaactaaactaaacgctgctgtcaaagaaagcttgccaattcttgtggtgacagagggagtataaaattagtcagagaggaggcgagagccaagttccttcaccgctgacctgacgggccaactttgtgacactagtctgagggaggctgcagagaaacagtccaaagtgtacaaatataacataactgtgctccatgccccgcctccatacaggtgacttctcagttgggaagacaccagaatgaaataaagatcaaagttaagagtgaaatttataaccacgattaataggtttgttctgattacaaatactggctatggcgactgcaggtgcaggaagacatggaaaacggctgtcatctctgtgagtttatggtgacagtccactcatctgcgcaagctcctgacatgtctctccactcgcccacaaaggcagggcagacacagctgctggcagctctgttgcacaagactcatgacccaagcaagacagttcgaggacattctgaaaaaaaaaatccccggtgtaatggaacagtggagcgttgctctcctgtgctccgaccactagagtggcctccacaccctcctgagtcaggtaagagctccagttacctttcctgataatgggactatcatagtggaaagaccaagactccatggaggcggggtcacaggctaaaactttctaccactagatttcatcacaggatcagcacgggaagagtgtggacacaaagctaacccttagcccttgcattgtctaggccagactttcagctgagaaagtgcgaggggactgctacgggacacatcacacaggacagcacgggctcttcctaaacagtccatcttcctcttaagtcactgagctgcttcgaatccacacacgagtttaagtaaaaccaaggtttgtattctcatagacccttaacatcatattcctcctaacctcattgtcactattttgtgctaagaaatttctcaaggatacaaaagaaatcaacaagaaacgaaccccactatttgtagggctggggagcaaatccagggccttggacttgatgacaagtgttatcccactgagccccaagaaactcccttgcattttctctagcacagttatgctatagaatagtaacatctaacacggcctgtacagcctgtattcttcatatacaagcattcccaaaggtcaaacagatcctttcccctttaagacagcacaatggttaaaaacacttgcttctcttatttacagaagaagcctaggttgagttcccagagcccacatcaggcagctcatagctgtctgcacctgccatttctggggctccaatgctctcttcacacacacacacacacacacacacacacacacacacacacacacacaattacaggcaaaaaaaaaatctttaaaaactctcaaatttctcacttattcttaaattgcttatatttagatcttttaggagtaagaacggggaaactacactccatacctgaaagtataatctattgatcggtgaggggtggggtctcaagacagctgacagctgaaaactgttagtgttcaacctgtttcaacttaacatgtacactcatcctgagctgaaacggtttttattatttttcagtttcagcttcaaacccactttcattcctaaagatgcagagctaagcccaagcatacatagtagactgtactgtgcagagggccaggcagcagcgccaatgaccgtaaggcaaggtttcgtcattagacaacacactccctagctttaacattaggaaaaggcagaaaacaaaacagacacttcatgcccacaccacacacagttagagtcgtgcctctaaatggctgtggcatcaactgtgagccccaatcacacacacacacacacacacacacacacacacacacacacacacacacacgagccagaaggacatgggttctaaggggagacaagtcatcagtgccaccctctcttgtctggttggcaaaaggaaaggccagggcaacaacaggaggagcccgcatccctttatcatcaacatcaatcaggggacagaccacagctctccgaagaaacaaggggctctggtcagagttagagaaagcaaagtgaagtcagggcttcccacagacaccagggacttaagactcatcctaagtaacactcggggacaaagaggcctggcctcttagagacctaagttcagcttgccattaagtagatgctgttttatgctgtgaatgctgggtttgcccagcacgggaaagcctcatctgtaagggctggaaacttcctatagcaactcgaagctaaggatagctcctcacctggaaagatacaggggaagggaggcattttttaaagtcttgacgattcagacagtgggccttccagtgataaaaagcataccccttgctttgaaaagctgttccagaacactgacccgcaggggaaagtgcttctccgcttctgtctcgagactgttcttttcaaaatacacatttctgaactctagtcaaatttctgccacaaatggtccgtctccagcaggtggcctaggctcagccccaaggcaggcagagccggtgtgggtagggtttccagatgtccctccacggtccaaagatttgccagaaaagccaaggttcccctcagggtgatgttcaggtccatcagcaggcctgcagcaggttcacacttcccttcccaccctattcaagcgagtttctagaaaatattttccctttttgcttgtttactctggaaccagagggcttctgaattacccagcgtgacattcccacgaccacactgctccctgtgagtgggttccagaagggctggtcttttccacagatgtcggtcagtagagaacactgcatatcagccatgcctatgaccagctgggacacttcctgggaggcaaggagaagtgctgagttccttcctaggtgactcgtgtctgctgggttattctcaaactcccacagcacgtagagaatgcaggtcctcactggatggaagagaaaactggagctcaaatagacttgccagatgcaccgtggtccttgggtcagcagaggagcagccaagattccgcccagacttctctgagtggtttgttgtacaaggctgcagagagaggtgaccaaggcaggcagctgacagggttccatgggctggagatgttccattcagacagtatgcacatacaggcagccctcaaaggaattgataggggacagtgtccctggaagaacctctaatacaggctgctgcgaggtgttgcttcaccagcagcaagagtctaacacacagggggacatgcatacccacccagtggcaggctgctgcagatgcccgaaacaaaggttacagagccagatgtacagtagacactattatagttgtccaggtgatttttttattttctttccttcagtagcaaaaagtcacacatctgtgtctgtactacttacagttaagcacagtttcttcttccttttagtcctaagaacttctttagaaccaaacttgctattaacaagtctgtcatcttttaaaagaacaagccagggcatgtccctcaggctgtcttattctcatcctctctctctctctctctctctctctctctgtctttctttctctctctctctctctctctctctgtgtgtgtgtgtgtgtgtgtgtgtgtgtgcacagcaccagctataagcagacagatacactgcaatctgcctccaccagcaccctgaacacaaagtaaaaccaatgcctctccagttcatctctctatcttagaatccaatcacacacaactataaggcttgggattctctttaataaatgccccaaggggcattatctattttgaaattagaccgggttatccacacatacaggaagcaacagagaatagcctgaggttacgccactagtcatacagggcaagtgagagtagtgacaggcagtgtggttatgaaaaagaggattgtagctaaaattttaatctctttcttttttcttttcttttttagtttttttgagataggatttctgtgtatacagtcctggctgtccaagaactgctcctgtagaccaggatggcctcaaactcagagatccacctgcctctgcctcctgggattaaaggtgtgcaccaccactctcagccgctaattctctttctactgttatcccatgcagacaatagcaaaacacaaggaagagaggtgatttctaaaatcctgaattctctgtagccaatcaagttaaccttagtctaaattgatgttccatagccactacatggtcagtattaaaatgtggggtcccctgggagtgctaagtgccttcagagacaccataacctttcccctactgatgacaccttggggatgctgctgtcggaacaagcagcttttcagacaccagatctacctgaccttagattctcagcctctggcgttgtgagccaccattgagccaggcaacctggaattgtcacgacatctaaacagagtaagaaaacccacaaacaacaaacaagacctaggtgaaagattcagacctgttcccagagggaggagcagctccactgccaggccctcctccttgaatgaccactaacactgcaaagcccaggaaaatgagaaggagggcaggggagggcttcagggttctcagcagactctggggcagttgcctactcttctcactgtctccagagcccaggcaggttgctcagaggcctctatctgggaagccccaataggcagaaagagaattcaccagcaactgtctgttctcaccaaggcgggcgcctcagggaaaggatgactgaacacagaaaccgaccaggaagaccaagggtgctctgatatcaccaagagacactctgggccgagtgtcaggtctctggcagaagcacagtggcacatgtctgtaacctcagcatctgggaggcggagtcaggaggatcagaagataaagcacccagcacacctttggctacacataagttcaaagctaccctgggctacatgaggccctgtctcaaaaaaaaaaaaaaacaaaaaacaaaaaaaccctcaaaacttaagactgctttttcatagttccttctggaaataaaagagagggaatatttctgaactcattcaggccttgatacagaaagcaaacagcaccaacaaacacctttcaaggtataaaaataataaaatattcaattcaatccatcattgtacacaaattatgttttgcccaagtagaatttatcccgggcatataagagcacttaacagtgtttgaacactgtaccacaccatgccaacaggctaacagaatcatggtacaaacatttcattaaaacctaactctgaaaattctcaggaacttcggagtttggttaaaatttcctaatcttaataaatattaataaagattataaacaaaaattaataaagataaataaacaagtatccccaaatacctataactaatctagttaatgattttactctctaagcagaaaaccgacgatccttcagacaacctttatcacttctatctaacaagaccacaaggctctagtcagtgcaataaggcaagaaaaagaaatgagccgcccgctaacgtgcacatgacccgagtgtctatggagatggcccaagaaattacttcacctactcatgtgaatatgtacccatgttcttgtgtctataatagggggcacacctcccgtgccaacacagatatgctgggaatagatatgtgctttatgtggggtctgagttccattcccaacactgtaagaacaaaacacaaccccacggacaggctcagacagagcgccacaggttccaacgtctaggtgtcttatgttagccacgatggcatctgcaggatgtcctgcctttcacaggaagctcgcgctccagcgccgaggccaattgcataggacgctgaggggttgtaaagatgatggaattctgctctgccagtccaaagctgaagacattcacaaacacctcggagtccctgctgacaatcaatattcatctgctttgcatttccaagttcatactgattatgcttcagatggagagcgtgtgcaaagatcaactggtgtgagaaacatatgtggcataaaaaaacactaggaaaggcagtcagtgggtgtggggaaggttcttttttattaagatcatcagccgttcaagaaatggtttggcaagttgatccccccaaagtatatggaggctgctatcgagtaaaacgacttccaaacagtaaacaaaatgttcttgcaagattttttcaaaacagtgggatgcagaggaaactgtgccgacatctctaattcggtatctgcttgccaggtatctccaatgagacccttccttcctcagtgcagcaaagatacaagaacctggggttctgctctgtaggagagtctgccttaatggggaaagctttaggtccaatctcaacacatcagaggagagggggacatggtttttaaggcatactctgtctcctaccgcaaattgccagccgagaagaagagcccttggctaagctggacctctgtgcgacgaccagtggttcataccaatcataaaggctcctttgtgaaaatgtattttgcaataacttatcaaaagcagcattgaagattttaatggttgagtcaaaaatattaaacaagtccaaaagataaagagatcactttttagctgagcctaagtagtcttcaggcagaactaagattgtgagggtggtcagaaaaccagcagtggtggacaaaaactcttgagtgtgtctaatttaataacctcacatctggctaagtcctcttattctgtcagtaatttctgccccaccccattccatcccatcccaacataccccctccccaagcaaatctctccagagcttacggatagaaaccaactctagtgcattaaccccagtcactcgctgtgtaaactcacgcattaaccttcaagctaacatcatcccaatgtactggaagtgcaatctagttagcacttcacagctatgaccattaactctgcctaagaatttagactgtgatctttaaagctcagttatcagtcatctcaaattatgatgaattacactgtaattagcttcctaaatagaatgggacccaaaataaaacaattgtgactatcttcacatcagagaatgccctaactcagccactactcctagtgaacaggaaaggagaaaatatttccccagattattccacctgcagagaccattacttaagctcacagtattaagactctaatagcttccagagggttcttaaaatacacaggtttttaagcacttataccagggagctttgttaactcggcacatgcccatatgctgggtgtatttcgtggtagaatggtagcaagtgcctgcccagaagtacgtctgaaagcaatagccagagtagtacacaagactcccagctccttctgttaggagggcttaacagtccccagagtggttcatagagaacatgttttaattgacaccatgggcaggttcctaatgtcatctacaagtctgactggccggacacataccaaacatgattgtggatgataaggatcaaaataaatggtttttcttttggtggagaagcaacatgcagagccatccttccttgaggggtgtaccagaaatgtgcatagcccaaggcacaagctaagaggtcttaagagtcaaatctcaatccgccttttaacagtgactataggatctaaagtaattgttaacgtttaaagattgggatatctgacttcaaaatctgctcgcctggtgatgatgtgatatggaaacacttgtactccaagaactcatgtcctgcaggacagaatcaggggcaactttaatgctgatgggataaacactctccaaagtgccactgtccccatcagctgtcttctcatcagttgtaccaggcatcaccgtggatattttgtgccacttggttaagattctccaactgatctgggaaaagttgtggaagtggacgagtttgaggaaattttatgcatgaaatctcaaaattaagaatatagtttttagaaaattctacaactgactgtagccccagaaataaaaatctacactctaatctcatccatccatactaaattaaatcccttgaagcaaaaatgagcttaaaggagaattggggcataaattcatctttggggttctaagttggctctgctgttcatctttgcagaggctgtcttcagaaatgaccaagttgttcaatcacttccttttacatgcctggtggttattaaactattttataacacaatgacattaacatctaagcttagtggttaaaaccaactgtaccttggctataaactttggctagaaggccacagattcaaactttgcaactcagtaagttgatgtttgtacatccataaattcacgacacaaactttgcaagttaaaaaaaaattgttgagatctccatacatcttgtttctatcaaaatatagaatgaatcacttgactgattctatgaggctttaaatgctccccacagccttgaaaccgatattcaaacaagcacacatgaactgcctcttacccagctatggcttacccattgcactgagatagtggttgaaggcctggcaaggaggacttggggtttgtgttgacttgtcacaactcatgggtgccgggctcctgtctgtgtcaaaagagaaatacccactggaggaccgggacagcagagaagatcttctcacaaagatgaaaagtggggatctggtagcaaaagggccagggctggccggtggggccagcgggccctgagggctgccgtgggggcagcggtccccttcgccgtcgggattaccttgcggttctgtctgtagggaggtaggggccccaggcctgagctggggaggcctctcagcaggctgcaattgtccaccttctctgtcacactcagaacttacatcagaaggttgcttggccatttggtctttttttctgcaaggaaacagggaggggggacaacaaaacgattatcttcagcaaattaagttttaaaatcatttcatccatttgttaagaattctagagtcaacctcagattctttgttatgttgtttacttttctgactatctgccaagtaagaccaaaggggcgcccaaaataatgaaggtgtgtttattttgatgcagagtggaactaaatcggactaccaaacaaaacaaagtatcagctccccagcttgtggagtcagcctgtgcgctcacgcacacacaagcacagaagttttaggagaagcagctcgcgggacgtctacatttcgtgctttccttcaggacaaacttgaatcaagtctgaaaatcccagcgggctctcatttcccgggctcagatgcggagctggagcacaggagcgggcgcagatgcagagattgcaggcggctggccgccttccctgctccggccccattgtttgccgaaaatgctgagggcagcaagtctggagaaggtttggcagcggccgtcagtcgtagtaagtgcgtcacaatagagtttgtaactccgagcgcagctccgcccgggtcgagcgccctcggccgcaaggtccctcctgctgcctgccctgcgcgccaccccaaacactaaaccacttctctcgggtgcaaccttgccggaatgtgcacacttccaaagagggccttaagagacatccctttgaaagttccacacctagctgcgcgttcttggcaatacccggcgcaaggctgactctttccctccccgggccaccatgccgagactcacgtccgccccttcccttccgagcgcggcgtgttgcgccgatcgaacgacccctgcacgtcgccaccgaggaggcaagggaaacaaagccgggtcctgggctccagggccccgcgcctgcccgtccgccctccgccacgctccgccggggagccgaaggtttcgcgcgccgcgcctctggcccgcgctgcaccggccgccgccgggatcatcctccgcctcctcccgctccgcccctagcgcgcagctcccgccgccgcgcgggcaccgccagccctgcgcccctggcgccggctgccagtgctcccccattggcccgcgcgcagtcgctccccatcgtaaccaatgggcagaggcggtgggggcggcgcctacgggtcaggcagccgaaggcaaggcgattgttgacaaactcgccgcccagcgccgctcagactgtgccggccaccgcagctccggctggaacttagggggccgggcagcttcgctttgcgccccgccccacccctgggccaggccgggacggcgcgcgctttgcgggaattcccgccgccagggcagcgggacattagagacaaagcgagacacgcacccctcggagatccgcgaggccacgatcgcactccaggccattccgagccaagtccctaatgcctccgcagtcccctgaagaacttctcagcaacttcacctgctgtgtccccatgtgctaccgagtgctaccgacacgaaccaaatatgaacgaccatctcgggtctcgggcatgcacatccagacctctgcccccactgttcagttagccttcctcaagcagtgcctgccccgtgggcaataggcttgcgagctcaggggtccgccagcctatgcgactgggtcccggtgcaatcgggctaggagtagtcggctagctggggcttggaatacgcgtagcctaagtggtcctaggggggttacggggtttcttgtctcctgtagatacggtgttcctcaatatccacaggacggtcgcaaaaggaaccgggccgccagggacatccggaaaggaaattgaccactatggccaaactgacttgaatgggtacaagcaaagtctgggcgcgtgtgattttaatactcaaacctccgcaatgaacccgcgtcagcgaagagttaagtctacccgcccgccgctaccgcgcggctacttctcccgggccgtctgggtcgccgcgacgcttcccggctggacgcactaccggcaccacgaagcgggacctcggctccaagccgagaccacgcgccctccttgcccgcgagagatgcctcagcggcccctcgtgcggcattgcgtcccaacccagtcttcggctaagtgcccgcagcttcagtgccgacaacccttccccaaaagtgccttggcacgcagcgacctcgacccgactcccagcgttcgcctcctgcagccacgcgggacaaaccagtgcctccacccgcacgtgcgacaccagagacagatgaagccgctgcggcgcctgtcttctatccatccccagcctgcgccccgggagtcgcggagtgtttaccttgcgtttctcagtccgagaatcagagtcagacattgggtggacgagggccaggggaagggcgccgaggcggtggcggcgggagcagcggaggtggtgtgaatccaagtggaacacagctcgcagagcggctgcaggaatccggtgacggcgacgatggcaaggaccgcagagctccaaccagctggtgacccagtgcctgcggggagcgaagtgaaagcagcctgctcttgagactctgcggtagttgagcccccgcccccgcgcccaatcaccgcgggctccgcccccgtttagtccggcccccggcaagccggaaggtaagccccaccccccacggcccccaggccgctggcgcgtgcaggctgcgacaggtagtggggagggtggccccgccggctgtcctgcagtttgcgtgcgccgcccaccccggcgtgtttaccctagtgtcttggcctgcgggcagctgcatgctcgcccatcctccactcagaatgtacccgcccctccccgtccgcccgtggcggccacctcgcagagcggaacttagggggcgctcagggtacactgctctgtgtccagcccggccgcgggcgccagttggaagcctcagaaggcgtccctccgcccttgctttgcacagcttctcagccccaaaccatgaggattagattggtgcaaggatgggcactggcctttgactgtcctttcctagaattcctgacctccgggggactcagatcagcaagatgctcacccctcttcgtctgcgcctcaagcgagattcttcgtcgccgccgccttctgccttctgtcctcctttaggctctccttagtgttgtgtttgtgtgtgtgtgctgttgttgttgttgtggtttatatgtttgtttccctagtgcccagttacttaagaggcagaggtggtggtgagaaggacagttgagagacaagagaagcgggaagcttcagggagcgatgggcgggcacgacaagcatataaaataggggaatgagaaagttagctggaaaagaataactacaaggaaaaggaggggggctaccaaggaaagacggttgtgccatgagcggtgttgggagcctcgaaatgtttggggctcacagtgtacgccaggaactgtctatccatcggtccgccgatgctggcgaccatggagcagcggagttcaggccgagctgggaaaaccataagggggtcgaaaaaaaaatcccttgatcttcctgaggcctttgtgattccaacagaagtctggaagtcaatggcgccatgtgcatccccacccccagccccttctctcatagcggcggcccaaaaaagctgctctggaaatggaacgtcccactccccacacgagattaaggaaactctattaatgggctacccaacctgcatccaggctggcagtaagtaggacgtagccttttcttgcagaacaagtgttgcgacctgccgtcccaatcaatgttgggccatcttggtcattttggtgtttgtatgcggatctaacgtcacggtgacacagcacagccccatgctaaagtctagcttctcaagtgaatcctgagtgagatcaaagaagccattggttcccagggaagctggggtgttcaaggcaaagccttgctcctgctggaggtcaggggtgatcgctacaagagcgcacagggcaagggcgtggatgaagtcaagtacaccgccgatccaggtctgtcctgaccaaggtctgtgaagcagtactgtgccttggccactcggcatcccacccatgcagcccaatctgctactgctactctgggagtccaaagccagcagcaagtattctgcgccctcagcgtggagctaggcgcctcatacttggactagaaaagaaccatacaggggtgggaggtgggggtggggaagcgctggtgtttctttgtaggagcaggctgctctggagtcttccgattctgcaaccctggacatgctaaaagaaaatatacaggcactggggaaagcaacgggttgggctatgtgctcttttttaggtcctaattaggaagccggcctggaggcggaggctcttgcatcaccagggaacaaggcagtcaggggagcttccaccaagtgcctcaagtcaggtagccgcgggcctttgggcccattcagctttctctggctgtgtcggaagaactcctgggaccggatttgacagcagagaagagcagcgtgggaagggccagtgggtcactggtgccttactgaggctgccagcggatatggagggaggggagcgagtcgatggctagagatgagaacgaaactgggcaacaccaagtcagaacacaaatgagaaattcatttccgcctgtgtaatctctccaaattccaaaatcactttattccaattattccccaggccagccagccctacctctccaagccgcgggagcatctttctattatttattaatctttgcacatctatgcttttctgaagggttggtaacagtttagcgcggaggagcgtttgtcgcgcatggtcgtgcggtccggagatcacctacctggtgagactagggcgactgcaggctcaagctctccgctctcgccagtgcatttcctcgcaaagctggagcaagcctgattcacgaatcatccctcgctgaacttttgcccgagcttggagagggtggagctttcctccaccccttttgcctaagggtgtttgatttttatgttttgatttttttttttttaacccagcgccagagcttttcgaagtctctgggaatatgagtcaccactgacagtagagatctttggtggcaccatgcggtgggcgaagacgattgtctgggggatccagggccatggctgggagaagtcaaggtaaaggccaggcgaggctacaaaccaggctaagtcactgtgatagtggggtatccatctatggctccctctcccggacaacttgccctgctcctcgccagccttagctggacctcctctgccagaccaaaatccccaaggtggctgccctgcacctgccactttggcctctgctccagctctggccaaatacttggaagatgggacactaaatttctcgcctggctcacagcttggccagttgagcgcgcgccgcatcccgcacgagcggttgcatgggtgccgggtaggcggcctcggcagccccggggttggggattcctgtttttggtgcacggatggtgatgtgtggaatgttgaaggcagagatcaccttcagggcgtcatccttcacggactcgcacaaattcagcaactgcaaaacatggcacagagggtcaggtcagatgtgggcgcagtcaaggaggacttgtcgtctgcccctcagaagtgcagaaaatgtgggttccccacaacacagaaagttattgtttctaaacaagctgtgacttctttaaaatctctaagactctgacccccaggtccggtcgaaacttagaggggtttttcccccccaacccccggtaagggactgagggtagcggctctttgctaagatacttcggtaactagagacctagctctgagaattaatgctgccttctcttcattccttccttcttcccgcccttcctctccacctctggagtgccaccctctggtgcacagaggcaactgacgagaacttctgactagatgagccattgaaaagatctgcctcgtctcaccagaagggtgccaacagagtctggaaggcagtaaggagggtttcagagactgctgcggaccaccaaacaaaccaaggctcggcgttaatcactttccggcctctccagttgcgcagaatcaacgagtggtccatccactctgctaggcagtggaggtccatcaggacagacttcccagaagaagggagggaggtttcaggacagggctgtgtttctatttcattttctatgatttagatgccagtaccgacccgcccactcatccctgcaagaagccaaaataaaggatgatttttctagatctgaacaaggggagagacctgttttcccttcccctaagcaaattcatactgtactctgacatttgaggtcttcgttaagctatacatgtcttggactgactgatcacaacaacctccaggcttcatagtttctttttgtagctttaaaaacacttttatgggcccaactttatccttgtgtgctatctatattttaagacccccccccatctgccctccccaaaagaaagaggaagaggaggaagaagtgtgaaggggagtgcaattcaaggccctcttccttcaaaatgcaccccacttcccagtgatttctaatgaaaagcttcgttcttcacacaccttggttaggcaccatcaaataagttccgaaatgactttgatcacatttgcaagatgcgacaagacagactgtcactaaccaagatttccaagtctgtaattaatactcttgacaaatccccaactaatctgtcaactcttgatgctttttaccacacatttcaaaaccacaagatggtctacccagcccctgaacttgccacgtgtactcatgtaattattcaagataatgctccctgtgggtttcattaaggcagataggccaactcttgtcatgcagcggccaatgggggaaactcactttgaaagaaggcttgtgaaagaacacaatgtgtttggtttgtctagtgtgaaatatagacttagaggtagaaattatggaaagtgatttctatttgctataagaaagagttaaaaaaaaaaaggaaagaccaaatgctgatgaagaatggtatttctgtgctcctcattctccaggagtgagaccccaccacgggtgtcagaaaagagcattgaactggctagggaaaccaaacgttgactgccaggatagtttctaaacctcaggctctggaatagcctgaagcaccctctggctttcccatccttatatcaacagaactcagaatatgtagctggaggggtgaggtggggcggggcggggcttccacggagcatgcccattcgtcttttcctatcaggagcataatctttaacctccttttactcccagtattcgaactgtggtactgtcctgcatcagagaccacacaggacttgaaaagcttacgtgcatactacacactgcagacagtcatggcctcttacagcaggaagctactgcaaagtttcagggcctctaaaaaaaaaaaaaaaaggcggtttgggtagggacctggagatatggctcaatggttaagcacacttgctactcttgtagaggacctgggatcagtcactgacacccacatggtggctgacagctgtccctacctccagttccaggggatggagttccctcttcagccccctcatcctcaccctgggcaccagggacatatatagtgaacatacatacatgtaagcaaaaataaatcttaaaaatacaatctgcattaaaaaaaaaaaagcttgaatgtggactggatagatgactcagtggttaccagcccttgctccttcagagaacccaagtttgttcccagcacccaggtcaggtggttcacaactacctgtaacaccttttccgagggatctatcaccctcttctggcctctgcaggtgtgtgtgtgtgtctgtgtgtagtatgtatatggtgcacatacagcctagcagacacacacagagatgtataagataacaaatacaagccagaaagcaagcagaagcatggggcatcaggaggccccgagtgtggatatgtgactgtaacccaggggaagggttcctgtctcctttgattccatatgcccacctgcttgcatattttctttcttctctcctgtttgactcttccagtactgccttatccagccaggaaaaggaggtagcctggaggcagcagtctctaagcttcccaccccctttcttacttccattcagcaaggccctggccatgtaggaatttgcagggtgtgtttcctgaccactacctgctctctgtgcaaggtttgcctgcttctgtgtgtcttgcctctgtttccagctccagatgtttttgggggaaacccaagctgaaacacatggagagatgaatagctagtcaaatgagcggctccttccctgcttggacactgtgctatgctctttatatctgtcccacatggctcatttagcaagtagaaggtgaaagtgaattgcacaggctaggccttgaagaggctctgaggaccctgctcttgttctcctgtgctgctgataccgctagctgtccagcatcacctgctgggggatgggaacctgaggaagaaatgctaaggagcctaggccaacaggcagcccccactgctgatgcagcaggggtcacctcgcctccccacagcccagtactgttgtgcccacttgactgcaaccccaggaatgatcacacataagattacccaaagaacttcagcctcacagaagtggaattaattactattaatggtttctgcccagaaatgtaaagcaaataagtttgctatgtcaattgtaccccattttttgaaaggaacccgatggagtcgacatccatctctagaggactgtttggtatttccaacagtaatttcctgcccattattttcagccatcttgattggttctgatgaacctagatattgagaaaacaaaacaaaacaaaaccaaaaacaaacaaacacacaaacaaaaaacagaagaggaagcagggctggggatggctcagcagttaaaagtgcttgctgctcttgcagaggacctggtttcagttctcagcacccacatgtggtcacaactgcctgtaacttcaaattcataggatccatgtgtgcgtatatacacggatacagagacatacacacacataaatgaaaaagaaaataaatcattttaaaaagcaagggagtcttccaggctggagagatggttcagttgctgaagtgcgtgccacacacgagaggacctgtaccgatgctagcaaatgggcggcatcagctaaacaggtaagtctgcagctgacatgccagccagctctggggagtggaggaggaggttcctgggacttgctggccagagagtgtgtgtggggtgtgtgtgtgtgtgtgtgcgtgtgcgtgtgcgtgtgcgtgtgtgtgtgtgtgtgtgtgtgtgcagggaggagggagagagaaggaagaagggagagggatggagagctactgaggaaaacatttatatggacactggctcccacacggtccacacttacatccaggcacagacatacaaaggaaagggtattttcaagtaaatgagaaaatgtggtttaatccagagatgtgatagggacacaattcaagctattagtggaatgaagtttctatattatttttgttttctttttgataccgggttacactatgtaaccctggctagcctgggacttactagatagaccaggctattctcaaactaacaaatatctgcccatctctgcctcttaagtgctaggatgaaatgtgtgcagcaccatgtctggcttctgtattattcctggttaatatctttgtccctgatgtgacatacaactagtcttcttactaaacacccagaggccttgttctgactcagtccctacccatttgtctccctggaagatttgtattttgactaattctgaatgccaactttattggattaaaaaatattaggctaggtcatggtggtgcacgcctttgatcccagcatttggcagcagggacaggggagctctgtgagttcgaggccagtttggtctacagagcaagttccaggacagccagggctatgcagagaaaccctatctctaaaacaaaacaaaatgaaaaagcaaacaaattaaaaaaaaagataatccttgatatcaatctctggcctctacatgcatgtccatgcacatgagtgagcacacacatatgtgctcctaaaaatataaacacactcatatatatatatgtatatacacacacacatatatatatatatacacacacacaaatgaaaaaaatggtggtgttactgctgctggtggtggtgatgatggtggtggtggtggtgatttgtaatctacaggcttgaacccaggatctcatgtttgcctggcccttccatgattattatcacagattctctagttagcaataaatataatttctttatgcgctggcatttcctttagtgagaatgctaaatcactattacctaaaacaagagtgctgacacagaggcatcaatttaaccacttaataaaagcgtctgacattgattcaaactgctgctgattcataagaggaaaagtttctacagaagtcaagtgcgtatggctttccctttagaatacaggaaaccatatgaaaggatcagcaatggaattaaagtaaccacagggctgcgtttggtagcatttctaacagacaaaggcatttacacataacgagaaagaatactcaattaggtggttgtcacagaactgcagcacggcactttcacacctttaataccgaagaatatggtatctgaatcaactgatggtttagtctgataagcacataactgagagggagcgattttcaattacaaaaatttcttcaagggcagaaacctcacaaatgcatgaaatacagcactaaacacagccatcccttcggtgtctccagggagtgcttctaagcctgagatcccttcttacagacaggaaactgtgtgtgcttaaatcctttagctgggatgcagtgagatttgctgccccttcaggtcacctctgcgctccccaccccaccagtctaatattccacaccgtggacgtgcgggagcagcgctgttattgcgctccaggtttcctggttctcatgtttcggctcttcctttagagtctctcacatcagtaagcccacatttctgtccgtctgcattctagacagccgctcaccccatgtttgaagcaccaggggctttggtttatccccaaggacctcatttctcgacttcatcattttgagcacagctcctcttcctcgtacagttttgcttggtccagattccttatcttcttcacacggggagcaaagctctctatgtgcctttcccatcctaactagaactaggagcccttacaagatgctattaaaagcatttgtgtccatgaaactcaaaagtccaggacacataccttcttggtaataatgataaatccatatgctaaagtccagtaggagatggacttagtagacttaggtgtacaagccaatgtacaagaataagtgtgtctacaatacatctggaacatataactggaatttgtacaattaaaatgtgccatttaatagctttaagaacatgcaaattaaggcttaatgtcgtcaggtatgctcaagaattctattgctaattaaaaagatctgctggagagaaatgaccggatggagtgacgtgccatgttcacgttcaacagactgcaatagcatcaactctttccaaatggagaggagagtcaatataaatgcaggctggaaatatacaggcaagtctaaaatgtatagagaaatttaaaaaaataggatagccaaaaggatagatacaatacataggagatttgtattatccaatataagattgattataacagtcaagataaaattaataaaaataatagacaagtcaatgaatggagttaaatatgagttaaatcccctgcagcctcctaatcttatgttcagtcgattctccccagagaaggcaaaatacttgaatgggaaaaggcaagtttattaacatgtcatgattagatacttggctaattttatgacagttatcccacttctacctcaacctcatcctatgctcagaaattagagataggaagcagacatcgttgtaaaagcaaatgccatttgctttctaggaaagcttaagggcctatctttacagccttcagttaggcaaaaaggttttagaaaagccacaagggcgcgagtaaaaaattaaaaaccgatgacttatagcccaccaaactttaaagcctgatgcttttcaaaagatattaagaaaatgatttggccacaggatgggaaaattaaaacttcttgtattgatagtgtctagcaaattcctaccacatagcattatgcagattttaataggacagaggaaaaaatcatatatttcacaaaaatattaagacatgtcaatgagtagtaagtacttgaaagggttatcaacatgatcagatgtcagagagatgaatattaacgtggtgagatagcatgcctattagcatccatggcggctgcctctctgagacaatgggactctgtatcagtggctgtgcctgaggtcacctggaggtgaaggccagttgctggaggccatgacacagcagagttttagagcaaagagccctggggagggagtagagacagggagaggccagagaagtctacataaagaaatacgtgtgtgtgtgtgtgtgtgtgtgtgtgtgtgtgtgtgtgtgtgtgtgtgtgtagggggaggatacagaggataacacatcacagacatacactgcacagaaggagccagtctgtctgctccctcaagttctacaagcagaactgagttacacacacagtcggaactgcaggggtcagggaaggcagggactgaaagtggctcccagaaacttctccaacaatggacactttctccaacgtgattaaattctgtgttatatagtctgccctctgtcaaaactcaccaaagtatactgaaatttacatatttcagtgtttgcaaaatgagccccaatttccatgttaatttttaattaatatgtttaaggtagaagaaaaagaaagacaaagtcaattttaggggaagcagtatgtgactacaaactttaaactttagtttttgttaaagataacagaaaatagcatctaccatcactatatataaagggtgcattttgactcctagaaagtagggaggacataataatatagtttaacatttatgtagtatgtatgagagtgttaaaacattccacaccatacgtgtggaagtcagagaacaacttttggtagtttggtagcctgttttcccccttctaccatgtggaccccaggaactaaactcaggtcatcaggcttggtggcaagtaccttgaccaactgagcctactcactggtccaataaaacattttttttaaaatggaaaatgcaatgcagagggatctcctctgtttggaaatcggtctgtagggccagctatgactgggagggatgctctagattagatgaaaggcaaaaaggtcccaaggtcaaagagtgtagcaagggtaggggtgggtctgatgctaaggttctgtttcccaattggttcttgatccatcagtaaagatgccatgggccaattgctggacagaaggaataggcgggacttccaggtccctgcagacaggctagcagacataagggaaggaaagagttttggccatgtttcagaggaacgtgtgaatccatgtgaaatcttgggagtatcagccataggctgcttctccagatgggagagatggggtgttgagctgggcctaaaggtaactgaacaactaaagttgaagacagatttagggtactgagctaagagtattggggagggcatgctagcctcagagattaataatgccctgcaattgagccaataaggcaagttgaaattgaacaactgtgtgtgtctgtttttcatcctcggattcaatattctttgggcaggggctggtggcagtctgttcccggagcttagattaggtagcaaaagctacaggcaacaaggaagactctttagcatgaggccaagggacaagaaatggctcaggtaaagtgggactccaagagtcaactgatctagggcctgagggattcagaaagttctctagaaaggactctgggccacagccatggcttcatgggagcatgctgctctagcatgcttgaggctcagttccagaacacttgcgtaaatcccatcctatcctctgtgcagaagtcactatcaatgctcattctgagaagacagattccctattcccttaaccacagaggacaccctagatactttagtaaaacaaacctgagaagacttgaaaggatgaagagagaaacagatctctagggactgactcc

SEQ ID NO: 5 - DNA, 105029 bp, Homo sapiens
attaaggatatctcctaatgctatccctcccccctccccccaccccacaataggctctggtgtgtgatgttccccaccctgtgtccaagtgtcctcattgttcagttcccacctatgagaacatgtggtgtttggttttctgtccttgcgatagtttgctcagaatgatggtttccagcttcatccatgtccctacaaaggacatgaactcatcattttttaggactgcatagtatattatggtgtatatgtgccacattttcttaatccagtctatcattgatggacatttgggttggttccaagtctttgctattgtgaatagtgccgcaatgaacatacgtgtgcatttgtctttatagcagcatgatttataatcctttggatatatgcccagtaatgggatcgctgggtcaaatggtatttctagttctagatccttgaggaatcaccacactgttttccacaatggttgaactagtttacagtcccaccaatggcgtaaaagcgttcctatttctccacatcctctccagcacctgttgtttcctttttaatgactgacattctaactggtgtgagatggtatctcattgtggttttgatttgcatgtctctgatggccagtgatgatgagcatttttccatgtgtctgttggctgcataaatgtcttcttttgagaagtgtctgctcatatcctttgcccactttttgatggggttgtttgattttttattgtaaatttgtttaagttctttgtagattctggatattagccctttgtcagatgggtagattgtaaaaattttctcccattctgtggttgcctgttcactctgatggtagtttcttttgctgtgcagaagctctttagtttaattagattccatttgtcaattttggcttttgttgccactgcttttggtgttttagtcatgaagtctttgcccctgcctatgtcctgaatggtattgcctaggttttcttttagggtttttatggttttagatcttatgtttaagtttttaatccaccttgagttaatttttgtataaggtgtaaggaaggggtccagtttcagttttctgcatatggctagccagttttcccaatgccatttattaaatagggaatcctttcctcattgcctgtttcagtctatccaatttttagatttatttctcattgtctttgttagagacgggcctcactttgttgcccaggctggttttgaactcctgttctcaagtgaccctcccgccttggtctcccaaagtactggaattacaggcgggagccctgcgcccggcgaagcctgtattaagcccttttatgctcactctgcggtactgcagagagcagggaggaagcagaggtgccctggcatcttcagctggaggtgagcagggtgctgagggtgtgagaggccgggcgcctggggatgggaggcgggaccgcatcttcaaggggacgctgccaccctaccccagaggtcagggcctctcgcccagctctggctctgatgtcctggagggagggagatgctgttgcgattcagaagatcaggggagggccacccccattcgagaagagtgaaaatcctgagcctgaagcagaagtggaatcggttggagccgaggctttagagggtggcgttgggaagagggtctggcgccgccctatggactgttcgggctcacgaggctgaaggctccgaagaccgcgacctgcgaaccatgggaaggttccacgcggatgaaggctacagccccggccagagaccctacactaggcctggacttctccaccggcttatgacatgatagctcaataagctccttatttaacgcactgttgtatcaggtccctgtcgcagccactggccctatagcctaataaaggagcgggtgcatgcattggattggtgagctaccgccacagcaacgcgtcctaatcaaccatcccaaacggcagttggaagaaagttcttgcaggcctgtgcttgggcttgaacgctgggccggccgctgcgctctgtggctccctgcaggcctgcggatcggccagggggctccgatccttttggaccgaggctgaagcaacggctgcaccagagaaggccttctggctgaaggtggaagtgcacggggtccgcagaaccgcctaaggcgtcttcaggcgtgggttaggaactagcaggctctcctttgtgcttcattccatggccagagcaagacacgtgggcaagcccaaagccaggggctgggaaagtaccctccacccacaacgaaaccatggcaaggggtgggtgcatgtagggctgaggaattggggccaatagtctatctatcccgtgaggagacctgctgtgggggttgcacagcctgggtctgcaagcttcactgccctcggcctgggcgtcctgtgctcctttggcctctctgggttaggaaagtatcccttttatctctgcaaaggtcagagtcccagtgtctgctttcaaatataaaaccagctattgggggtatgaccctgaactgtatgagggccgccctttcagtaattctctctccaggagtgagaacctccctttctcaattttaggttagatgggtctgagtgtgtttagtgcagttcatggttgagcaggaagattagaaataaggacatagagacaactattttcttggtgttaaactcattttaaacaaagtggaaagtaaaggatttagtagggaaatcctttcaccttggcaaaagtatagtctatctggtcacaactgccacagcatgatccttggtggcttggcacaagcattccctgtcctccatcaagcccataatgtccctcagtaattccactgcattttttttgcagctgctgtgtgctggagctgtggggaacccctcggtaatctcttgtctgctttttaggaactcctatctccagatcttcttttacttcccaagccaccccacttctttgaaaggtctgcaggcttgtctacctcttctcagcttgctctgcatgccttggggaagctcttaaagcatggatcatgaaggaggggggcggaggagagggaaatgcatgtttccacaaatggaccatgagcccaccaggcaggctctagatggggaaaaaaaccccttacattatcatgtgacttgtacaagaaaaaaggtacctgcaaagggtcaagggaccagagaggagaacttgagaggtattctggaggaggcgacttttgatgtgagctttctaggtgagtaaagggcattgtagatgaaaggactggctggtaagtggccagcagatagaaatacaggctgagctcaggggagggtacacccagaggtggggaggaaggtaggaagtgaaaaaggaggctgggcgtggtggctcacgcctgtaatcctagcactttgagtgtccgaggcaggcggatcacttgaggtcaggagtttgagaccagcctggccaacatggtgaaaccccatctctactaaaactacaaaaattagctgggtgtggtggtgtgcgcctgtagtcccagctactcaggaggctaaggtatgataattgcttgaacccgggaggcggagcttgcagtgagcgaagatcatgccactgcactccagcctgggtaacagagtgagatcctgtctcaaaaaaaaaaaaaaaggaagtgaaaaaggaaagggagaaggccagaatggaaaggagctaaagacagactgagcaaggcagagttggaggccagcgcaggaagggctcaaaacatttgcaaggacagttcacatcccactggtatgtcagcttagatttaaagcactacccagagttattcaaagccagacaggagaactgcaggcatcagaatgccctggggacgggtccaaaatgcagaatcctaagcccctaaagagtcactctacgatgagatccaagaatttgggctggatcccacttctcctgtcccctgccctcaccactgaggacctaaagcataataaaaggggacaatctctgccctaaataatcccttttggcagttactttctgttttcaaacttcaaatctgtcctctgggactaacctaggagatgagggataagggaattaacatttatggaaaatggaggaacccacataggcacctgtgttcacctaatattccttaccaagcagtgggtgctgccattatctccattgtatggatgagaaaacaggcttaaaagaggttaatcgaccaggtgcggtggctcacgcctgtaatcccagcactttgggagaccgaggacagcggatcacgatgtcaggggatcgagaccatcctggctaacacagtgaaaccccgtctctactaaaaatacaaagaaaaaaaaaaattagctgggcgtgctggtgggcgcctgtagtccaagctactcaggaagctgaggcaggagaatggcgtgaacccgggaggcagagcttgcagtgagccaagatcgcgccactacactccagcctgggcgacagagcgagactccatctcaaaaaaaaaaataaaataaaataaagaaaaaaagaattagctgggcatggttgcgcacgtctgtagtcccaagctactcgggaggctgaagcaggagaattgcttgaacccggaggcagaggttgcagtgagccaagatcacgccactgcactccagcctggtgacagagcgagacttcgtctctaaaaaaagaaaaagaaaaaggaaaaaaaaaaaaagaggttaagtaacttgggcgggggcggccagagccacagaactagtaagtgatagaagtaggattctcacctagttctttctgatgctagttggagaggcagctttgttcagtgggttttagagccagggctgcttaggtttggatctcacctctatcccatattatttgctgggacttccttaaaacagtgtggggctcagggcaacccaatgagtatggggctaagacagctgccaccgagtcagcatttttcacaggcccctcgagatagcactgaagacagaaatttctaaattgaattttattgatgttcaggaaagagaagtcagtcacaaccccccttggccctcagccccaagcagagagcccagagtgtgtgacctcaggcaagtaccaaaacctctctgtgcctcagttcctcatctgtaaattggggcaaatgtcagttgatgtgaggattaaatatgatgatatcctggctgggcacaatggctcatgcctgtaatcccataactttgggaggctgaggccgctggattgcttgaggccaggagttcaaaaccagcctggccaacatggtgaaaccccatttctaccaaatatacaaaaattagccaggcatggtggtgcatgcctgtagtcccagctacttgggaggctgaggcacaagaatcgcttcaacccaggaagcagaggttgcagtgagctgagattgcgccactgcactgcagcctggatgacagagtgagactctgtcccaaaacaaaaagaaaagcaaagcaaagaaagaaaaggagaaaagaaaagaaaataaaaagctgatatcctttttttttttttgagacggagtctcgctctgtcaccgaggctgaagtgcagtggcacgatctcggctcactgcaagctccgcctcctgggttcacgccattctcctgcctcagcctcccaagtagctaggactacaggcgcctgctgccacatttggctaattttttgtatttttagtagagacggggttcaataaaatgaagcgaaatggggatgaaacataatgaaccacagcagttttctgtccctactgttcccacccttctggggagcaagatttcaatggaatcttctggtgcttctcccgacatctcttgcatgtctcattgtttttattattattattattattttgagacacaaatgagctaagcgctacttcgaattattaaagcccatatcactggagaaataagatccctattctgaacacctagcaataagtaccataatatactttacctcttcatcttcctcatccaggtattttattttaatactattcagatcaaatgaaacttttacctacaaaagaaatacacatttaaaggcaggttataatgtacatagaagtcaaaggatgagttgggcatatttcattacatactaaatattttatatggttaaaaaaatccacaaaatcagaagacaacaaacaaccatcacaacccacagcaaagggttaatatctgcaacacacccagagtatcagcaaaactgctaatgatacaattaacaacccaggaaaaagtatacataaaattcatagaagaagtcagaacacctaacaaatacctcagaagactttcaaactttctggtggtcagaacaatgcaaattgaaagcaatgaaatgtcatctaatcagaacagcaaattgtgtgtatgtgtgtgagcacaaaaaatgggaagacttgggttctagacacagctctggcccattactagacataaaactgtgagcaggtcagttcacctttgagcttcagttctttaatctgtaaaataggtctaatatgtctgttttgccgatctcacagtgttaccataaggatcaaattaaaaatgaatatgcaagttctttcaaaatgtcattcaaatataaaaatattataatacaggccaggcacagtggctcatgtctgtaatcccaggattttgggaagcagaggcaggcagatcgcttgagtccaggagttcgagaccagcctagccaacatggtgaaacttcgtctctaataaaaatacaaaaattagctgggtgtagtggcgcaggcctgtattcccagctactcaagaggctgaggcaagagaattgcttgaatctgggaggcaaggttgcagtgcgccaagatcatgccactgcactcccgcctgggtgatagagcgagactctgtctcaaaaataaaataaaaaattggcccggtgtggtggctcatgcctgtaatcctagcaatttgggaggctgaggtggaaggatcgtgaacctaggagttgaagaccagcctgggcaacaaagccggaccctgtctccttaaaaaaattaagttcaattaaacatttttaaaaataataaaccagtcattagaaccataaacctgtactgtttttgacaatgtaatgcactgccctgtaaaacactacaattaagactgttattttaaggaccctgaagtctgtgaagatcaggcacttttttgaaaccctaagataattatcccccagttttctccattctttgtttctacctagaaccaagttcaccaccaaaacgcagtcctgctgacgtcaagtattcattcatatgacatgtaattactggggtcgttaaaatttgggcagaatctttgtcaattcaccaggaccttaggcaaaaaatcaggaaaatgaagtgactgactcagtctgccaaaagcggatattctgaaataccactttccaactttaagaaacacttcctgccaggtgcggtggctcacgcctataatcccagcactttgggaggccgaggaaggcagatcacgaggtcaggagatcgaggtcatcctggctaacgcggtgaaacccccatctctactaaaaacacaaaaaattagctgggcgtgatggcgggtgcctgtagtcccagctactcgggaggctgaggcaggagaatggcgtgaacccgggagacagagttcgcagtgcactagccgcgatcgtgccactgcacttcaggctgggcgacagagcgagactcagtctcaaaaaaaaaagaaaaaaaagaaacacacttccctactcgttagggaaattaatcttcgtctctttttctcaaattacacaattggaaattaatttagatattctggagctcctccagctggtgggccaactaagagaaaacaggaagtgggagattctagcttagctggaccatatccaggtctccataaggaactctctttggctggcatgtaaaaaaattctttcagcaagagcattaatcttgaacgtgtgtaaacacgaaagctatggttaaccctacctgctccttaggtctacagccagtagagtcagatagctgggtcctaggccttcagctttcataattgacattattgttaagtccatgtgactgactcaccttgtcttggcacaagttagcttttcctccacatcgatttttttttctttcagcctcaacaaaatccctttaatgaaacaaacctggcaacccgaactttggttactgtctccaccagaggcctgtacaagccaagttatccaagctgaggccgggagtggtggctcatgcctgtaatcccagcactttgggaggccaaggcaggaggatcgcttgagctcaggagttcaagaccagcctgggctggtctttgagaaagcgagactttgtctcgaaaaaaaaaaaaaaagtgtggcctgaaagttgagtgtttgacaaaaaggagaaacagtgcctttccaaaaccaaaggtccctaaccaagatctctttaacggggtctcgaaaaaaggagaatgggatgagaaggatatatgggtagtgtcattttttaacttgcagatttcatcctagtcttccagttatcgtttcctagcactccatgttcccaagatagtgtcaccaccccaaggactctctctcattttctttgcctgggccctctttctactgaggagtcgtggccttccatcagtagaagccggatgttcttgtgtccgaaattggtgggttcttggtctcactgacttcaagaatgaagttgcggaccctcacggtgagtggtacagttcttaaagatgatgtgtccagagtttgttccttctgatgttcggacgtgttcagagttacctccttctggtggattcgtggtctcgctggcttcaggagtgaagctgcagacctttgcggtgagtgttacagctcttaaggcggcatgtctggagtttgttcgttcctcccgtctggagttgttcattcctcctggtgggttcgtggtctcgctggcttcaggagtgaagctgcagacctctgcggtcggtgttaccagcagataaatgctatgcggacccaaagagtgagcagcagcaagatttattgcaaagagcacaagaacaaagcttccacagcgtggaaggagaccagagcgggttgctgctgctggctcaggcagcctgcatttttttttttttttttttttttttttgagatggagtctccctctgtcacccaggctggaatgcagtggtgcaatctgggctcactgcaagctccgcctcccgggttcacgccattctcctgcctcaacctccccagtagaggggattacaggcacccaccaccgcacccagctaatattttgtctttttagtagagtcggggtttcactgtgttagccaggatggtctcgatctcttgacctcgtgatccacccctctaggcctcccaaattgctgggattacaggtgtgagccactggcacccagcggggcagcctgcttttattcccttatctgaccccacccacatcctgttgattggtccattttacagagagctaattggtccgttttgacagggtgctgattggtgcatttacaatccctgagctagatatacacagagtgctgattggtgcatttacaatcctctagctagacataaaaattctccaagtccccactacatttgctagacacagagcactgattggtgcgtttacaaacctttagctagacacagagtgctgattggtgcatttgcaaaccttgagctagacacagagcactgattggtgcatttacaatcctttagctagacacagaagttctccaagtgcccaccagattagctagatacagagtgctgattggtgcatccccaaaccccaagctagacacagagtgctgactggtgcatataaaatcctcaggctagacataaaagttttccaagtccccatctgactcaggagcccagctggcttcacctagtggatcctgcgcagggctgtgccgggcgcctgcactcctctcagcccttgggcagtcgatgggaccgggcgctgaggagcagggggcggtgcccgtcggggaggctcaggccacgctggagctcacaggggttgggagggggctcgggcatggcgggctgcaggtcctgagccttgccctgtgcagggcggctggggcccggtgagaattcaagcggggtgcaggcgggccggcagtgctgggggacccggcgcaccctctgcagctgctggcccgggtgctaggcccctgactgcccggggccgggggtgcggggcccgctgagcccgcgcccacctggaactcgcgctggctggcgagcgctgcgcgcagccccagttcccacacccgcctctccctccacacttccccgcaagcagagggagccggctctggcttcggccagcccagagaggggcccccacagcgcagtggcgggctgaagggctcctccagcacggccagaatggacgccaaggccgaggaggcgccgagagcgagcgagggctgctagcacgttgtcacctcgcattctgaaccacagactctccaactctccggcgcttttcgcccactcggtccctcagaacacgaagggctctctcatcctgtcactaaaacgattagctgtccggagacacggaaaaagtcgcccctcttctttgcaggattcctcccttgaacttctccaaaccctcttagtgtgacgtgaccccacccctagctaacccaggctgcttccttaccagcttcccgccccctggggaggcggcaatgcaaagaccgtccgctgccagctctgccgctatctctgtggggtgaatctaacatggcggacaaagacagtaactagtcccgtttctccgcgttttcgccaagaagattggctcttaccacttgtccctcaaaacgaccaccccattgactggtggcgattgcgtcgacggagacggggcaaaagcaagctgaacccgaaaaataacaaacactggggctgaggggtggaactacgagtgcgcagacatgggccagagcgcatttcccctgccccaggcaaattcggcgctcactgcgtccccgcaggccactgaccttacaagactacttgccccagactcctggggctggatgggaattgtagtctccctaaagagttgtacgtatctttttaaggcctagtttctgctttcaaaatacgaaaacataacactccagtccataactgttgacaagtacaagcgcgcacaggtctccaatctatccactggatttccgtgagaattgtgcccgctctggtattggatgttcctctccataagactacagtttctaaggaacactgtggcgaagacctttcattccgcaacgcatgctggaaataattatttccctccacccccccaacaatccttattacttatatttaccgaaactggagacctccattagggcggaaagagtgggggattgggacctcttcttacgactgctttggacaataggtagcgattctgaccttcgtacagcaattactgtgatgcaataagccgcaactggaagagtagaggctagagggcaggcactttatggcaaactcaggtagaattcttcctcttccgtctctttccttttacgtcatccgggggcagactgggtggccaatccagagccccgagagacgcttggctctttctgtccctcccatcctctgattgtaccttgatttcgtattctgagaggctgctgcttagcggtagccccttggtttccgtggcaacggaaaagcgcgggaattacagataaattaaaactgcgactgcgcggcgtgagctcgctgagacttcctggacgggggacaggctgtggggtttctcagataactgggcccctgcgctcaggaggccttcaccctctgctctgggtaaaggtagtagagtcccgggaaagggacagggggcccaagtgatgctctggggtactggcgtgggagagtggatttccgaagctgacagatgggtattctttgacggggggtaggggcggaacctgagaggcgtaaggcgttgtgaaccctggggaggggggcagtttgtaggtcgcgagggaagcgctgaggatcaggaagggggcactgagtgtccgtgggggaatcctcgtgataggaactggaatatgccttgagggggacactatgtctttaaaaacgtcggctggtcatgaggtcaggagttccagaccagcctgaccaacgtggtgaaactccgtctctactaaaaatacaaaaattagccgggcgtggtgccgctccagctactcaggaggctgaggcaggagaatcgctagaacccgggaggcggaggttgcagtgagccgagatcgcgccattgcactccagcctgggcgacagagcgagactgtctcaaaacaaaacaaaacaaaacaaaacaaaaaacaccggctggtatgtatgagaggatgggaccttgtggaagaagaggtgccaggaatatgtctgggaaggggaggagacaggattttgtgggagggagaacttaagaactggatccatttgcgccattgagaaagcgcaagagggaagtagaggagcgtcagtagtaacagatgctgccggcagggatgtgcttgaggaggatccagagatgagagcaggtcactgggaaaggttaggggcggggaggccttgattggtgttggtttggtcgttgttgattttggttttatgcaagaaaaagaaaacaaccagaaacattggagaaagctaaggctaccaccacctacccggtcagtcactcctctgtagctttctctttcttggagaaaggaaaagacccaaggggttggcagcaatatgtgaaaaaattcagaatttatgttgtctaattacaaaaagcaacttctagaatctttaaaaataaaggacgttgtcattagttctttggtttgtattattctaaaaccttccaaatcttaaatttactttattttaaaatgataaaatgaagttgtcattttataaaccttttaaaaagatatatatatatgtttttctaatgtgttaaagttcattggaacagaaagaaatggatttatctgctcttcgcgttgaagaagtacaaaatgtcattaatgctatgcagaaaatcttagagtgtcccatctggtaagtcagcacaagagtgtattaatttgggattcctatgattatctcctatgcaaatgaacagaattgaccttacatactagggaagaaaagacatgtctagtaagattaggctattgtaattgctgattttcttaactgaagaactttaaaaatatagaaaatgattccttgttctccatccactctgcctctcccactcctctccttttcaacacaaatcctgtggtccgggaaagacagggactctgtcttgattggttctgcactggggcaggaatctagtttagattaactggcattttggcttttcttccagctctaaaacaagctccatcacttgaaatggcaaaataaaatcatggatgaggccgagggcggtggcttatgcctgtaatcccagcactttgggaggccaaggtggtaggatcacgaggtcaggagatcgagaccatcctggccaacatggtgaaaccccctctccactaaaaatacaaaaattagctgggcgtagtggcatgtgcctgtaatcccagctactcaggaggctgaggcaggagaatcacttgaaccaggaggcagatgttgctgtgagccaatatggcaccactgaactccagcgacagagctaaactccatctcaaaaaaaaaaaaaaaaaaaaaaaaacatggatgatcggtgtcgttgagaggataggtatttggaagaacctttgtttgaaactggctctgtacatacaatgaaattacatacttatttacatacaatgaaatgcagaggttttttttttatataggatctctgtcgagaggctggagtgcagtggtgctatcacagctcactgcagcctcaacctcgtcaggctcaagcaatcctcccacctcagcctccagagtagcagggacgataggtgtgcaccaccatgcccagctaatttttgtatttttttttctttttttgagatggagtcttgctctgttgcccaggctggagtgcagtggcgcgatctcagctcactgcaaactctgcctcccgggttcatgccattcttctgcctgagcctcctgaatagctgggactacaagcacccactaccacgcccggctaattttttgtatttttttttcttttttagtagaggcgggatttcaccgtgttagccaggatagtcttgatctcctgaccttgtgatccacccgcctgggcctcccaaagtgctaggattacaggcataagccactgcgtccagccattcttgtatttttctgttgtagagatagggttttgctatgttggccatgctggtctcaaactcctgacctcaagtgatctaccctcccttggcctctcaaggtgctgggattacaggcctgagccattgcacccagccatggtctaaaaatcttgattgaaataccaccttttcatttccagacacccctatttaaaattaccacacccccagcacacactttatcttctattcctgctgcttctccataacactgattactagctgacattctatgtaatgtatccattttttatctctagtcccacagaatgtaaactccaggatgggatttttgttttgtttacatacatctgtatgttcagtagttagaacggtacttgggacctagttgccactcaataaacatttgtcaaataaataataaactaaactaaattagttctttaatttttttaaatatggtgatggttagtagtgagtaacattcaaaaaataagttgaaaagttgtaccattgcctcttacccacaataaaaaagggtaaattcttttctgctttatgaaagttgtttttcatatttgaagtcaagttaatcagattaaggaaaatgtatgttgtgttttcagagcgatacaagatttataaataaccatcctctcccttgcccttcaacattatagctaaacaaaaataagaggaaaacaggattcacaatttatcaatttattgaaaatcagagccagagaagcaggaaatgacattgtaggaaaaaactgcttttgaaaaagcacaaaacttactcatgacaatcagtgatcaggaaaatcctcaatagtgtggcatttggatacatttatgtttcatttccatgggagagagtcataaaaataggatgttctttctcattctggcaaattaaaccatcaattaaaaactcagatacataaaaattaaagatgtaagaatgaaaatgctaaattgttattttcaatcaactattatgttttctagcttttcattgcttttttctgtttcctgttaagattaatttctttttttttttttttttttttttttgagacagactttggctcttgttgcccaggctggagtgcagtggcacaatctcggctcactacaacctccacctcccgggttcaagcaattctgctgcctcagcctccggagtacctgggattgcaggcatgtgccatcacaccagctaattttgtatttttagtagagacagggtttctccatattggtcaggttggtctcgaactcctgacctcaggtgatcctcctgccttggcctccgaaagtgctgggattacaggcgtgagccaccgctcccagactttttgttttgttttgttttgtttttttgagacacggtctcgctctgctgcctaggctggagtgcagtggcacgatcttggctcactgccagctccgcctcccgggttcaggccattctcctgcctcagcctcccgagtagctgggactacaggcgcccaccactatgcccggctaattttttgtatttttagtagagacggggtttcaccatgttagccaagatggtctcgatctcctgaccttgtgatccacccgcctcagccttccaaagtgctgggattacagtcctgagccactgcgcccggcctggacctttttttttcggggtggggggttggagtctggctctgtcgcccaggctggagtgcagtggcgccatcttggctcactgcaacctccgcctgccaggttcaagttcaagcgcttctcctgcctcagcctcctgagtagctgggattataggcgcacgccaccgtggccggctaattttgtatttttagtagagatagggtttcatcacgttggtcaggctggtcttgaagtcctgatctcgtgatccacccgcctcggccttccaaagtgctggcgtgagccactgcgcctggcttaagattaatttttgtttgttttgtttttgagacggagtctcgctctttcacccaggccggagtgcagtggcgccatctcggctcactgcaagctccgcctcccgggttcacgccattctcctgcctcggccccccaagtagctgggactacaggcgtccaccaccacgcccggctaattttttgtatttttagtagagacggggtttcaccgtgttagccaggatggtctccacttcctgacctcgtgatccgcccacctcggcctcccaaagtgctgggattacaggcgtgagccaccgcgcccggccttaagattaatttttatggtgttttacattcatttgtatggaaagttctaggatagggatcatatttcacttccttttaatatagtacagtatagcacaatttgcagttatgtcttaatatgtgatcaggaatgatcatgactggaaacagtgttatttgtggtagctatagggtaggtaaggttttcagcctgttttaggtttcttgaactaaaattccttctgctgtcttctaagtcaatattggcagctatttctgacaattggtagttctttgtaactttttacctatgactataacatttttgactttcagaagaatttgctaaaatgtgttccccggtgggttgttgtttttcaacctaaacctagctgctttttccagtcacttatccgtattggaagctcaaaatgcaaatatacagtaggcctaaaatattgcctggtttgaaaagtgtttaaaatatttgaatcatttttatagtaaacatttactctcatcaggacctagaaggggaacattttaattttttttcttttcccttttcacagtcttccttcaacattcattacctttttacatatcggagttttcatctgttcaaagtttgtgtttacagtgtgtttatatagtttagattataattaccatactgaaatataattgtttcagaattgagtcagtggtgagaatgaaagccatctggtatgataactgaatccaatttttcttttacggagaatttctttgaaatgtagcttatctcagaaatagggatttagtaaccaatcagagttttctttgtcaaggttgtttttctttttaaagtcacatttggtcccagtaataataccaatgttggtacaagttatctcaggttgtgaagcatttttcccaagtcatctcaggttgtgaagcattttcccaagtagcatttaattttattcttgcaatagcccaaggagtctggcagggtgaatggcaagagaaggaaacaggttcaggtagagtggttagcccaaggtggctctgcttatatacacaactggtagtagaaacccagcctcctgacttagttcattgtttttcttttcactgccctgtgctatgtcaaaaaccccatgattacaagagttgtattacaacccttcacaataaggttactgtccacaagcttttcttgtgatccttttcttttttttttttctttttttgagatggattctctgtcacccaggctggcccgccttggcctcccaaaatgctgggattacagcgtgagccaccgcacctggcccttgtgatccttttctaaaaagttaaatatttaaggaaaaaaccacattcttgtcacactgccaggttagtcgttctttgatatcttgcctggactttatccaaaaaatccgtttcaaaaattcacatttagagctaagtgtagtggctcacgcctgtaatcccggtcgaggcagatggatcacttgaggtcaggacttcaagaccagcctgggcaatatggtgaaaccccttccctaccaaaaatacaaaaaaattagccgggtgtggcagcacgcgcctgtagtcccagctacttggaatgctgaggcacaagaatcacttcaatccgagaggcagaggttgcagtgagccaagaccacaccactgcactccagcctgagcagcagagtgagtgagactccatctccaaaaaaaaaaaaaaaggttcacattcagaagaaagctaaaggccgggtatagtagctcacacctgtaatcccagcactttgggaagccgaagcaggaagattgcttgatgccaggcattcaagaccagcatgggcatcatagtgagatcctgtctctacaaaaattaattaacattaaaaattaaaaagatggctggcatggtggctcactcctgtaatcccagtactttgggaggccaaggcatggtggtgcatgcctttagtcccagctactcgggaggctgaggcaggagaatcacttgaattcaggaggcggaggttacagagagccgagatggtgccactgcactccagcctgggcgacagaacgagactctgtctgaaaaaaaaaaagaaaattaaaaagaccagaataaagctaaagatttaaaatagcctataggttcctaccagaagttaccagctacctctctgatagtctttccctacaatatcctcctggattattacattttagcaccttgacctatctgatgtcctgcatacacaggcatggtcctgctcagggtttgccttctctgctccctctttcttggaatgctcttcccctaattgttgcatagtgtgtttctttacattattaagctatcctctagtctcacctcagtgaaacctttcctgactccccccatgtacatctcacccccacatagatattgaactacctgtttccccttaccctgcttaatttttctctttaatgcacttattcccatgtattctttaattccgtatcaactgtctaccacactagaatatgagctctatgagagcaggctttattttgtaaactgctacatttctatctcctagaatagtacttgaatatagtagtagatacttaataaacacttgttatattagtataataaatgaactaatctcaggaatgccttggttttgtggatagacaggtagggatgggaacttgggtgatgtattttctgaagtttttatttttaagcttattattattttgagatggagtccagctctgtcgcccaggttggagtacagtggcgcgatcttggctcactgcaacgtgcacttccccggttcaagcgattctcctgccttagcctcccaagtagctgggattacaggcgcatgccaccatgcccagttagttttggtatttttagtagagacagcgtttcactgtgttggccaggctggtctcgaaatcctgacctcatgatccgcccgcctcggcctcccaagtgctgggattacaagcatgagcccccgtgtctggccttattttcttttttttgagacagagtcttcctctgtcacctaggctggagtgcagtggcacgatattggctcactctgcaacctccacctccaggattcaagtgatccttctaccttagtctccaaagtagctgagaccacaggcatgcgccaccacgcccggctaatttttgtatttttagcgtagacagggtttcaccatattgtccaggatgatctggaactcctgagctcaggtgatccacccacctcagcctcccaaagtgctaggattacaggcatgaggcaccatgcccggccttaagcttatcattttctaaatttcctttagtgagtacttattacactgtttttacaaagtaatcacaaaccaaacatcatgcctcttctgaagtgatctaataagagtacacagtaccatctgtaaagtgttcttgccagaaagttgaacctgaatgattaagcctgtaagtctagtttataggaaataaggctagaggaacaagttaaacctcaccatagggttatacaatcagcaaaatccagaatgggggaaactccacaggtcaaatgacctaattttaaaaataaatgacaagggagaaaaagtaagagacacctatagatcagaagacacttggggctgggcatggtggctcacacctgtaatcccagcactttgggaggccaaggcaggcggatcacctgaggtcaggagttcaagaccagccggccaacatggtgaaaccccaactctactaaaaatacgaaaaatcagccgggcgtggtggcgcacgcctgtagttccaactacctgggaggctgaggcaggagaatcacttgaacttgggaggcagaggttgcagtgagccgagatcgcaccattgcatgccagtctgggctacaaaagcaaaaccccatctcaaaaaaaagaagacacttgggtttgggtgtgttggctcatgcctgtaaaccccgtgctgggaggattgcttgagcccaggagttcaaggctgcagtgaggtatgtttgcaccactgcactccagcctaggtgacagagtgtgaccttatcttaaaagtaataataattaaaataatctggggtaggggtggatatgggtgaaacagcttggccatgagttgatggttgttggaccagggtgatggtccatatagttcattttattattttatttacttgaaattttgaaatacttgaaattttccatattaagttaaaaaggcatttacagtaaacaaaaaaaagttctaggaaggaattcaaaagaaatataagcagaaaattttgtctttatggagcttaaagatgagatgtgcacccacagtgatagtgcagaaaaatatatcactggaaatgaattcgtacgaactattatcaactaatcttttaaatgctgatgatagtatagagtattgaagggatcaatataattctgttttgatatctgaaagctcactgaaggtaaggatcgtattctctgctgtattctcagttcctgacacagcagacatttaataaatattgaacgaacttgaggccttatgttgactcagtcataacagctcaaagttgaacttattcactaagaatagctttatttttaaataaattattgagcctcatttattttctttttctccccccctaccctgctagtctggagttgatcaaggaacctgtctccacaaagtgtgaccacatattttgcaagtaagtttgaatgtgttatgtggctccattattagcttttgtttttgtccttcataacccaggaaacacctaactttatagaagctttactttcttcaattaagtgagaacgaaaaatccaactccatttcattctttctcagagagtatatagttatcaaaagttggttgtaatcatagttcctggtaaagttttgacatatattatctttttttttttttttgagacaaagtctcgctctgtcgcccaggctggagtgcagtggcatgatcttggctcactgcaacctccgccccccgagttcaagcgattcttctacctcagcctcccaggtagctgggactacaggcacccgccaccatgcttggctaatttttgtacttttagtagagataaggtttcaccatattggccaggctggtctcgaactcctgaccttgtgatccacctgcctcggcctcccaaagttctgggattacaggcgtgagccaccacacccgactgacatatattatctattaggatgtaacatcattttgaacagtgttttgtattttttgtgtccatcagtgaaagcaaactgcaagcagttttgaaataagcacattgtgtttgagccttcccagtttctcctttctgttcatttctgcatatccttatgcattcccccttctaagggtcagtgtttgcccgctttgtaatcattgtgaagacaggaaaggacctgataccagtttctatttaggccaaaattcatttatagcagtgattcaagttatatttacgtatttgatgatcttgtcttttgaaatgaaaatgtttgtttcttaataaaagaatttcagaaaaagtagagtaggtaatttagtagaacaagtgggctttctccttttctttatgttaagctatggctcacatcttaccttaaatgtcaactaatttgtttttaagtatttatgtacctggtacataacctggtaccaggtacaaactatgtacttggtaaaaagtttattagcacaaaaaggtatatgatgcaaagtatacttccctcttaccctacaacccctgcctccctgttccctccccagacaaccacaatgatcaatttcttatgtatcctttgaggaatttttaaattccagagttcttaacttggggtttatgaatagtctttatgaatttcctagaattatatttaaattgtattcaaaactatggccatgtacatttttctgggaagatagtccataattttcatctgagtgagctaagatcatgccactgcattccagcctgggcgacaagagggagactcaaaaaaaaaaaaaaaagtcccagtatttactacagagagctaaagattaacctttaaagccctggggctttcaatttatctggatgagaatctttctggaatgaactgtatgttttcttgtcagcttgagtaacaaatgctgaacatactatactattattacagggactcaagggcccagtgtggtagctcctgcccataaccccagcactttgggaggccaaggcaggaagatcacttaaggccaggagttcgaagctgtagtgagctatgatcacaccactgcactccagcctagatgacagagtgagaccctgtctttttttttttttgagatggtgtttcactctattgcccaggctggagtgcagtggtgtgatctcggctcactgcaacctccacctcctgggttcaagcgattctcctgcctcagcctcttgagtagctgggattacaggcatctgccaccacacccagctaatttttgtatttttagtcgagacagggttttcaccatgttggccaggctgctctcaaactcctgacttcagctaccttggccttaaaaagtgttgggattacaggtgtaagccaccgcgcctggctgaccctgtctcttaacaaaaaaagagagattaagttatgaatatagttgctttgagaacttgtggaagaaggaaattataggcttataggcagagataataatacgagcaaatgtacaaataaaagaaaatagaggacgggcgcggtggctcacgcctataataccagcactttgggaggtcgaggtgggcggatcacgaggtcaggaaattaagaccatcctggccaaaatggcgaaacactgtctctactaaaacacacaaaaaactagcctggcatggtggcacgtacctgtagtcccagctacttggtaggctgcggcaggggtatcacttgaacctgggaggcagaggttgccctgagccgagatcatgccaatgcactccagcctgacaacagagtgagactctgtctgaaaaaaaagaaaagaaaagaaaatacatccaggaaaaataagctaactttgcatatgtgtataggagttgtgttagaaaaggaagaagccctcaaagatgggaagccatttgcaagaaagagaaggtccaagaggaggcagaagggattggaaatagaaaaaggatgtaagaaagagttgattattactcataaacagtaatgaaggaaaaggagagtaattctacaggaagatgctgaggtgctttgagcccagtgaagttggaggtaaagacagctgttgaggccgggcacggtggctcacgcctctaatcctagcacttttggagcccaaggcaggtggatcacctgaggtcaggagctcaagaccagcctgaccaacatagagaaaccccatctctactaaaaatacaaaattagacgggcgtggaggcgcatgcctgtaatcccagttacttgggaggctgaggcaggagaatcacttgaacctgggaggcggaggttgcagtgagccgagattgcgccattgcactccagcctgggcgacaagagtgaaaactgtctcaaaaaaaaaaaacaacaaaaaacagctgttgagattgagaggattagagttggcaactggagaagagtgagaagcttggtttcaagcttgtgatagtcaggattgtgatagtcaggaaagaaccagtcataaagatatatgtgtgtgtatacatataaatatgttatatatatgtgtgtgtgtgacacatatatatttttgtttgtttctttgagacagtgtctccctctgacacccaggctggagttcagtggtgtgatcatagttcacttttaccttgcaatctgggttcaagcaatctctcatctcagcccctcaagtagctaggactacaggtacatggcatttgcccagctaatttttaagtttcttgtagagatgggccagccatattttaaattgtgttttgaatgttatattagaattaaaagtccaaagccgggtgtggtggctcacgcctgtaatcccagcactttgggaggctgaggtgggcggatcacgaggtcaggagttcgagaccagcctggccaatatggtaacaccatctctactaaaaatacaaaaattagctgggtatgggggcacatgcctgtagtcccagctactcaggaggctgaggcagaggaacctcttgaacccaggaggcagaggctgcagtgagttgagatcgtgccactgtactctagcctgggcgacagagcaagattccgtctcaaaaaaaaaaaaagtccagtataatgcccatgtgatagatcgactttttcatgaaatctcttctgtaatatcaatataatctgaataacactttgatctatatgatgagaaagctgggagcctgggagcgatacccccatgcttttgttgtattaattgtattttctacggataaactctaattgctaaaaataaaacaactttattgacccaagcaagcctaaagttctgaaatcttttttttatttttgtttgtttgtttgtttgtttttgtttgttttgttttgagacggagtctcgctctgtcgcccaggctggagtgcggtggtgcagtctcggctcactgcaagctccacctcccgggttcacaccattctcctgcctcagcctcccaagtagctgggactacagacgcctgccaccacgcccagctaatttttttgtatttttagtagagaaagggtttcaccgtgttagccaggatggtctcgatctcctgacctcgtgatctgcccgccttggcctccctaagttctgggattacaagtgtgagccaccacgcccggctgtttttttttgttttgttttgagacggagtctcactgtgttgcccagactggagtgcagtggcatgatctcagctcactgccacctccatctcctgggttcaagcaaatctcctgcctcagcctcccgagtagctgggactacaggcatgtgccaccacacctggctaatttttgtatttttagtagagacggggtttcactatgttggccaggctggtccaaaactcctgacctcaggtgatctgctcgccttggcctcccacagtgccaggattacaggcatgagccaccttgcccagccagttctgaaatcttttatgaagcctataaaaaaagataataataccaatctagaaaatatttcttaaggcagtcatgcattagtttgaactttccaaacaaaaaaatgcaatgtgtaatacttttttttttttttttgagatggagtcttgttctgttgcccaggctggagtgcagtggtacaatctcggctcactgcagcctctgcctctctggttcaagtgattctcctgcctcagcctcccaagtagctgggattacaggcgtgcaccaccatgcatggctaatttttgtatttttagtagagacagggtttcaccatgttgacaaggctgatctcgaactcctgacctcaggtgatccgcccacctcagcctcccaaagtgctgagattacaggcattagccaccacgcccagccttttattttagtagagaccatgtttcaccatgttgaccaagctggtcttgagctgacctcaagtgatccgcccacctccacctcccaaaatggtgggattataggcatgagccaccgcacccagcctgtaatacttttttgaagatctagaaccacattgttcaaagagatagaatgtgagcaataaatgtaacttaaatttttcaacagctactttttttttttttttttgagacagggtcttactctgttgtcccagctggagtacagtggtgcgatcatgaggcttactgttgccttgacctcctaggctcaagcgatcctatcacctcagtctcccaagtagctgggactgtaagtgcacaccaccatatccagctaaattttgtgttttctgtagagacggggtttcgccatgtttcccaggctggtcttgaactttgggcttaacccgtctgcccacctaggcatcccaaagtgctaggattacaggtgtgagtcatcatgcctggccagtattttagttagctctgtcttttcaagtcatatacaagttcattttcttttaagtttagttaacaacctttatacatgtattctttttctagcataaagaaagattcgaggccgggtgcggtggctcacgcctgtaatcccagcactttgggaggctgagatgggcacatcacgaggtcaggagatcgagaccatcctggctaacatggtgaaaccccgcctctactaaaattacaaaaagttagccaggcgtggtagcgggcacctgtagtcccagctactcaggaggctgaggcaggagaatggcgtgaacccaggaggcagagcttgcagtgagcagagattgtgccactgcactccagcctgagagacagagcgagactccgtctaaaaaaaaaaaaaaagattcgaatccttatcttggttgatttttgcgtatctagttccactgaattatttatataattgtatagactacagcacgagacagcttagcttgtcactctactgtactatattctgcagtactatcataagggaatttcctccctacccctgctctgaattgttcaattgtactatttgctggagtaatgcttgatgccttcttgatccattatactagagtatatgtagtatttgtagattctgaaggagtgggagcctctattctgagttttaaaggtacttatgtacagtggaggtagctttttgacagcctcatcttccaaactatagagtcattgttttgttgagtgcaatatggtacttgaagcatctatatcggcgaagaaggacccaagtctccttgaccttacctacctacattcactttctctggtaggaagattgtgggtgcctctctccagacttagtttccatgtcaaaaaagaaaaaaggaagattgtgggctttgctacaatccaattctggatccaatataaccttcattgcttaattactgtgtgatctgggacaagcctctactctataaaaatgaagataaggccaggcttgatggctcatgcctgtaatcccagcacgttgggatgccaaggcaggaggatcacttgaggtcaggagttcgagaccagactgggcaatatagtgaaaccacatctgtacaaaaataaagatagaaagtagcccagcgcaatggctcacacctgtaatcccagcactttgggaggctgaagcaggcgatcacttgaggtcgggagttcaagactgtagacagatagataggtaggtagatagatagagatatagatatagttggggtttttttgttttgttttgttttgtttttgagatggagtttcgctcttgttgcccaggctggagtgcaatggcgcgatctcagtttactgcaacctccgcctcccgggttcaagagattctcctgcctcagcctcctgagtagccaggattacaggcatatgccaccatgcccggctaatttttgtatttttagtagagacagggtttctccgtgttggtcaggctggtcttgaactcctgacctctcccaaagtgttgggattacaggcgtgagccaccgctcctggccttttttttttttttttttttttttttgagacagagtcttcctctgttgcccagggtggagtgcagtggcactcttctcagctcattgcaacctctgccatcctgggttccagtgattctcatgcctcagcctcccaagtagctgggactcaggcgtgtgcccaccacgcctggctaattttgttgtatttttagtagagacagggtttcaccatgttagccaggctggtctcaaactccaggcctcaagtgatctgcctgcctcagcctcctgggattgcagacatgagccactgcacccggccaagagagggtaataaatgttaaattacctggctagtaaaaaatattctctaagtgtcttttctcacaattcccaatgccttttttttttttttggcacaatctcactctgttgcccaggctggaatgcaatggtgcaatattggctcactgtaacccccgcctcacaggttcaacttattctcatgcctcagcctcccgagtaactgggactacagtgcaccaccaccacacccagctaatttttgaatatttagtagagacagggtttcaccatgttggccaggctggtcttgaactcctggcctcaagtgattcacccaccccgcaagtgctgggattacaggtgtggaccaccgtgcacagccctagtgactttttttttagccccttaatcttttctttcctgggtctcttcattgtcagtgtctgctatttactccctacctagtcacccccttcaccagtatattatgtcctttatgttttattttgcaggatcttattttgcttttctattgaatcccctccatctagaatagtactagacatagtaaatattggttgtatgagtgaatcgctgcttttaattatcatcaccattgctctctctacttctggtctatgatccactttgagttaacttttgttatttggtgtgagataggagtataatttcattcttttacatgtggttatacttttgtctcaacactgtttgttaaaaacacaaaaagtattattttcccatttaatcatctttggcctgggcacggtggctcatgcctgtaatcccagcactctggaaggccaaggcagatggatcaatttgaggccaggagttcaagactagccaacatggtgaaactaaaaatacaaaaaattagctgggtatggtggtgcatgtctgtaatcccagctactcgggaggctgaggcacgagaattgcttgagcctaggaggtggaggttgtagtgagctgagattgtgtcactaccctccagcctgggtgatagagtgagtctgtctcaaaaaaaaaaaaaaaaaattaagaaaataaaaatcgtcggccaggcatggtggctcacacctgtaatcccagcactttgggaggcagaggcgggcagatcacgaggtcaggagatggagaccatcctggctaacatggtgaaaccccgtctctactaaaaataaaaaaattagccgggcatggtgctgggcgcctgtagtcccagctgctcgggaggctgaggcaggagaatggcgtgaacccaggaggtggagcttgcagtgagccgagatcgtgccactgcactccagcctgggagacagagcgagactccgtctcaaaaaaaaaaaaaaaaaaaattgtcttggtatttattattgttgaaaatcgcttgatcacagatgtatgtatgagtttatttctgtactgtcaattccattttattgatgtatgtgtctattcttatgctattaccacactttcttgattactatagctttgtggtgaggtgttgagattttaaactaattataagcatcttacatgaactacttaccgtttatatttgattatgcagcatgaaataattatgaatatatcattaaatatgccatattaacttttattaagttttatgtgatcataacagtaagccatatgcatgtaagttcagttttcatagatcattgcttatgtagtttaggtttttgcttatgcagcatccaaaaacaattaggaaactattgcttgtaattcacctgccattactttttaaatggctcttaagggcagttgtgagattatcttttcatggctatttgccttttgagtattctttctacaaaaggaagtaaattaaattgttctttctttctttataatttatagattttgcatgctgaaacttctcaaccagaagaaagggccttcacagtgtcctttatgtaagaatgatataaccaaaaggtatataatttggtaatgatgctaggttggaagcaaccacagtaggaaaaagtagaaattatttaataacatagcgttcctataaaaccattcatcagaaaaatttataaaagagtttttagcacacagtaaattatttccaaagttattttcctgaaagttttatgggacatctgccttatacaggtattagaaacttactgcctttctctaatgcttctagtgtaaaaacttgcagacttatgtaaagtagggctgtatcgccgtgcccccattgtctgttaatcttgtttttatatttttgattgtgtttccttttctttttttttttttttttaagacagggtcctgctctgtcactgaggctggagtgcagtggcgtgatctcggctcactgtagcctctgtctcccagcctcttcctgccttagcctcccaaatagctgggactacaggcacacgctaccatgcccggccaatttttgtattttttgtagagatgaggttttaccatgttgcccaggctggtaactcctgagctcaggtgatctgcccacctcggcctcccaaagtgctggggttcacaggtgtgtgtttatttctatctaattatttacacaaacacaatgtatttatatattgtgtatctcttctgctacaatgtaaattctatgagagtagtaattttgtctgtctcaacactgtttttcctaagtttggtacatagtaggcactcagatgcttaaaggaatgaatgaattgtgctttaattccactttactaaacccaaatctccctttggacattgttatctatgtgttttcaaagaagtataatcataatttgacagaaatccttgagaggcagaactaagtgagggattgggcagggttcagatgttaagaacagtaagctcagcagggtgtgattgctcatgcctataaccctagcactctaggaggctgaggtgggatgattgcttgaggccaggagtttgaaatcagcctgggcaacatagtgagaccccatcactaccaacaaaataaataaataaatgtacatggtggcatatgcccatagtcctagctacttgggaggctatagtgggaggatagcttgagtacagaagtctgaggctgcagtgagctatgattgtggcactgcatgctagcctgggcaatagagcaagaccctgtctctaaattaaacaaaaaaaaaagtactctagttttctatgcaatgcattatatctgctgtggatttagggcagtattatatcagataattttaggcatttggtaggcttaaatgaatgacaaaaagttactaaatcactgccatcacacggtttatacagatgtcaatgatgtattgattatagaggttttctactgttgctgcatcttatttttatttgtttacatgtcttttcttattttagtgtccttaaaaggttgataatcacttgctgagtgtgtttctcaaacaatttaatttcaggagcctacaagaaagtacgagatttagtcaacttgttgaagagctattgaaaatcatttgtgcttttcagcttgacacaggtttggagtgtaagtgttgaatatcccaagaatgacactcaagtgctgtccatgaaaactcaggaagtttgcacaattactttctatgacgtggtgataagaccttttagtctaggttaattttagttctgtatctgtaatctatttttaaaaaattactcccactggtctcacaccttattttatcaatcgtaaggtgcacatttttcacatcttaacatctctgaaattgggaacattttactattgagggtgtgtcatttgtttaatttgtgtgctttctttcttagtgatacagaaaataatagtgcaacttacattgttggtgtcttagctttagtgaaatacagtattgataggcaaatttcttagtgttaaggtagaaaacaaggactctaaataactttgatggtctgtgtatttgtttttgtttcctaggagtaaaatttccagttgattttttaaaatttgatttttaaaaaaaatcacaggtaaccttaatgcattgtcttaacacaacaaagagcatacatagggtttctcttggtttctttgattataattcatacatttttctctaactgcaaacataatgttttcccttgtattttacagatgcaaacagctataattttgcaaaaaaggaaaataactctcctgaacatctaaaagatgaagtttctatcatccaaagtatgggctacagaaaccgtgccaaaagacttctacagagtgaacccgaaaatccttccttggtaaaaccatttgttttcttcttcttcttcttcttcttttcttttttttttcttttttttttttgagatggagtcttgctctgtggcccaggctagaagcagtcctcctgccttagcccccttagtagctgggattacaggcacgcgccaccatgccaggctaatttttgtatttttagtagagacggggtttcatcatgttggccaggctggtctcgaactcctaacctcaggtgatccacccacctcggctccccaaattgctgggattacaggtgtgagccactgtgcccggccggtaaaaccattttcatttattctggcaacatctctttattgagcattgtgaatatgttagtgaatgtgctagatgctcatagatttatataaaaagttagtgaagaaggaaagatggtatattaagtggttagacaagtgttctaatcagttagagttcagagaaggtcagggtacctgatataatcaagagagagaccttacagccaggtgaggtgaatgtacctataatcccagctacttaggaggctgaaatgggaggatcacttgagtccaggtttgagaccagcccaggcaacatagcaagatccccatcagatacaccaaaaagacagatttcttttttttttttttttttgagacagagtctcgctctgtcgcccaggctggagcgcagtgacacgatgtcagctcactgcaacctccgcctcccaggttcaagtgattctcctgcctcagcctcctgagtagttgggactacaggggtacgacaccagacctggctaatttttgtaattttagtagagtcggggtttcaccatattggtcaggctggtctcgaactcctgacctcaggtgatccaccctccttggcctcccagagtgctgggattacaggcgtgagccaccaagcccggccaaaaaagagagctcttataggcccttccttgctttggagctttatctgctctgtgatgcttatctaaaatagccataaggtcactgatatttttaagcatttggaaattacttcagctgggtgccatggctcatgcctataatcccaaccctttgggaggctgaggtaggaggtcctttgagcccagcttgggcaacacagtgagacactgtctctgcaattaaaaaaaaaaaaaagtagctgggtgccgtggctcacgcctgtaattccagcactaggaggcttgaggattgcctgagctcaggagttcaagaccagtttgggcaacatagcaagtccttgtctatattaaaagtttttttaaattatctgggcatggtggtgtgtgcctgtagtcccagctacttgggaagctgagacagaaggatcacttgagtccaggagatgtagactacagtgagctatgatcactccactgcacttcagcgtgggcggcaaagcaagatctagttgcaaaaaaaaaaagaactggctgggtgcggcggctaacacctgcaatcccagcaccttgggaggctgaggccagtggatcatgaggtcaggagattgagaccaccctggccaacatggtgaaacccggtctctactaaaaatacaaaaattagctgggtgtggtggcacgtgcctgtaatcccagctactccagaggctgaggatggagaatcacttgaacctgagagtcggaggttgcagtgagccgagattgcgccactgcactccagcctggcgacagagcgagactccgtctcaaaaaaaaaaaaaaaaaagcttcacgcctgtaatcccagcactttgggaggccgagtcaagtggatcacgaggtgtggagatcaagactatcctggctcacatggtgaaagcccgtctctactaaaaacacagaaaaattagctgagcgtgatggcggactcctgtagtcccagctactcgggaggctgaggcaggagaatagcatgaacccgggaggtggagcttgcagtgagccgagatcccgccactgcgatccagcctgggcgacagagtgagactctgtctcaaaaaaaaaacaaaaaaacttagctgggcgtggtggtatgcacctgtggtcctagctacttgggaggctgaggctggagcattgctttaacatagagagtcaaggctgcagttgagctatgactgtgccactggactccagcgcaggtgactgagaccctatcttttaaaaaaagggaaaattacttgaacttaaaaggtgtaattgttaaagaaaatgtagtgatttgctctgttgttacttatatgtgcatgaatgatggagatcttaaaaagtaatcattctggggctgggcgtagtagcttgcacctgtaatcccagcacttcgggaggctgaggcaggcagataatttgaggtcaggagtttgagaccagcctggccaacatggtgaaacccatctctactaaaaatacaaaaattagctgggtgtggtggcacgtacctgtaatcccagctactcgggaggcggaggcacaagaattgcttgaacctaggacgcggaggttgcagcgagccaagatcgcgccactgcactccagcctgggccgtagagtgagactctgtctcaaaaaagaaaaaaaagtaattgttctagctgggcgcagtggctcttgcctgtaatcccagcactttgggaggccaaggcgggtggatctcgagtcctagagttcaagaccagcctaggcaatgtggtgaaaccccatcgctacaaaaaatacaaaaattagccaggcatggtggcgtgcgcatgtagtcccagctccttgggaggctgaggtgggaggatcacttgaacccaggagacagaggttgcagtgaaccgagatcacgccaccacgctccagcctgggcaacagaacaagactctgtctaaaaaaatacaaataaaataaaagtagttctcacagtaccagcattcatttttcaaaagatatagagctaaaaaggaaggaaaaaaaaagtaatgttgggcttttaaatactcgttcctatactaaatgttcttaggagtgctggggttttattgtcatcatttatcctttttaaaaatgttattggccaggcacggtggctcatggctgtaatcccagcactttgggaggccgaggcaggcagatcacctgaggtcaggagtgtgagaccagcctggccaacatggcgaaacctgtctctactaaaaatacaaaaattaactaggcgtggtggtgtacgcctgtagtcccagctactcgggaggctgaggcaggagaatcaactgaaccagggaggtggaggttgcagtgtgccgagatcacgccactgcactctagcctggcaacagagcaagattctgtctcaaaaaaaaaaaacatatatacacatatatcccaaagtgctgggattacatatatatatatatatatatatattatatatatatatatatatatgttatatatatgttatatatatataacatatatatatgttatatatatgttatatatatataatatatatatgttatatatatgttatatatatatatacacacacacacacatatatatgtatatatatatacacacacacacacaaattagccaggcatagttgcacacgcttgtagacccagctactcaggaggctgaggcaggagaatctcttgaacttaggaggcggaggttgcagtgagctgagattgcgccactgcactccagcctgggtgacagagcaggactctgtacaccccccaaaacaaaaaaaaaagttatcagatgtgattggaatgtatatcaagtatcagcttcaaaatatgctatattaatacttcaaaaattacacaaataatacataatcaggtttgaaaaatttaagacaacagaaaaaaaaattcaaatcacacatatcccacacattttattattactactactattattttgtagagactgggtctcactctgttgcttatgctggtcttgaactcctggcctcaagcagtcctgctccagcctcccaaagtgctgggattataggcatgagctaccgctcccagccccagacattttagtgtgtaaattcctgggcattttttccaggcatcatacatgttagctgactgatgatggtcaatttattttgtccatggtgtcaagtttctcttcaggaggaaaagcacagaactggccaacaattgcttgactgttctttaccatactgtttagcaggaaaccagtctcagtgtccaactctctaaccttggaactgtgagaactctgaggacaaagcagcggatacaacctcaaaagacgtctgtctacattgaattgggtaagggtctcaggttttttaagtatttaataataattgctggattccttatcttatagttttgccaaaaatcttggtcataatttgtatttgtggtaggcagctttgggaagtgaattttatgagccctatggtgagttataaaaaatgtaaaagacgcagttcccaccttgaagaatcttactttaaaaagggagcaaaagaggccaggcatggtggctcacacctgtaatcccagcactttgggaggccaaagtgggtggatcacctgaggtcgggagttcgagaccagcctagccaacatggagaaactctgtctgtaccaaaaaataaaaaattagccaggtgtggtggcacataactgtaatcccagctactcgggaggctgaggcaggagaatcacttgaacccgggaggtggaggttgcggtgaaccgagatcgcaccattgcactccagcctgggcaaaaatagcgaaactccatctaaaaaaaaaaaagagagcaaaagaaagaatatctggttttaaatatgtgtaaatatgttttggaaagatggagagtagcaataagaaaaaacatgatggattgctacagtatttagttccaagataaattgtactagatgaggaagccttttaagaagagctgaattgccaggcgcagtggctcacgcctgtaatcccagcactttgggaggccgaggtgggcggatcacctgaggtcgggagttcaagaccagcctgaccaacatggagaaaccccatctctactaaaaaaaaaaaaaaaaaaattagccggggtggtggcttatgcctgtaatcccagctactcaggaggctgaggcaggagaatcgcttgaacccaggaagcagaggttgcagtgagccaagatcgcaccattgcactccagcctaggcaacaagagtgaaactccatctcaaaaaaaaaaaaaaagagctgaatcttggctgggcaggatggctcgtgcctgtaatcctaacgctttggaagaccgaggcagaaggattggttgagtccacgagtttaagaccagcctggccaacataggggaaccctgtctctatttttaaaataataatacatttttggccggtgcggtggctcatgcctgtaatcccaatactttgggaggctgaggcaggtagatcacctgaggtcagagttcgagaccagcctggataacctggtgaaacccctctttactaaaaatacaaaaaaaaaaaaaaattagctgggtgtggtagcacatgcttgtaatcccagctacttgggaggctgaggcaggagaatcgcttgaaccagggaggcggaggttacaatgagccaacactacaccactgcactccagcctgggcaatagagtgagactgcatctcaaaaaaataataatttttaaaaataataaatttttttaagcttataaaaagaaaagttgaggccagcatagtagctcacatctgtaatctcagcagtggcagaggattgcttgaagccaggagtttgagaccagcctgggcaacatagcaagacctcatctctacaaaaaaatttcttttttaaattagctgggtgtggtggtgtgcatctgtagtcccagctactcaggaggcagaggtgagtggatacattgaacccaggagtttgaggctgtagtgagctatgatcatgccactgcactccaacctgggtgacagagcaagacctccaaaaaaaaaaaaaaaagagctgctgagctcagaattcaaactgggctctcaaattggattttcttttagaatatatttataattaaaaaggatagccatcttttgagctcccaggcaccaccatctatttatcataacacttactgttttccccccttatgatcataaattcctagacaacaggcattgtaaaaatagttatagtagttgatatttaggagcacttaactatattccaggcactattgtgcttttcttgtataactcattagatgcttgtcagacctctgagattgttcctattatacttattttacagatgagaaaattaaggcacagagaagttatgaaatttttccaaggtattaaacctagtaagtggctgagccatgattcaaacctaggaagttagatgtcagagcctgtgctttttttttgtttttgtttttgttttcagtagaaacgggggtctcactttgttggccaggctggtcttgaactcctaacctcaaataatccacccatctcggcctcctcaagtgctgggattacaggtgagagccactgtgcctggcgaagcccatgcctttaaccacttctctgtattacatactagcttaactagcattgtacctgccacagtagatgctcagtaaatatttctagttgaatatctgtttttcaacaagtacatttttttaacccttttaattaagaaaacttttattgatttattttttggggggaaattttttaggatctgattcttctgaagataccgttaataaggcaacttattgcaggtgagtcaaagagaacctttgtctatgaagctggtattttcctatttagttaatattaaggattgatgtttctctctttttaaaaatattttaacttttattttaggttcagggatgtatgtgcagtttgttatataggtaaacacacgacttgggatttggtgtatagatttttttcatcatccgggtactaagcataccccacagttttttgtttgctttctttctgaatttctccctcttcccaccttcctccctcaagtaggctggtgtttctccagactagaatcatggtattggaagaaaccttagagatcatctagtttagttctctcattttatagtggaggaaataccctttttgtttgttggatttagttattagcactgtccaaaggaatttaggataacagtagaactctgcacatgcttgcttctagcagattgttctctaagttcctcatatacagtaatattgacacagcagtaattgtgactgatgaaaatgttcaaggacttcattttcaactctttctttcctctgttccttatttccacatatctctcaagctttgtctgtatgttatataataaactacaagcaaccccaactatgttacctaccttccttaggaattattgcttgacccaggtttttttttttttttttttggagacggggtcttgccctgttgccaggatggagtgtagtggcgccatctcggctcactgcaatctccaactccctggttcaagcgattctcctgtctcaatctcacgagtagctgggactacaggtatacaccaccacgcccggttaattgaccattccatttctttctttctctcttttttttttttttttttgagacagagtcttgctctgttgcccaggctggagtacagaggtgtgatctcacctctccgcaacgtctgcctcccaggttgaagccatactcctgcctcagcctctctagtagctgggactacaggcgcgcgccaccacacccggctaatttttgtatttttagtagagatggggtttcaccatgttggccaggctggtcttgaactcatgacctcaagtggtccacccgcctcagcctcccaaagtgctggaattacaggcttgagccaccgtgcccagcaaccatttcatttcaactagaagtttctaaaggagagagcagctttcactaactaaataagattggtcagctttctgtaatcgaaagagctaaaatgtttgatcttggtcatttgacagttctgcatacatgtaactagtgtttcttattaggactctgtcttttccctatagtgtgggagatcaagaattgttacaaatcacccctcaaggaaccagggatgaaatcagtttggattctgcaaaaaagggtaatggcaaagtttgccaacttaacaggcactgaaaagagagtgggtagatacagtactgtaattagattattctgaagaccatttgggacctttacaacccacaaaatctcttggcagagttagagtatcattctctgtcaaatgtcgtggtatggtctgatagatttaaatggtactagactaatgtacctataataagaccttctgtaactgattgttgccctttcgtttttttttttgtttgtttgtttgtttttttttgagatggggtctcactctgttgcccaggctggagtgcagtgatgcaatcttggctcactgcaacctccacctccaaggctcaagctatcctcccacttcagcctcctgagtagctgggactacaggcgcatgccaccacacccggttaattttttgtggttttatagagatggggtttcaccatgttaccgaggctggtctcaaactcctggactcaagcagtctgcccacttcagcctcccaaagtgctgcagttacaggcttgagccactgtgcctggcctgccctttacttttaattggtgtatttgtgtttcatcttttacctactggtttttaaatatagggagtggtaagtctgtagatagaacagagtattaagtagacttaatggccagtaatctttagagtacatcagaaccagttttctgatggccaatctgcttttaattcactcttagacgttagagaaataggtgtggtttctgcatagggaaaattctgaaattaaaaatttaatggatcctaagtggaaataatctaggtaaataggaattaaatgaaagagtatgagctacatcttcagtatacttggtagtttatgaggttagtttctctaatatagccagttggttgatttccacctccaaggtgtatgaagtatgtatttttttaatgacaattcagtttttgagtaccttgttatttttgtatattttcagctgcttgtgaattttctgagacggatgtaacaaatactgaacatcatcaacccagtaataatgatttgaacaccactgagaagcgtgcagctgagaggcatccagaaaagtatcagggtagttctgtttcaaacttgcatgtggagccatgtggcacaaatactcatgccagctcattacagcatgagaacagcagtttattactcactaaagacagaatgaatgtagaaaaggctgaattctgtaataaaagcaaacagcctggcttagcaaggagccaacataacagatgggctggaagtaaggaaacatgtaatgataggcggactcccagcacagaaaaaaaggtagatctgaatgctgatcccctgtgtgagagaaaagaatggaataagcagaaactgccatgctcagagaatcctagagatactgaagatgttccttggataacactaaatagcagcattcagaaagttaatgagtggttttccagaagtgatgaactgttaggttctgatgactcacatgatggggagtctgaatcaaatgccaaagtagctgatgtattggacgttctaaatgaggtagatgaatattctggttcttcagagaaaatagacttactggccagtgatcctcatgaggctttaatatgtaaaagtgaaagagttcactccaaatcagtagagagtaatattgaagacaaaatatttgggaaaacctatcggaagaaggcaagcctccccaacttaagccatgtaactgaaaatctaattataggagcatttgttactgagccacagataatacaagagcgtcccctcacaaataaattaaagcgtaaaaggagacctacatcaggccttcatcctgaggattttatcaagaaagcagatttggcagttcaaaagactcctgaaatgataaatcagggaactaaccaaacggagcagaatggtcaagtgatgaatattactaatagtggtcatgagaataaaacaaaaggtgattctattcagaatgagaaaaatcctaacccaatagaatcactcgaaaaagaatctgctttcaaaacgaaagctgaacctataagcagcagtataagcaatatggaactcgaattaaatatccacaattcaaaagcacctaaaaagaataggctgaggaggaagtcttctaccaggcatattcatgcgcttgaactagtagtcagtagaaatctaagcccacctaattgtactgaattgcaaattgatagttgttctagcagtgaagagataaagaaaaaaaagtacaaccaaatgccagtcaggcacagcagaaacctacaactcatggaaggtaaagaacctgcaactggagccaagaagagtaacaagccaaatgaacagacaagtaaaagacatgacagcgatactttcccagagctgaagttaacaaatgcacctggttcttttactaagtgttcaaataccagtgaacttaaagaatttgtcaatcctagccttccaagagaagaaaaagaagagaaactagaaacagttaaagtgtctaataatgctgaagaccccaaagatctcatgttaagtggagaaagggttttgcaaactgaaagatctgtagagagtagcagtatttcattggtacctggtactgattatggcactcaggaaagtatctcgttactggaagttagcactctagggaaggcaaaaacagaaccaaataaatgtgtgagtcagtgtgcagcatttgaaaaccccaagggactaattcatggttgttccaaagataatagaaatgacacagaaggctttaagtatccattgggacatgaagttaaccacagtcgggaaacaagcatagaaatggaagaaagtgaacttgatgctcagtatttgcagaatacattcaaggtttcaaagcgccagtcatttgctccgttttcaaatccaggaaatgcagaagaggaatgtgcaacattctctgcccactctgggtccttaaagaaacaaagtccaaaagtcacttttgaatgtgaacaaaaggaagaaaatcaaggaaagaatgagtctaatatcaagcctgtacagacagttaatatcactgcaggctttcctgtggttggtcagaaagataagccagttgataatgccaaatgtagtatcaaaggaggctctaggttttgtctatcatctcagttcagaggcaacgaaactggactcattactccaaataaacatggacttttacaaaacccatatcgtataccaccactttttcccatcaagtcatttgttaaaactaaatgtaagaaaaatctgctagaggaaaactttgaggaacattcaatgtcacctgaaagagaaatgggaaatgagaacattccaagtacagtgagcacaattagccgtaataacattagagaaaatgtttttaaagaagccagctcaagcaatattaatgaagtaggttccagtactaatgaagtgggctccagtattaatgaaataggttccagtgatgaaaacattcaagcagaactaggtagaaacagagggccaaaattgaatgctatgcttagattaggggttttgcaacctgaggtctataaacaaagtcttcctggaagtaattgtaagcatcctgaaataaaaaagcaagaatatgaagaagtagttcagactgttaatacagatttctctccatatctgatttcagataacttagaacagcctatgggaagtagtcatgcatctcaggtttgttctgagacacctgatgacctgttagatgatggtgaaataaaggaagatactagttttgctgaaaatgacattaaggaaagttctgctgtttttagcaaaagcgtccagaaaggagagcttagcaggagtcctagccctttcacccatacacatttggctcagggttaccgaagaggggccaagaaattagagtcctcagaagagaacttatctagtgaggatgaagagcttccctgcttccaacacttgttatttggtaaagtaaacaatataccttctcagtctactaggcatagcaccgttgctaccgagtgtctgtctaagaacacagaggagaatttattatcattgaagaatagcttaaatgactgcagtaaccaggtaatattggcaaaggcatctcaggaacatcaccttagtgaggaaacaaaatgttctgctagcttgttttcttcacagtgcagtgaattggaagacttgactgcaaatacaaacacccaggatcctttcttgattggttcttccaaacaaatgaggcatcagtctgaaagccagggagttggtctgagtgacaaggaattggtttcagatgatgaagaaagaggaacgggcttggaagaaaataatcaagaagagcaaagcatggattcaaacttaggtattggaaccaggtttttgtgtttgccccagtctatttatagaagtgagctaaatgtttatgcttttggggagcacattttacaaatttccaagtatagttaaaggaactgcttcttaaacttgaaacatgttcctcctaaggtgcttttcatagaaaaaagtccttcacacagctaggacgtcatctttgactgaatgagctttaacatcctaattactggtggacttacttctggtttcattttataaaagcaaatccaggtgtcccaaagcaaggaatttaatcattttgtgtgacatgaaagtaaatccagtcctgccaatgagaagaaaaagacacagcaagttgcagcgtttatagtctgcttttacatctgaacctctgtttttgttatttaaggtgaagcagcatctgggtgtgagagtgaaacaagcgtctctgaagactgctcagggctatcctctcagagtgacattttaaccactcaggtaaaaagcgtgtgtgtgtgtgcacatgcgtgtgtgtggtgtcctttgcattcagtagtatgtatcccacattcttaggtttgctgacatcatctctttgaattaatggcacaattgtttgtggttcattgtctccttaaattagactgtaagcaccttgatggaactcatactaccttttatttcacacacacgcacacgcgcacacacagcctacacatacactgcctagctcattgtagcatactaaatactgattttaatgaataagctaaaccttcgaaacccatttgctaatcccagcactttgggaggccaaggtgggtggatcacctcaggtcagaagtttgagaccagcctggccaacatggtgaaaccccacatctactaaaaatacaaaaattagctgggcgtggtggccaatgccttgtaatcccagctattctggaggctgagacaggagaatcgcctgaacctgggaggcggaggttgcactgagctgggattgtaccactgcactccagcctgggtgacaaagtgagactccatctcaaaaacaaacaaacaaaaacacatcatttcccctatagcaaaaacatgacggcacttactgtatcaagagaggtgagaaaaaggagccacagcaggatgattcaagggactctgcatagctccattttaagaatatgcctactgcaggtcagagaaggtaagcaaactgcctaaggccacacagccaggtacagaactctcaccaatattattgccagcaatcgcaattttggtgtttattcttggtaccaagttggagactatagggttctcttcctaatagagaccatctagcctttcactgttttgtggatacttctttctcttcttctttttttttttcccttttaaaatctagttatttttttctttttggtttctttgacacagggtctcttactctgttacccaggctggaatggagtagtgcagtcatggttcactgtagctttgacttcctgggctcaagcgatcctcctacctcagcttcccgagtagctgggaccacaggcgcccaccaacacctccagctaatttttaagtttttactagagacaacatctcactatgttgcccaggctggtctcaaaatcctgggctcaagtgatcccacctcagcctcccaaaatgctgggattacaggtgtgtgcaaccacgcctggcctattttttttttaattgctcataaatcatcttttttctttaaaaaaaagaaagatgggaggctaaagcaggagaatcacttgaacccaggaggcggaggttgcagtgagctgagatcatgctgctgctctccagcctgggcaacaagagtgaaactccatctcaaaaaaaaaaaaaaagaaagtacacaattttactttctggacctaatggtcaaggccaataatttggtcacctatgaaataaataaaagctttaccatatatatgaccatttgataatgtaatatgaaatgtttatgtactaaaggcagaatagtctagaaaaaacattctgtatcacaacgtctaaaaatgaatatcatcttcatcatagaaccaggctctttctcctaatttttttttttgagatggagttttgctctgtcacccaggctggaatgcagtggcacaattttggctcactgcaaccttcagctcccaggttcaggatcaagtgattttcgtgcttcagccttctaagtagctgggattacaggtgactgccaccacacccagctcatttttttgtatttttttagtagagagagggtttcaccatgttggccaggctcgtctcgaactcctgacctcaaataatccacccgtctcagcctcccaaagtgctgagattacaggcgtgagccaccaggcctggcctcctaatttttatttgtagaagtggcaccaaaattttccaagttctcatgcaaaaattcaggctcatctcagtttatttttttcatttatttatctcccactaaattgacaacttctaataattaggttggttctttgtattcccagcacagggttctatgcagaatacacacacagcagttgctggcaataatattggtgagagttctgtactgggctatgtgatcttagacagtttgcttatgttctctgacctgccgtaggcacattcttaaaatgaagctgttcagaccccctcgattcatcctgctgtggcttctttttcccacctaaatcttaaatacccttttagctgctagtaagtgaatgatgtttttttatgaactttctgaagtcagattagatgaagttgagaaaagcctgatattcttataaagttatatatgtgcatcatagaaaacttagaaaatacagataaacaaaaatcatccatggacgaaccttgaagacattgtgttaactgaaataaaccggacaccaaaggacacatgttatatgcttccacttatatgagatacctagaatagttacatttggttactctgggtacattgcctatagataagccttgctccacaaggagcagttaaaaaaaaaaaaaagataaattcataggatggaaggtagaatagtggttactagggacttggggagggggaaatggggagttactgtttgatgagtgcagatttcagtttgggatgatgaaaaagttctggagatagatagtggcaatggtaacacaacagtgtgaaaataatgccactgaactgtacacttaaaatgattaaaatgataagttaattgtaatttgtgttatccagaaatggttagcaatttattggtgtatattcttttagtattcctgtgtgtgcacaggggtgcttgtatatactttatctttaaaatatatccaggaagctaggcacagtggcttacacctgtaatcccagcactttgggagggtgaggcaggaagattgcctgagccccggaggtcaaggctgcagtgagttgtgatcacgctactgcactctgttctgggcaacccctgtctgggaaaaaaaaaaaaattagtgaggcttagtggtgcacacctgtagtctcagctacttgagtggctggggtaggattgcttgatcccagcaagttgaggccgtggtgagccatgatggtgccactgcactccatcctgggtgatatggtgagaccctgtctcaaaaacaagaaatccagataattctgtgcattataatctagcttttactggatcattaaaattcttttttctttttttttttttttttctgagatggagtttcactcttgttgcccaggctggagtgcagtggtgtgaccttggctcaccgcatcctctgcctcccgggttcatgcgattctcctgcctcagcctcccgagtagctgggattacaggcatgtgccaccatgcccagctaactttgtatttttagtagagacagggtttctccatgttgaccaggctggtctcaaactcctggcctcaagtgatccacccacctcggcctcccaaagtgctggggttacaggcgtgagccaccgcactcagcctgggtcgttaaaattcttaagtgacttcatttttaattactatatgggattctatctttccagtgtatcatgatttatttgacctattgctgaatgttggaggtttcagggtaagaggcacagtttgctattatgtacatcactatagtggcatcctgatagctaaatatttgcctacatccctgattatttccttagtctaaattactgggactaggattttggtgtttgatacatgttactaaattgttttttagaaagattaaaccagtttatgctcttccagcccctgtggtatatgatagttcccattttcctgtaccttgccaacactgggtgatatccagttttaaaatctaaatcttgcattgctatgagaactacaattagagaaggcttatcttctactgcccattctctgtacagagcaaatccctctagacctgaagccccttggagttgtcaagaaacctttgagatgactccccactctgtatctgagctgtcaccagtattctccacttcttcaggattgccatggcaactaaattgatgaaaagatttaggaggccttttctctctttgcaattcctatgatcctttttgaatgtgggtttgggactctgtcaatatacccatcatctaattctgtccattgtgttttaaagtttaaggttgcaatttctgattacatctgccttagccatactgtattatatttgacattcaatatacaatgtccttgtttttctgtatttctaatcttattcccagagatgtgtctatttgttcaggattcattttgcaacgtgtttttactaagcatctacccaaaaccgttgaagtcagatttcaggctgtcttacgtctaaagtagcacaggcaggaaaaactattgaagtgggatttttttttccctttttgtactgaaccgagaaaaagtatatagatgatagagaattcctaatttggtatcattgatatctgggtttttgtttgtttttacagaagactgattaactatacttatttattaatttatcttctcattaataaacacttgctgagtgcttactgtctgctaggcattagggagacaaatatgattaagggaagcttcctcctatcaaggtcatgtgttccatttgggtatactaatgcattagcaatgtaaatcaagtagtgagagatcatctgttcccgataggagatggattattggtggggacttctgtgtgtgtgtgtgtgtgtgtgtgtgtgtgtgtgtgtgtatgtatgtgataaaataaatataggaaatgttaattatagattctaagtagtagatatataaacactcattgcaaagttgcttcaagttttctgtatatttgaaaatattcacaacatgtcgacaaaactagcatgataaagccactatttgtgctaagacttcagcttgtatctggattaggcttattatgtagtagtaggaacattagaaatagttttaactcattaaatacacatgttttatgggaaggttttatatatatatttatatgtaatgaatgtgaacaaacaagggtcagatatacactctgcttccctccagaccagttccggctgctctgctgcacatttcaggagtcttattagaattagccacattctgcccacttgcccttacttctcatatttcacaactcctcctggtggggacttaaggagacattcaaactaggccttgaaagatgagaatttttccaagtggaaaaagaggagtggcagcaagtaaggtaaaggtacagagtcatggaattcccaggaaacgtaaagttgtcatgtgttataggaaaacaacttgtgtgaggggtgttgggagaaatgagagataataccagggtataaagggccttttgaatgctatgttgaggaattttatcctaatggcagtaatgactaacaattatatagtgttcaaaaagtataaatcagcagtggtataccactaagggtttttttcttttctttttttttttgagacagagttttgctctgttgcccaggctggagtgccgtggcacgatctcagctcactgcacttccgccacctgggttcaagtgattcttctgcctcagccagtgtttcactgtgatggccaggatggagcactaagggtctttatggaagaaaaagacatgataaacaaggcttttagggaacttctacagtaatgtagctgtattaaaagtagagatcagagcagcatagtagaagtagaaggctagagctaattgaaggagcacttcagaattagaatcaagaagtcttagaaacctattggttttattctccctaatgtatttggccacttacctgctggggaatttgtctaagttataaaaaataattcctttgggaaacccaaaggaaagttatctattaataattaccccactactttttctgatttatgtaatggccacgtagaggttagatgtgatggttgtgacagtagtgactaatacagcctgtgaagcattttggtcagatatctatgtgctttcattccaggttgactgaggcaagactttggctagggtttgatcagtgatgtaactactcacgagtaccacgtggtggcaatggcattgctgcagaccttggcagcaaagcagtgttagagtagcagtagaaacctttgtgaagctaggaatacattttctggtcataaaaacctcctgaaaattgtgaactcagtgtagcaggagaaagaagatggcttgtttttagtaaagggcaaagtcatttttaaggatcagaagaagaaacggagagtgaaacaatgtgttcctgccctactcccccactggactttttggcaaccattgctgttccttctaaaagtgatttttaaacatgtatattttgaagccaggcacagtgactcacgtctgtaatcccagcactttgggaggccgaggcgggcagatcacctgaggtcaggagttcaagaccagcctggccaacatggtgaaaccccgtctctactaaaaatacaaaaattaggccaggtgtggtggctcacgcctgtaatcccagcactttgggaggccgaggcgggaggatcatgtggtcaggagatccagaccatcctggctaacacggtgaaacaccatttctactaaaaatacaaaaaattagctgggcatggtggcgggcgcctgtaatcccagctactcaggaggctgaagcagaagaatggcttgaacctgggaggcggagcttgcagtgaaccaagattgcgccactgcactccagcctgggcaacaaagtgagactccgtctcaaaaaaaaaaaaaaaaattagtcgggcatggtaacaggtgcctgtaatcccagctacttgagaggctgaggcagggagaattgcttgaaccaggtaggcggaggttgcagtgagccaagatcgcaccactgcactccagcctggggcaacagagcaagactgtctcaaaaaaaataaataaataaaataaattcttaagaaggatattttggaaaactccttacatacctaaattctttgtttatcaaatacttggacttagcacactcttctttgaaatggaccaataaacaacaggagcccataagcaaaaagaactcattattttaaaaacagtaactatccttacaggctttctcagggctctttctgttggatccttccctctcacaggtccttgctaatgatctctaggtggacacattctagatgagatgtccctgtctagaatggcagcaccatgagggctatatcctcagtactaggacagcgcctggtgcttaatagatagtaaatagttgtctaattaactgagcaaacagatagattcatgaattagctttttgctttttctgttagaaactaaaggttcaggtcaggcacaatggcgcatgtctctaatcccagcactttgggaggccgaggcgggctgatcacttgaggtcaggagttcaagaccagcctggccaacatagtaaaaccctgtttctacaaaaattaccaaaattagccgggcgtcttggcaagcacctgtaatgccagctacttgagaggctgaggtgggagaatcgcttgaacctgggaggaagaggttgcagtgagccgagatggtgccaacctgggtgacagagggagacttaaaaaaaaaaagaaagaaagaaagaaaagaaactaaaggttcaaagaatcccagaaaaggaagagtcctcacaagccagtaatctaggcaggattactgatagtatttttatatttgttgtatttttataaaatgccatagatagagggcttttttcaacattacatcagtctaaaaatcacacatttttatatgaactaacctaaatgtctgatgaatctcacaacaccaagtctttgaaatgtgcccatataaataaaatgttaacagattcatgctaattttaaatatcgatagtgtttaaatgccttaattattttttcactccctagctttaaaagaaaataaccaacttcaaaaggacatcacaataacatcaagtctatttgggggaatttgaggattttttccctcactaacatcatttggaaataatttcatgggcattaattgcatgaatgtggttagattaaaaggtgttcagctagaacttgtagttccatactaggtgatttcaattcctgtgctaaaattaatttgtatgatatattttcatttaatggaaagcttctcaaagtatttcattttcttggtgccatttatcgtttttgaagcagagggataccatgcaacataacctgataaagctccagcaggaaatggctgaactagaagctgtgttagaacagcatgggagccagccttctaacagctacccttccatcataagtgactcttctgcccttgaggacctgcgaaatccagaacaaagcacatcagaaaaaggtgtgtattgttggccaaacactgatatcttaagcaaaattctttccttcccctttatctccttctgaagagtaaggacctagctccaacattttatgatccttgctcagcacatgggtaattatggagccttggttcttgtccctgctcacaactaatataccagtcagagggacccaaggcagtcattcatgttgtcatctgagtacctacaacaagtagatgctatggggagcccatggaagatacatggtatacaacatagctcttgctctattggaagctaagtggaatgggagaaattggtgacaggcaaccccataatttcagaaagctatgaaaaagtactcagacatattccttataacactggtgtcacatcacaaagacctatttaatgtgcttctgatttatagggagagacatcctatacttcaggaactgcactttgatccacagaaagcctagtgatgtagagctcctgttagttcaaaaggaaaagaaaagaacaacacagaaagcctaattatgcaatagagtcaagtgctttatagcaatgttacagttatcaaaaaaaatccagatggacctctgagaggatgccattggagtaaccaggcagatgcagttgatcagagctgacttcctataagaagtgagcactgagctgaggaataatggcataaatgaaggaaagtgagatggaaatttgagtttttaattggaaagacaatacatcaggcagatttttaaataggggcaaacaaacagacacataggagatgctaggcatggggtccccactaggatgctgcttagaaacatgcaggggtggtgagtactcccaaagtacacttcattcctagctcagtgattcttatctgagtgttaaagttccttcttcagcaccccgttccacagtccaactgggaactttaagacctttcttggagtctttctaggaactcaagtctgctacttatacagaacagtggctttggtccccagttgtgccttgcagtatttttgtgttcaggaagaaacagtagctcttggataaagaagctagctagaaactctgttgctatggcagtgcttcaaaatgtatttccttaaatgctttctttgtaactatcttcatttagttcatctctcagataatgagagatcagagtcccatccccagtataatactcttctttagggtactttcaccatcttcagtctaaacacagactagactttcaattataatgtgtaagatttaaaatgttattattgtgtgactttgaatatctgtgtaaatctactatctcctctttggtatatacgtgtgtttatttttttctggagatctgtaactgaaatgcttaatttctgaattgttttggatatcacaacttaataccaacataagttttgagcctttttctccctaaatctggtgtgagtctaactgaaactcaaatgaactttttaaaaataattttttcttttctttaattttttttttaagtagagacagggacgcactgttaactaggctggtcttgaactcctgatcttgagccatcctccccgacctgagcctcaccttatagagagggtcttgctctgttgcccaagctggagggcagtggcataatcacagctcactgcagcctctcgacctcctcaagcgatcctcctgccttagcctcccaagtagctgggactataggcgtccaccaccatacccagctaatttttttttttattttttgtagagacaaggtctccctatgttgcccaagttggtctcaaactcctggactcaagcagtcctctcacctcagcctcccaaagtgctggggttacaggtgtgagccatggcacctggccagaacttctagtaaaaagaatattgttgccgggtacggtggctcacgcctgtaaccccagcactttgggaggccaaggcaggcgaatcacctgaggtcgggagctcgagaccagcctgaccaacatggagaaaccacatctctactaaaactacaaaaaattagccgggcgtggtggcacatgcctgtaatcccacctacttgggagctacggtgcctggcctagtttattatttcttaatatctgttgtcttccagtgtcttccttaattcttcacaataccctgtacaatgcttagcacacagtgggcagtctgtaagtttattaaatgtttggtgtggcccatacttcctatccacaaagaatgtaacatgttaagacatctagatgagggaatgatttaagaggaactacaataatattctgaaacttggactctggatctctgcatttagactttcctaaaccagccagcaagtagatcatcatgtcacaaggcttaggttgggcttgctgttcagagaatgaattaaggattaaggagaaaaaaaagcagaaaggttttgctctgtttttcaggttctattgagttgttaacttctaacaagttatcttatttgcttcattgcatgaggcccattgtagtaagaagaggaatttatatgctaaatgttctggtgatagaatgacttttctttttttttacagtccaaaggtcttttttttttttttttaacacctattatgccatgaattcatagggaataggttccagctgctcaggctccttcccattggttctcacaaagtgtgcttctctgggtggagcaggctggtgcttcagttgaacccacgtacctttctctttggcttctttctttttctgatcattttccttcacgcgtttcaggaagctgtcttggctcttagagtgtttaatgtgctcaatacgcacattaattctcttggcaagaatcttgcccttaacttgtttacagcgatgccaacagcatgctgggtcacgttgtagacttttccagttttgccatggtaacacttgtggggcattcctttttgaacagtacccgttcccttgatgtctacaatttcacctttcttacagattcgcatatacatggccaaaggaacaactccatgttttctaaaaggcctagagaacatatatcaggtgcctctcctctttccctttgtgttcgtcattttggcaaattactgaaagatggtggttctggccaaaaggaggaatgactttttaatagctgtgtttgtatctgagccttccctctgcctttcattttttttgttttgttttgttttgtttttgtttgagatgaagtttcacttttgttgcccaggctggagtgcaatggtgtgatttcggctcattacaatgtccgcctcagcctcctgggtagctgggattacaggcacccgccaccacgcccagctaatttttgtatttttagtagagacagggtttcaccatgttggccgggctggtctcaaactcctgacctcaggtgatctgtccacctcggcctctcaaagtgctgggattgtaggcgtgagccacatcacctggccacttttttaactctttccaatggttaattccgtttgatatggttccttggaacttgcacattaccctttatcaattatcaccctgtattgggggtggggaggatgatacctctcttcatagttagatcctacttactttcaacagagttcttaacaatcctagaaactcacaggtccagaaaagacaagcataaaggaaactataaataatgcatttgaagactaactcaggaaatcaatgattatttccccccaggctacccagtgtcttaaaaaaacagtttaattaatacaatcttttgtttcaattttctacctatatttatggcttttagcttttctaataaaagctcaaaatgaattacagtcatcagtgactttttaatgaatagaagacttttgcaatttttaactatttgtttttacttattaaatatttccgccttggccaggcatggtggctcacgcctataatcccagcactgtgagatgccaaggcaggaggatcacttgagtttaagagttctagaccaggctgggtatggtggctcatgcctataatcccagcactttgtgaggccaaggttggcggatcacctgaggtcaggagtttaagaccagcctggccaacatggtaaaaccccatctctacaaaaaatacaaaaattagccaaggggtggtggtgggcacctataatcccatcttcttgggaggctaaggcaggagaatcgcttgaacctggaggcagaggttgcagtgagccgagatcatgccactgtattccagcctgggtaacagagcaagactctgtctcaaaaaaaaaaaaaagtttgaaaccagcctggtcaacacagcaagacacccatctcgttgaaaaataacggtcgggcgcagtggctcacgcctgtaatcccatcactttgggaggccgaggcaggcagatcacctgaggtcgggagttcgagaccagcgtgaccaacatggagaaaccccatctctactaaaaatacaaaattagttgggcgaggtggtgcatacctgtaatcccaactacttgggaggctgaggcaggagaacagcttgaacctgggaggcagagaggttgtggtgagccaagatcatgccattgcactgcagcctgggcaacaagagcaaactccatctcaaaaaaaataaataaataaaaataaataaataagtacttctgcctttaagccacttcctagaaggcagtggcacaaagtgatacatttggaggagtaaatatattacaaaatgaattaggctgggcgcagtggctcatgtctgtaatccccgcactttgggaggccaaggcgggtggatcacttgaggtcaggagttcgagactagcctgatcaacagggtaaaatcccatctctactaaaaataccaaaaaaactagctgggcgtggtggcaggcacctgtaatgtcagctactaggaaggctgaggcaggagaatcgcttgaacccaggaggtggaggttgcagtgagccaagattgcaccattgcacttcagcttgggcaacagagtgagactccgtctcaaaaaaaaaaaaagaactaacatgccagaactttgccttcagtatgttttgtgatttttcccttcttgtgccatttcatcattagttccatgtattatttaagatttcttatcaaccagcaccttgggatttttttgtgtatgtgttggtttagggggtttatttgtttttttcttttttttcggtaattgaaaatgtgaagcaaaatgtcacctgttttttctttcatgtctgacactcatgtcttgtttacccccgacatgcagaagctgaaatccccatttcatacagtcttcaatgtggaggcagtagggatggagaaaataatgtactttgtgctctccggtactctttctttcctattgtctgaggggatttgggcataatttattttgctgcagagataaaaatttgttatatatattttttatcattcagggccaaggaatatagattttttttttcagccttgtctcagctgggtgtctttatttactctgtcttaaagtgttccttttattatcattattattttttaatcattgaattccatttggtgctagcatctgtctgttgcattgcttgtgtttataaaattctgcctgatatacttgtttaaaaaccaatttgtgtatcatagattgatgcttttgaaaaaaatcagtattctaacctgaattatcactatcagaacaaagcagtaaagtagatttgttttctcattccatttaaagcagtattaacttcacagaaaagtagtgaataccctataagccagaatccagaaggcctttctgctgacaagtttgaggtgtctgcagatagttctaccagtaaaaataaagaaccaggagtggaaaggtaagaaacatcaatgtaaagatgctgtggtatctgacatctttatttatattgaactctgattgttaatttttttcaccatactttctccagttttttgcatacaggcatttatacacttttattgctctaggatacttcttttgtttaatcctatataggttttttgaacctataacataagctacaacatgagaaatgtgcggttagatagatatgtcccttctgaaggtcagaaaaaaatataatggaggtaaaacctgaacaagcttggaaactgatggtagacttcttcaaggcagcccttgccctaattaaaattcttgtctttctagaaaaagtctagctgttgatttaccacagaaaataataataataattactattattattattttttgagacagggtcgccctgtgtcacctagattgcagtggtgcagtcatggctcactgcatcctccgtttttcaggctcaagcaatcctcccaccttagcctcctgagtagctgggtccacaagcatgcgccacccacacccactaagtttttgtatttttggtagagatggagttttaccttgttgcccaggctggtctcaaattcctggactcaagtagtccgcccgccttgccctcccaaagccagaaaacatttagaatatctttcagagatgtgtatttacaccactattaacacagggctgtatagcagtccagtactggactatgtagtccagtactattcttttccttactggagggccaggcgtggtggcaggtgcctgtaatcccagctactcaggaggctgaggcaggagaattgcttgaacctgggaggcagaggttgcagtgagctgggaccgtgccattgcactccagcctgggcgacagagcaagactccgtctcaaaacaaaaaaaaaaagagagagagagcagtaattcaggtctcacccatcttcaatccagggggcctagccttagtatttgacccatagtaagcacccaataattgtttaaattaattaacctctgaggccctttaaatctgttgataagtatcttattttgcaaagtcctaagcacttggaagagcagaggaactatttactgggtgtgtatgcttttctaacaatattttatagctggcttttgtttttagaatgaatttgaacattgaaaaggcaggcaatagggatgattctgtgaattctgctaaaactgagtagaaagaatgagtgtagagatgtcgacattgatcaactttctatcttcataagagatctgattctaacatatccatttagactcaagtagaatattgtgtatagagtgagtggcagtgagtaatttggtaaaaatttgctgacctgcttttattctttcctcctttctttcttcctttccttccttccttccttccgtcctttcctttcctttccctcccttccttccttctttccttctttctttcctttctttcctttcttcctttctttccttcctcccttccttttcttttctttctttcctttccttttctttcctttctttcctttcctttctttcttgacagagtcttgctctgtcactcaggctggagtgcagtggcgtgatctcggctcactgcaacctctgtctcccaggttcaagcaattttcctgcctcagcctcccgagtagctgagattacaggcgccagccaccacacccagctactgacctgcttttaaacagctgggagatatggtgcctcagaccaacccaaccccatgttatatgtcaaccctgacatattggcaggcaacatgaatccagacttctaggctgtcttgcgggctcttttttgccagtcatttctgatctctctgacatgagctgtttcatttatgctttggctgcccagcaagtatgatttgtcctttcacaattggtggcgatggttttctccttccatttatctttctaggtcatccccttctaaatgcccatcattagatgataggtggtacatgcacagttgctctgggagtcttcagaatagaaactacccatctcaagaggagctcattaaggttgttgatgtggaggagcaacagctggaagagtctgggccacacgatttgacggaaacatcttacttgccaaggcaagatctaggtaatatttcatctgctgtattggaacaaacactttgattttactctgaatcctacataaagatattctggttaaccaacttttagatgtactagtctatcatggacacttttgttatacttaattaagcccactttagaaaaatagctcaagtgttaatcaaggtttacttgaaaattattgaaactgttaatccatctatattttaattaatggtttaactaatgattttgaggatgagggagtcttggtgtactctaaatgtattatttcaggccaggcatagtggctcacgcctgtaatcccagtactccaggaggccgaggcaggtggatcagctgaggtcaggagttcaagacctgtctggccaacatggtgaaaccctgtctctactaaaaatacaaaaaaattaactgggtgtgctagtgcatgcccgtaatcctagctactctggaggctgaggcagcagaatcacttgaacccgggaggcggaggttgcggtgagccaagatcacaccactgcactccagtctgggtgacagagcaagactccatctcaaaaaatatatatatatatatatacacacatatattttatttcaactgttagacaagagtccaaaggccaaagaataaagttttaggccagtcctttattagaaaatgagtcaaatcccaaagcaagttttttttatgagttaatgaatataaatgactacatattttatgccttaaaaatcacttttaatgaatggtgttttatggcttgtaaatcagagttttaatcagtaaagaaagtttttaatcctcaaaaacacgttatcataaaagacactgtttggcatcaaatgtggtatttggccatgttcattagggtcattttaggaatctcatacattctacttagctatgcttaattcctgataccatggcattttctgaaatgtttcaaggatgacatctctgctgtttttaatttggtaatgatatctgctgatttattaagtgaaaaaagtaatggtgtcattaccttggatgaagaaacaaaaataaagcatttgccacatttttcaacttttttttcctttcttacaaaattgctataagctcattgcccccaaattggacaatatagggaataaaaaagataatttggggtggggttagacacgggtcttgttatgttgccgaggctggtctctaactcctggcctcatgcaatcttcctaccttggcctcccaaagtgctgggattataggtgtgagccacttcaccaagctgagatgccacctcttaaaagataaaataaggacagattacagccactgctcatgcctgtaatctcagtactttgggaggccaaggtgggagaattgctcgaggccaagagttcaagaccagcctgggcaatgtagcgagacctgatctctataaaaagtaaaaaaaaaaaaaaactagctggggccaggcgtggtgggtggcttacgcctgtaatcccagcactttgggaggccgaggcgggcagatcacctgagggcaggagttcaggaccaacctgaccaatatggagaaaccctgtctctactaaaaatacaaaattagccaggcttggtggcttatgcctgtagtcccagctactcgggaggctgaggcaggagaatcgcttgaacctgggaggcagaggtttcagtgagctgagatcgcgccattgcactctagcctgggcaacaagaatgaaactccatctcaaaaaaaaaaaaaatcagctggaaggtggcaaacacctgtggtcccagctactcaggaggctgagacaggaagatcacttgagtccaggaggtcaaggctgcaggtgagccatgtttgtgccactgcactgcagcctggatgacagaccgagacccttctcaaaaaaaaaaatattacccgtactcttttttgagacggagtttcactcttgttgcccaggctggagtgcaatggcgcaatctcggctcagcgcaacctccgcctcctgggttcgagcgattctcctgcttcagcctccccagtagctgggattacaggcatgcaccaccacgcccggctaattttttgtatttttagtagagacagggtttctccatgttggtcagactggtctcgacctcttgacctcaggtgatccgcccaccttggcctcccaaagtgctgggattacaggcctgagccaccgcacccggcctgtactcttattctttaataataaaatatttctgtgtttctttagtcattttacataaacttttatttatttatttatttttatttatttatttttttgagacggagtctcgctctgttgcccaggctggaatgcaatggctcaatctcagctcactgcaagctctgcctcccgggtacacgccattcccctgcctcagcctccctagtagccgggactacaggcgcccgccaccacgcccagctaatttttttttttgtattttcagtagagacagggtttcactgtgttagccaggatggtcttgatctcctgacctcgtgatccacccgtctcggcctcccaaagtgctgggattacaggtgtgagccaccgtgctcggcccataaacttttatttttaaaataatgtcatgataaataatattgcttaggtgtctttaatatattagtaacatttctgttttattgtacatcaacatttatattcaaattaatgggtgaagagtactccattggactaggtatatcgtaatttaatctcctattattggacaactacattgtttctaaaattatactattcctatgactaaacctttgcatatatcttttatctccctaggatatatttctaaaactagcattgttgactgaaagtgtaaatacgtgttaaggtgtttgctacataatgccatatttcctttttaggaaactaagctactttggatttccaccaacactgtattcatgtacccatttttctcttaacctaactttattggtctttttaattcttaacagagaccagaactttgtaattcaacattcatcgttgtgtaaattaaacttctcccattcctttcagagggaaccccttacctggaatctggaatcagcctcttctctgatgaccctgaatctgatccttctgaagacagagccccagagtcagctcgtgttggcaacataccatcttcaacctctgcattgaaagttccccaattgaaagttgcagaatctgcccagagtccagctgctgctcatactactgatactgctgggtataatgcaatggaagaaagtgtgagcagggagaagccagaattgacagcttcaacagaaagggtcaacaaaagaatgtccatggtggtgtctggcctgaccccagaagaatttgtgagtgtatccatatgtatctccctaatgactaagacttaacaacattctggaaagagttttatgtaggtattgtcaattaataacctagaggaagaaatctagaaaacaatcacagttctgtgtaatttaatttcgattactaatttctgaaaatttagatctagataaagctatagtgtggattattttatgtatatttacttgagaaaataattattaaatattagtggaaaagctatactttgggtatgatataggactttcgaattggaattttcctttctatctgtaaaagcaagtaggtatagttttattccccagaaggcatctttttctcccccttgtctcacatgggtgaatttaccagcatatttaactaaattcagactggttccaaatgtactgccagatagtagcatttctctagtgtttgttttcatcctggcttgtaagaatgccctgccacttctgccctgcaatatcccttgctattaggattttggcatcaccttgggtccttaatgccagaaatgggaattgcttcatactgtggaaaaatacccattaaaatattaagaccagtaaaacctcgtttctgcttgggctatttgtggatttcagacatcctgagaagtttaccacccctgtaattaattgtcattgtcatcacttcataataaaaataattgcatggccgggcatggtggctcaagcctgtaatcccagcactttgggaggctgaggtggtcagatcacctaaggtcaggagatcaagaccagcctgaccaacatgaagaaaccccatctttactaaaaatacacaattagccgggcgtggtggcgcatgcctataatcccagctactcaggaggctgaggcaggagaattgcttgaacccgggaggcggaggttgcggtgagccgagattgcaccattgcactccagcctgggcaacaagagcgaaactctgtctcaataataagaagaagaattgcgtgaatatttctttaaaactatgatgagataacataccagattatcaaatggattcagtagtgggtgtgccatttattgcacactgagagatgaccaagtcattctgaaatatctttattaatatatccttcctaggatttttcatcctaacttctccataggtagttacttagcataacatctctgtggccagatgtatcccactactaaaagggcaaagtaagctgtggctgccctggtagatacaatgagtaagtgcacagtgatggctataaatgttttcatctcataatcccatgtccagaccagcaatttgctctgaaagctcttacctgtgtctgtttcaatggctcttgatcacttgcctgcacgtccagaattccttatttattcattgaaaattagcgttctttatccctttgttttgcaagttcagctttttagagatggctaaaatggtctaatctttcttggcaaaggcaattctgagctgcagattagactacaagtggcttgggtacatgttgtctttaaacaagcgaagaggaaaactttgagctctattcagacttggtgaagtgtggtaaatttatgatgaaagctactgactgtattacacatgattaattctgaagcccatattaagatgatcttttcagcagttcagcattgctcttctaactgaacagtttcaaggctgggatttcagcaattaatcagttcagaattgctaatgatcctggcggagggtggtagcaaaagggggaggatgtcattagcttctctagcctgccttttttcagtgccctgtggcagtatggagtgaggcaacatgaaagaaagatggcctgaccttcatggcagtattgtgcaacacgtaaatactggtgtgagtggctgtggctatggctagtaaatgatggcccttggtaaacaaagttatttatcagacaatacctaccagctaggtcaactgtgcccataattgatctggttaatttcttttgctgcctattgatttttatttggttgatagataatagctagaggactctaaatttctttggggaagaacatgaaccccttctaagccttcttacgagagaattgatcgcttttgcactgacctttagtaacatcctgatttcagtgttttgtaactatcagagggttgagtcttggttttaagccatgtatatctgtagcataactttctgtgtaggctagttacctctcagcttataaagtgtaggctgataaatttatagtacagtagagtgtcactatgcaaagaaacgatcttagggaatcgaatgatatctgctattaaagcaaaattaatatatattttttctttttacttttttttttttttaaagacatgaaatctcactgtattgcccaggctggtcttggtctcagactcttgagctcaagcagtcctcccacctcagcttcccaaagtgctgggattataggcatgagctgccgtgtctggcccagtatatattttttaagttttaagttttgtggtacgtagtaggtttataatattattttgaatccttagttgtaattttatgtctgctgatgtgtacataatttttattaaactatttatttgagacttcaggtatcttttttttttttttgagacggagtctcgcactctcgcccaggctagagtgcagtggcgccatctcggcttactgcaagctctgcttcctgggttcacgccattctcctgcctcagcctcctgagtagctgagactacaggtgcccgccaccacgcctggctaattttttgtatttttagtagagacagggtttcaccgtgttagccaggatggtctcgatctcctgaccttgtgatctgcccgcctcagcctcccaaagtgctgagattacaggcgtgagccaccgcgcccagccgagacttcaggtgtcttagaattttttaaatgtaccctttctgagaaaaacagagacttaaagctaggataactggtattctattttttttttttttttttttttacctccagcctgggtgacagagcaagactctgtctaaaaaaaaaaaaaaaaaaattcactttaaatagttccaggacacgtgtagaacgtgcaggattgctacataggtaaacatatgccatggtggaataactagtattctgagctgtgtgctagaggtaactcatgataatggaatatttgatttaatttcagatgctcgtgtacaagtttgccagaaaacaccacatcactttaactaatctaattactgaagagactactcatgttgttatgaaaacaggtataccaagaacctttacagaataccttgcatctgctgcataaaaccacatgaggcgaggcacggtggcgcatgcctgtaatcgcagcactttgggaggccgaggcgggcagatcacgagattaggagatcgagaccatcctggccagcatggtgaaaccccgtctctactaaaaaataaaaaaattagctgggtgtggtcgcgtgcgcctgtagtcccagctactcgtgaggctgaggcaggagaatcacttgaaccggggagatggaggttgcagtgagccgagatcatgccactgcattccagcctggcgacagagcaaggctccgtctcaaaaaaaaaaaaaaaaaacgtgaaaaaataagaatatttgttgagcatagcatggatgatagtcttctaatagtcaatcaattactttatgaaagacaaataatagttttgctgcttccttacctccttttgttttgggttaagatttggagtgtgggccaggcacggtggctcacacctgtaatctcagcactttgggaggccgaggcgggtggatcacctgaggtcaggagttcgagaccagcctggccaacgtgttgaaaccccgtctctactaaaaatataaaaattaggtgggcgtggtggcaggcacctgtaatcccagctactcaggaggctgaggcagcagaatcgcttgaacccaggaggtggaggttgcagtgacccaagatcgcaccattgcactccagcctggggacaagagcgagattcttgtctcaaaaaaaaaaaaaaaaaaaaaaggtttggagggtggtgagctgagatagtcaactattaactcctatctacctgctgggactacactggtgaggtggagcctaagtcctaaaacaacaagtgaggcagctggacgcggtggctcgcatcagtaatcccagcactttgggagcctgaggcgggcagatcacaaggtcaggagttcgagaccagcctggccaatatggtaaaacccagtctctactaaaaatacataaattggctgggcgtggtggtgtgcacctgtaatcccagctacttgggaggctgacacagaagaattgcttgaactctggaggctgaggttgcagtcagctgagatcctgccactgcactccagcctggcgacagagtgagactctgtctcaacaacaacaaaagaaagaacaagtgaggcaaaacctggagaccccagcttcatgtaacacctagtttgagtattgttgagagtttttcaggaaaaaagtctgataacagctccgagatagtcttaacatatgaaaaagcaaaaaagggaggagacagatcatttgtcctatacctttctcttttaaggttttaattataacttgtgtaatacaggagacctctgggtgtttttagttgactataaactaaatctgagtacacatttcagggctgctaaaaatgcttatttgaaactgggccgtattaacacaagcagaggctctggagcaagtgaagtacagatccagagccccactgtattctccaatggagtgattgcctgaaagatgatgtcagttttaagcaccgtgcttggtttttaacatggtcactgacaaattggagagtgtttatccagaggtagatggtaaagatacataaaagtaacttgaaatactgtcttttgaagaagaaatgagaagatttaaggaaataagacactgtcttcaagtatctgaagaaccgttacccggaagagaactgttatctggaacaggattaagactcactcatggggctccagaaagcagacgagtgcatggaggacgcagaagatgcagattgtgtggctcaactctaaaatctttctaacaaaattagttctctggatgtgttccagttcacttgatgatgattcttttgtttttgtttttgtttttgaggtgtagtttttcactcttgttgcccaggctgctggagtgcaatggcacgatcttggcttgctgcaacctccccctcccgggttcaagcgattctcctgcctcagcctcccgagtagctgggattacaggaatgcaccaccatacctaattttgtatttttagtagagacagggtttttccatgtcagtcaggctggtcttggactcccgacctcaggtgatccacctacctcggcctcccaaagtgctgggattacaggtgtgagccatcgcgcctagcctatgatgattcttttcacagagatacaggcacttaaggagaggatctaaaccccttggacacattgccgttgaacttctaagatcttaggtttccacttactcatgaaaattataccacagggtcagagggtagtgttcattggagccaggtgccagaacaagttattacaaactactattttagagaaaaatgtcattaaagtttaagataccttaagctataggtttgcatcaaagttaatgaaaggtaaaaagatgccaagcgtggtggctcaggcctgtaatcccagcgctttggggggccaaggcgggcagatcacgaggtcaggagatcgagaccatcctggctaacacggtgaaaccccatctctagtaaaaatacaaaaaattagccgggcatggtggcgggcatctgtagtcccagctactcaggaggctgaggcaggagaatggcatgaacccaggaggcagagcttgccgtgagctgagatccagccactgcactccagcctggctgacagagcaagactgcatctcaaaaaaaaaaaaaaaaaaaaatgcaaatcaaatctaaagtagttcagtctttaaactcaaagccaatacatttgctttgaactacaaatgaactgaagtttttaagtgtaataaatgttactaaatcggcttttgtagcagttaaacaaaaaacttcaaaaattgtaaggattctgtgagggagcatggctgctgctgctgctgctgcttgcagatagcctgctgtgtttaggatttagttaaatacatttctcctgtttaaaactaaatggtctttccttagtttgcttagttcttcagaagggcctttgaaacactgggaaataaacaagtgattctttagctactgctttctgaaatacttatataaaagctctgcactgtattctcccatccctctcaggggaatattagagggttaggactccccaggtagacattctaggggtgaaaatttgtcattacattgacatttcagatttaggttttcaacaatactgttttcttctttcacatattgccatctagtaatatagatgttctccgtccacattaatcaaaactattgacatggataattcctaattccttgaacactataatggagatctatagctagccttggcgtctagaagatgggtgttgagaagagggagtggacagatatttcctctggtcttaacttcatatcagcctcccctagacttccaaatatccatacctgctggttataattagtggtgttttcagcctctgattctgtcaccaggggttttagaatcataaatccagattgatcttgggagtgtaaaaaactgaggctctttagcttcttaggacagcacttcctgattttgttttcaacttctaatcctttgagtgtttttcattctgcagatgctgagtttgtgtgtgaacggacactgaaatattttctaggaattgcgggaggaaaatgggtagttagctatttctgtaagtataatactatttctcccctcctccctttaacacctcagaattgcatttttacacctaacgtttaacacctaaggtttttgctgatgctgagtctgagttaccaaaaggtctttaattgtaatactaaactacttttatctttaatatcactttgttcagataagctggtgatgctgggaaaatgggtctcttttataactaataggacctaatctgctcctagcaatgttagcatatgagctagggatttatttaatagtcggcaggaatccatgtgcagcaggcaaacttataatgtttaaattaaacatcaactctgtctccagaaggaaactgctgctacaagccttattaaagggctgtggctttagagggaaggacctctcctctgtcattcttcctgtgctcttttgtgaatcgctgacctctctatctccgtgaaaagagcacgttcttctgctgtatgtaacctgtcttttctatgatctctttaggggtgacccagtctattaaagaaagaaaaatgctgaatgaggtaagtacttgatgttacaaactaaccagagatattcattcagtcatatagttaaaaatgtatttgcttccttccatcaatgcaccactttccttaacaatgcacaaattttccatgataatgaggatcatcaagaattatgcaggcctgcactgtggctcatacctataatcccagcgctttgggaggctgaggcgcttggatcacctgatgtcgggagttcaagaccagcctgaccaacatggagaaaccccgtttctactaaaaatacaaaattagccgggcttggtggcacttgcctgtaattccagctactcgggaggctgaggcaggagaatcacttgaacctgggaggcgggggttgcagtgagctgagatcgcatcattgcactctaacctgggcaacaagagcaaaactccatcaaaagaaaaaaaaaatcgggtgcagtggctcatgcctgtaatcctaacactgtgggaggccaagacaggcagattgcctgagctcaggagttcgagatcagcctgggcaacatggtgaaaccctgtctctactaaaatacaaaaaattactcagcgtggtggcatgcgcctttagttccagctactcaggaggctgaggcaggagaatctcttgaacccgggaggtggaggttgcaatgagccaagatcgtgccactgcactccaacctggcaacagagcgagactccgtcttaaaaaaaaaaaaaattttgcagcgcaaaccaggatatcctctgttctcatttgttctagatttcaaaagaaacagtcctttctttggggaaaagagaaaggaaaaggagttttataaaaggaaagaaaagattcataagaacaagaagtgggcccacttgcatatacctttgtagaaaactgttcactgttgttgaagaaaagctcttcatattaatatgcagtccagatgcagtggctcacacttataatctcagccctttgggaggctgagacaggaagattacttgaggccaggagtttgaaaccagcctgggcaacatagtgagactctgtctccacaaaatttttttttaattagccgggcatggcagtgtgcttctgtagtcttagctactgaggaagctaagccagaagaatcacttgagcccaggagttcaaggctgcagtgagctatgatcataccattgcactcttgcacttgcacagagcaagaccctgtctcttaaaaaaaaaaaagtgtgtgtgtgcatatgcatatatacatatatatacatgcaaatgtatctgtttataattcagattgcttcaaaaagatgttgcactttatgatactgagaacagtgagaagtaaataagatagagtgtaggaggaggaataatttcagaacagccatctgagaacttctgtgacaacagatcaggcaaaatgaaatgtgaaagtaattttataggccaggcgtggtggctcatgcctataatcccagcactttgagtggccaaggcaggtggatcacttgaggtcaggagttcgagaccagcctggtcaacatggtgaaaccttgtctctactaaaaacacaaaaaaattagtcgagcgtggtggcatgtgcctgtaatcctagctgctggggaggctgaggcaggagaatcacttgaacccgggaggcggaggttgcagtgagcctagattgcaccactgcactccagcctgtgagacagaatgagaccctgtcttaaaaaaaaaaaaaaagtaattttataaactattgtgcacaattcgatgtattcataattaattaaatgattatttttgttggttttaacttttattcagtggctatttattgggagcctactgtgttctgggcactaggaatgcaacagtaaataagactaactaagtccctggtaggattcaggttctgtcgaggggagatacacaataaagatgaatttaagataacaataaatgctatggagaaatatacagaacagtggaatagtattagctgtcaaaggttgttgattactttcgtttaaggaggccagggaaagcctttctgaaaaaattgagctgagacctaaataacaagaaataattgtccttgaaaaatgaagggaatgcatcttataggcagaggaatagcaaacataaaggtcttgaggtaataatgagtgtggttttttgatttctgtattttggtttttttgagatggtgtctccctctatcccccaggctggagtgcagtggcacaatcttggctcactgcaaactctgtctcctgggttcaagcaattctcctgccttggcctcctgagtagctggtattacaggcacgcgtgctaccacacccgactagtttttatttttagtagagatggggttttaccacgttggtcaggctggtctcaaactcctgaactcaagtgatccaaccacctcaacctcccaaagtgctgggatcacaggtgtgagccactgtgcccggccagagcttggtttattttttaaaagataggccaatgttggtcgtgtgtggtggctcgtgcctataatcccagcactttgggaagccaaggcaggcaaatcacttgaggtcaggagttcgagaccagcctggccaacatggtgaaaccccatctctactaaaaatacaaaaaactagcatggtgtggtggtgtgtgcctgtaatcccagtgcctgtaatcccagctactccagaggctgaggcaggagaatcacttgaaccgaaaggtaggagttacagtgagccaagatcgcatcactgcactccagcctgaacgacagagcaagactcctgtctcaagaaataataatgataaaaggttcgggcacagtggctcacacctgtaattccagcactctaggaggccgaggcaggcagatcccctgaggtcaggagtttgagaccagcctggccaacgtggcaaaaccccatctctactaaaaaatgcaaaaattagctgggcacggctgggtgtggtggctcattcctgtaatcccagcactttgggaggtcaaggcggacagatcactgaggtagaaaccctgtctctactaaaaatacaaaaatttgcccagcgtggtggcgcgtgcctctaatcccagctacacgggaggctgagacaagagaatcacttcatcaacccgggaggtggaggttgtggtgagctgagatcgcaccattgcactccagcctgggcaacaagagtgaaactccatctcaaaaacaaaaaaaaattagctgggaatggtggcatgtgcctgtaatcacagctacttgggaggctggggcaggagaatcgcttgaacccaggaggcggagattgcagtgagctgagattgcgccactgcactccaggctgggcgaaagagcaagactccgtctcaaaaataataataataataataataggccagtgtagctggagtaatttgcaaattatgtgtggaggcagagattacacaaggaatgggagaaggtcatagatgagggccagatcacatagtatttggtggtaaggaattcagattttatccttgtggtaattggtggtgtggagatggttaaaaacaaggttggtttgggatgggtttgaagagaggacttgctaatggattaaatttggaggataaggtaaagagaaattgaaggagtgacacttgggttttggcttgaacaatagatcttgttagtaatattaaattagatgaagaaggcatggtagggaatatgggggagtgggaaaggcaggaagcaggaatggaaccaggaactctgttttagatgtgagaatttgttgttgttgttgttgttgttgttgttgttgttgttgttgttgtgacagcatctcgttctgttgcccaggctagagtgcatggagtgcggtagcacgatctcagctcactccaacctccgcctcccggttcaagtgattttcctgcctcagcctcccgagtagctgggattacaggcacctgccacaatgcctggctaatacttgtatttttagtagagatggggttttaccatgttggccaggctggtcttaaactcctgacctcaggtaatccacccacctcggcctcccaaagtgctgggattgcaggtgtgagccactgtgcccggccagatgcatgaattttgagatgtatactagacttctggatagagaagttaagtaggcagttggacacattgtatgaagctcaggggtacaaggaggactatgaacatgggagtcttctgacaaatttatcactagactcctcattcaagtaactaggaaatgtcagatattcttcccctagtaatagccagtggttatactcttgcctttagttttcttcacaatactcttggcaacacataaggccttccctacaatctgagtttcagtcagaattgtttctgagcgttcttcctcaaatttctccccagtctcattattctttattctcatgtccatgaccagtcataatagtaattatgaaaaacctctaactttctttagtgcattgaatgtatattttatcattttggttgtgttaactgtaaatctctcagtggaaatctgaaaagcctttatttccttagatgataatatacaattgatttaggagatagggaatttttcagttacctttataacagcacagtattagcagtctaatctaaatgctaagtgaatgttttgagaggagatagatgttgaaaattaaaatacattaagtcccagtgaggtgaaaagccgattgttaagttctgcacacaaaagatttgcttcagtgaattgatttcaacagctgagatcctagtcatttcacctggtctaccaaaaagaatgattttacttgcttttggtcaaatctctgcccagcaattctttttctttctttcttttttttgttttatgtgtgtgtgtgtgtgtgtttttttttagcagagtctcactttgtcacccaggcgggagtgtggtggtatgatcacagttcactgcagcctccaactcctgggctcaagtgatcctccagcttcagcttttcaagaaattgggactgcaggcacatgcaactatgcctggctgaggttttatgtatcttttttctagagaaggggtctcactgtgttgcccagctgggtctccagctcctggtctcaagctgtcctcctgcctcagcctcccaaagtgccaaagtgctagggttataggtgtgagccattggtgcccagctactgcctgcctggcaattctgaatgccttaaattttttttttttttttttttttttttgagacagagtttcactctgtcacccaggctggagtgcagtggcatgatcgtggctcacagcaacctctgcctcctggattccagcaattctcatgcctcagcttcccgagtagctgggactacaggtgcatgccaccacgcccagctaatttttggtttttttgtttgtttgtttgtttgttttgagacggagtctcgctcagttgcccaggctggagtgcagtggcgtgatctccgctcactgcaagctccgcctcccgggttcacgccattctcctgcctcagcctcccgagtagctgggactacaggcgcctgccactacacccggctaatttttttgtattttaagtagagacggggtttcaccgtgttagccaggatggtctcgatctcctgacctcgtgatccgcctgtctcggcctcccaaagtcctgggattacaggcgtgagccaccacacccggcctaatttttttttttttaattttatttttaattttttgagatgcgagatggagtctcgctctgttacccaggctggagtgcagtggcaccatctcagctcactgcaacctccacctcctgcattcaaaagattctcctgcctcagcctcccaagtagctgggattacaggtgcctgccaccacgcccaactaattttttgtatttttagtagagatgaggtttcaccatgttggtcagactggtgtcgaactcctgacctcaagtgatctgcctgcctcagtctcccaaagtgctaggattacaggggtgagccactgcgcctggcctgaatgccttaaatatgacgtgtctgctccacttccattgaaggaagcttctctttctcttatcctgatgggttgtgtttggtttctttcagcatgattttgaagtcagaggagatgtggtcaatggaagaaaccaccaaggtccaaagcgagcaagagaatcccaggacagaaaggtaaagctccctccctcaagttgacaaaaatctcaccccaccactctgtattccactcccctttgcagagatgggccgcttcattttgtaagacttattacatacatacacagtgctagatactttcacacaggttcttttttcactcttccatcccaaccacataaataagtattgtctctactttatgaatgataaaactaagagatttagagaggctgtgtaatttggattcccgtctcgggttcagatcttagctgataagtggaagagctgggactttaagcagatgagaatctaaagactttgctcttttcacttcactggggtgtctttctctctctctctcttgctctctctctctctttttttttttcccaagacggagtctcactccattgcccaggccagagtgcagtggtgcgatctcagctcactgaaaactcatcttgcccaggctggtcttgaacccctgaccttgtgatcctcccgccttggcctccccaagtgctgggataggcgtgagccaccgtgcccagccaataatagctaaaatttatataatgttcactgggccaggcacagcggctcgttcctgttatcccagcactttgggaagctgaggcaggcagatcgcttgagccaaggagttcgataccagcctgggcaacatggcaaaaccccatctctaccaaaaaaaatatacaaaaattagccaggcgtggtggcatgtacttgtagttccagctactcggaaggctgagttgagagtatctcttgagcccaagaagaggggactacagtgaacggagattgcgccactgcactccagcctagacgacagacagaagatctcaaaagaaaaaaaaaaaaaaaagatcactttatgctgggactgctctaaaggcccaaccatgttttaactaattaacaattttatgacaactctatgagctatgtactgtaattatgcctatattacagatgtgaaaattgaggctcagagaggttgaataagttgctcaaagtcacacaggtaataagtgatggaactagaagttgaactcaggaagtctagctccaagtctaaattctttgttaatttatttttcgggccagagtcttactctgtcacccaggctggagtgcagtgccactatctctgctcactgcaaccttcacctcccaagttcaaaccttgttcaattcttgtgccttggcctcccaagtggctaggattacaggcatgtgccacaacaactagctaattttttgtctgattctgttggccagtctggagtgcagtggcgcaatctcagctcactgcagtctccagctcccaggttcaagtgattctcgtgccttagcctcccaaatagctgggattacaggcacgtgccaccacaccgagatagttttttgtatttttaatagaaacaaggtttcaacatgttggccaggctggtctcaaattccagacctcagatcatctgcccgcctcaggctcccaaagtgctgggattacaggcatgagccactgcacccggccttaatttttatatttttattagagatggggttttgccatgttggccaggctggccttgatctcctggcctccagtgatccacccgccttggcttcccaaagtgctgggattacaagcatgagccactgcacccggcctccaattctaaactcttaacaacaatactatagtttcttgaaaagttgttgaaggcttcacggagggaaaaaaaatggagcattctaacaactttgcagatgagacccaagaagactcaatgactttctcctgatcatattgtagcagatgacttagccagaactctgacttcctcacagggagaaagtctgcaagatttcacacttacctgtcaggcctgagctggctgctttctcagctccctaagtgctatgttcccagtctgcttttcttcctttttcaagtgtgcactaccaggcatttcagaacatcccaggctggtcgcggtggctcacacctgtgatcccagcactttgggagcccaaggcgggtggatcacctgaggtcaggagttcgagaccagcctggccaacatggtgaaaccccatctctactaaaaatacaaaagttaactgggcgtggtggtaggcacctgtaatcctagctcaggattactcgggaggctgaggctagagaatcggttgaacccaggaggcggaggttgcagtgagccaagattgcgccactgcactctagcctggggacaagagggagacttcatctcaaaaaaaaaaaaaaaatcccagctgggcacagcggctcacttctgtaatcccagcactttaggaggccaaggcaggaggatcacttgagcccaggagttcaagactagcctgggcaacatagtaagaccctgtctctacaaaaaaatttaaaaattaattgggtgtcgtagcacactcttgtattcccagctactcaggaggctgaggtgagaagaatgcttgagtctgggaggtcgaggctgcagtgagccatgatggtgctactgcactccagcctggccaacattgtgagaccttgtctcaaaacaaaacaaaacatccttctactgagcactttctgtccctttatagaaacttaagagggaaccagtagaggtaatttcctaaggaaaactgctttgggacatgatcacaaatgaagcctggagttttgaactgctgaggtcagcctgtttttaccttctgagcctatcaagtaattgttccagatgccaagaaaagctgctggccttatttctgcttctgcctttaccacaggggagcgccatgtgagccagtcctctgtttttcctccactgtatgctaggcagtattagcaccagattcttcccctctttaaaaagaaattctagtgctttggattttttcctccatgcagaatagcaatgatggaaagtatgtggtcaaagtaatgacattctgaaaatactaaatgtcaccatagtatttttctctggaagagaaatgtatatgtagaggtgaaacttcaaatttctttttttttttttttaagacgaagctttgctcttcttgcccaggctgaagtacaatggcgtgatcttggctcaccgcaatctctgcctccagggttcaagtgattctcctgcctcagcctcctaagtagctaggattacaggcatgtgccaccacgcccagctgattttgtatttttagtagagatggggtttctccatgttggtcacgctggtcttgaactcccgaccccaagtgatccacccacctcggcctcccaaagtgctaggattacaggccaccgcgcccggcctgaaacttcaaatttctttttttttttgagacagagtctcgctatgtcacccaggctggagtgcagtggcgccgtctcggctcactaccagctccactccacctcctgggttcacaccattctcctgcctcagcctcccaagtagctgggactacaggtgcccgccaccatgcccagctaattttttgtatttttagtagagacgggttttcactgtgttagacgggatggtctccatctcttgacctcgtgatccgcctgcctcagcctcccaaagtgctgggattacaggcgtgagccactacgccaagcccgaaacttcaaatttcttatctcataactaggcatcctcatcactgagtgttagcctggatataaacattcctaatcttttgtacttttcatgtcagcatttggctccacttggctgcctggggagaacttctagcattatgagcatgcaggtcctatcaacaggttgggggtgcggtttattcatacaggtagtgagagtggcacagatggatgctgtcccttaaaacaaacagacttgtctttgggagcctgaggcgggtggatcatgaggtcaggagttcaagaccagcctggccaacatagtgaaaccccgtttctactaaaaatacaaaaaattagccgggtgtggtggtgtgcacctgtaatcccagctactagggaggctgaggcaggagaatcacttgaacccaggaggtggaggttgcagtgagccgagatggcaccattgcactccagcccaggcgacagtgcaagactgcgtctcaaaaaaaaaaaaaaaacacacagacttgtcctactgccatttcttttcactctggcggtaaagtaagagagtgtgtgtgtgtgtgtgtgtgtgtgtgtgtgtgtgtgtgtgtgtttctgtccgtctgtctgtcaagggggagggtgaccactttctaaaaggccatccgtgtatttttagcttcctgatttttttctctatcgcagtctctttgaagccaggtgaattttaggccttggcaattttctttttattgcaatgggaaggtcaagacactgagagtcacccaaaacatatccatccaaaatgatacaattttagggtttatttttaagtgatacccaagttatttgctaagaacctatgccagtgtgtttatgagaatttgcactgtcccacactgttgccaccagccacatgggactgtttaaatttaaattttacaaattagccagtcatggtggtgtgcacttgtagtcccagctacttaggaggctgaggcaagaggattgcttgagcccagaagttcaatactgcagcaagctatgatcgtgccactgtactccagcctgagtgacagaatgagacctcatctcttcaaaaaaaaagaaaaaaattaaaatatgaagtttagttcttcattcaccctaaccacatctccagtgctcaataactatatgtgactcatggctaccttattagcatagatatagaacattgtgactatcacagaaagttgttttgaacagtgttgccaagccctgtaagtggaagaggcagtgcagtgtgatctgtgtcttcaggaaaccaggtagtcagactagttcaatgaggagaggcagaacctggcttcacttctagattaaaaactgcttaggtggcctaaagatacaatggccattctcagagtagtgagaaggaaggaacagatgtttagggggctagaagaaagtcagagagggccgggcgcagtggcttatgcctgtaatcccagcactttggaaggccaagacaggcagatcacgaggtcaggagttcgagaccagcctgaccaacatggtgaaaccctgtctctactaaaaatacaaaaattagccgggcgtggtggtgcgcgcctgtaatcccagctactcaggaggctaaggcaggagaatcgcttgaaccctggaggcagaggttgcagtgagcccagatcgcaccactacgctccagcctaggtgacagagagagactccgtctcaaaaaaaaaaaaaaaagtcagaggagacaaggagcatgtacacctaaaatcaacatagacccctctgttgatggggtcatagtgagtacttgaggtaccaagtctggataaacatcaaacttcagccaataactttgagtttctagccatccaagcctcttattaaacatacagaaggaccttttttcccttgcatctaacaagttaaagcacctgcagagatcattagggaggagccttggcctgattggtgacaaaagtgagatgctcagtccttgaatgacaaagaatgcctgtagagtgcaggtcaactacatatgcacttcaagaagatcttctgaaatccagtagtgttctggacattggactgcttgtccctgggaagtagcagcagaaatcatcaggtggtgaacagaagaaaaagaaaagctcttcctttttgaaagtctgttttttgaataaaagccaatattcttttataactagattttccttctctccattcccctgtccctctctcttcctctcttcttccagatcttcagggggctagaaatctgttgctatgggcccttcaccaacatgcccacaggtaagagcctgggagaaccccagagttccagcaccagcctttgtcttacatagtggagtattataagcaagatcccacgatgggggttcctcagattgctgaaatgttctagaggctattctatttctctaccactctccaaacaaaacagcacctaaatgttatcctatggcaaaaaaaaactataccttgtcccccttctcaagagcatgaaggtggttaatagttaggattcagtatgttatgtgttcagatggcgttgagctgctgttagtgccaacatgttagtgagaaaatatctttggataggtaaaaatcaaggaggagttctcctcttcctaaaccatcttaatttacttacatagaagaaagcacagcagctggcccaccacggacgggcccagagcaggggaagattctcggtgaacatttctttttttttttctttttttttgaggtcgagtctctgttgcccaggccagagtgcaatggcgcgatctcggctcactgcaacctccacctcccgggttcaagtgattctcctgcctcagcctcccaaatagctgagactacaggcgtgtgccaccacgcccgactaattttttgtattttttttttagtagagacggggtttcaccgtgttagccaatatggtcccgatctcctgacctcgtgatccacccgcctcagcctcccaaagtgctaggattacaggcatgagccactgtgcccagccctctccatgaacattttctaattaaacttgacacttaatacaatgttatgcttaggactgctataaagcttacctctggagttgcgcagcacaaaggccttggtgtgtgtataaatttggtttgttcttttcacagcaaaagctacccacctttgcctcctgtgcctgcttctgcccagggacttaggtcctcttacaccttagagaaaggccttagcatctggtcacaggcagatgagtgacagcaagaaaacctggctgcaatgtaattttgtttccatcctctttattagttatcaattggatttttatgaaatttccaagttccactcaaggatttctcagtgtttttttactttggtatagtggaaaccagggttgccagaaagtattattttgggggtgagttagtcaaccttcgttcagtcagacagacaggagcacctcagcaattcccagaaacgggctgatgggaaagagcaacatacatgaatgtcttgaagaacacagccaacagagcccattgggcagttctgattttccaggtacacagcatctccacagtctcttctgatttttattcccctgagtatatggattccagctcagcatgtagcctttccctgctgagtctctaaccaggataacatgtatttttttgactggatgaattatcttcccatctcttgacatttacagtaattaccaccaagtatggtattttcagtggccgtgattatcagttaccaacacagaattaggatgaagggaggaagggagggaaggaaggtgggtgttttttcacacagtgtcttagccagcaatttagcaaattaatggaaattagatctttgatttttttttctttcaagcattttatttgagagactatcaaaccttataccaagtggccttatggagactgataaccagagtacatggcatatcagtggcaaattgacttaaaatccatacccctactattttaagaccattgtcctttggagcagagagacagactctcccattgagaggtcttgctataagccttcatccggagagtgtagggtagagggcctgggttaagtatgcagattactgcagtgattttacatctaaatgtccattttagatcaactggaatggatggtacagctgtgtggtgcttctgtggtgaaggagctttcatcattcacccttggcacagtaagtattgggtgccctgtcagagagggaggacacaatattctctcctgtgagcaagactggcacctgtcagtccctatggatgcccctactgtagcctcagaagtcttctctgcccacatacctgtgccaaaagactccatctgtaagggatgggtaaggatttgagaactgcacatattaaatatactgagggaagactttttccctctaactctttttcccatatgtccctccccctcctctctgtgactgccccagcatactgtgtttcaacaaatcatcaagaaatgatgggctggaggctgggcatggtggctcatgtctgtaatcccagcactttgggaggccgaggcaggtggatcacttgtcaggagtttgagaccagcctggccaacatggtgaaaccccatctgtactaaaaaaaaaaaaacaaaaagtagccaggcctggtggagcatgcctgtaatgccagctatttgggaagttgaggtgtgagcatcgcttgaacgtgggaggcagaggttgcagtgagccaagattgcaccactgcactccagactgggtgacagagtgagactttgtctaaaaaaaaaaaaaaagagagagagagaaaagctaggtgcggtggctcacgcctgtaatcccagcactttgggaggctgaggtgggcagatcacgaggtcaagagatcgagaccatcctggccaaccaacatggcgaaaccccgtctctactaaaaatacaaaaattagctgggcgtaggggcgcacgcctgtagtcccagctacttgaggggctggggcaggagaatcgcttgaaccccggaggcggaggttgcagtgagccaagatcgcgccactgcactccagcccgggcgacagagcgagactccgtctcaaaaaaaaagagagagagagaaatgatgggctgggccagtgccccacccctgtaatcacaacactgggaggccaaggtgggagaatcgcttgagcctgggagctgaagaccagcctgggcaatacagtaggacctcatgtctacaaaaaaattattaaaaattagccaaggctgggtgcggtggctcatgcctataatcccgggggtgaagttgagcccaggagtttgagaccagcctgggcaacatggcaaaaccctgtctctaccaaaaatacaaaaaaattagccaggggtggtggtacgtgtctgtagttccagctacttaggaggctgagatggaaggattgcttgagcccaggaggcagaggtggcagtgagctgagatcacaccactgcactccagcctgggtgacagagcaagaccctgtctcaaaaacaaacaaaaaaaatgatgaagtgacagttccagtagtcctactttgacactttgaatgctctttccttcctggggatccagggtgtccacccaattgtggttgtgcagccagatgcctggacagaggacaatggcttccatggtaaggtgcctgcatgtacctgtgctatatggggtccttttgcatgggtttggtttatcactcattacctggtgcttgagtagcacagttcttggcacattttaaatatttgttgaatgaatggctaaaatgtctttttgatgtttttattgttatttgttttatattgtaaaagtaatacatgaactgtttccatggggtgggagtaagatatgaatgttcatcacaaaaacataaatcaaggccgggcatggtggctcatgcctataattccagcactttgggaggtcaagatggaggtcaaggtgggagcctagaagttcgagaccagcctgggcaacataaggagacttcatctgtacaacaaatttaaaaagtagctgggtgtggtggcagatgcctgtagtcgcagctacttgggaagctgaggtgggaggatcacttgagctcaggaggttgatgcttcagtgagccacgatcacaccactgtactccagcctgggcgacagagcgagaccgtgtctcaaaaagaaaaaagaaagtataaatttacacaaaaacaataaaataatcccagtaattccaccacttggagatgatcaccataaaactccaccaggcatatgtgcgtatatatacacgtgtattttataaaatgtgatcataattacactgttttgcttttttccttaagatattacatacatttttccacatcgttaaattacagtgctgttttcctggtggctttcctttaacagattgaagttcatgttaatacagttgccagaggctgtgggctttcactgtcaccaggagtcactcctagggcctcttcagagcaaggccttatgtcctgaagcattgccttttttttttttttttgaggtggagtctcactctgtcacttagcaggctggagtgcagtggcccagtcttggctcactgcaacctccgcctcctgggtttaaatgattctcctgcctcagcctcagggcggatcacctgacatcaggagtttgagaccagcctggccaatatggcgaaaccccatctctactaaaaatactaaaaaaaattagccaggcatggtggcacgcacttgtagtcccagctacttgggagactgaggcaggagaatcgcttgaacccaggatgttgaggttgcagtgagctgagatcacaccatcacaatccagcctgagtgacagagtgagactccatctgaaaaaaaagaaaaaacaattagcctggcatggtggcaggcacctgtaatccctgctacttgggaggctgaggcaggagaattgcttgaacccgggaggtggaggttgcagtgagctgagatcgtgccattgcattccaggctgagcaacaagagcaagactccgtctcaaaaaaaaaaaaaaaaaaaaaaaaaggccaggtgcagtggctcacgcctgtaatcccagcactttgggaggccaaggtgggtggatcacctgaggtcaggagttccagagcagcctggccaacattgtgaaacccccgtctctactaaaaatacaaaaattagctgggtgtgatggcatgtgcctgtaattccagctactcaggaggcagagacaggagaattgcttgaacccaggaggcggaggttgaatgagccgagattgcgccatcacactctagcctcggcgacagagcaagactccgtctcaaaaaaaaaaaaaaaaaattagcttctacctcattaatcctaagaactcatacaaccaggaccctggagtcgattgattagagcctagtccaggagaatgaattgacactaatctctgcttgtgttctctgtctccagcaattgggcagatgtgtgaggcacctgtggtgacccgagagtgggtgttggacagtgtagcactctaccagtgccaggagctggacacctacctgataccccagatcccccacagccactactgactgcagccagccacaggtacagagccacaggaccccaagaatgagcttacaaagtggcctttccaggccctgggagctcctctcactcttcagtccttctactgtcctggctactaaatattttatgtacatcagcctgaaaaggacttctggctatgcaagggtcccttaaagattttctgcttgaagtctcccttggaaatctgccatgagcacaaaattatggtaatttttcacctgagaagattttaaaaccatttaaacgccaccaattgagcaagatgctgattcattatttatcagccctattctttctattcaggctgttgttggcttagggctggaagcacagagtggcttggcctcaagagaatagctggtttccctaagtttacttctctaaaaccctgtgttcacaaaggcagagagtcagacccttcaatggaaggagagtgcttgggatcgattatgtgacttaaagtcagaatagtccttgggcagttctcaaatgttggagtggaacattggggaggaaattctgaggcaggtattagaaatgaaaaggaaacttgaaacctgggcatggtggctcacgcctgtaatcccagcactttgggaggccaaggtgggcagatcactggaggtcaggagttcgaaaccagcctggccaacatggtgaaaccccatctctactaaaaatacagaaattagccggtcatggtggtggacacctgtaatcccagctactcaggtggctaaggcaggagaatcacttcagcccgggaggtggaggttgcagtgagccaagatcataccacggcactccagcctgggtgacagtgagactgtggctcaaaaaaaaaaaaaaaaaaaggaaaatgaaactagaagagatttctaaaagtctgagatatatttgctagatttctaaagaatgtgttctaaaacagcagaagattttcaagaaccggtttccaaagacagtcttctaattcctcattagtaataagtaaaatgtttattgttgtagctctggtatataatccattcctcttaaaatataagacctctggcatgaatatttcatatctataaaatgacagatcccaccaggaaggaagctgttgctttctttgaggtgatttttttcctttgctccctgttgctgaaaccatacagcttcataaataattttgcttgctgaaggaagaaaaagtgtttttcataaacccattatccaggactgtttatagctgttggaaggactaggtcttccctagcccccccagtgtgcaagggcagtgaagacttgattgtacaaaatacgttttgtaaatgttgtgctgttaacactgcaaataaacttggtagcaaacacttccaccatgaatgactgttcttgagacttaggccagccgactttctcagagccttttcactgtgcttcagtctcccactctgtaaaatgggggtaatgatagtatctacctcctaggatttattgaggcagcttaaataccttttgtatttcctgttgctgccaaaacaaattgttgcaaggtcagaagtctgaggtggctcaactgtttctttgtttcaggtttcatgaggccaaaataaaggtgttcgcagggcgtgttcccttctagaggctctgggtccttgcagttctaggactaagatccctgtttcccactggctgttggctgggcatcattctcagcttcttgaggctccccacattcctaggctcctggcctgtctgcctccatcttcaaaaccagcaatgggtggtcaagtttttctcacactgaatcttgctgactactgtatctttctaactcctgccagagacatttctctgtttctaagggctcaagtgattagattgcacccacttggtaatccaaagtgatcttcatatcttaaggcccatagccttaattatagctgcaaagtcccttcgcagcagtacctagattactgttggaatgaataaccagaagacagcaatcaagggaggacatctttagaattctgcctaccacttgtatttaacatgcttaatccacagatgacactctctaccattatttcctggtcctcacactgctcagagattggaatcctttttgagcaaagagaatgaagtcatcacatagttcagtcctgctgtatttgctggaaacagtgaaggaagatagagaaaatggagctaactgccaatattacattttatatcagtcttcatcatagccctatgaagtgggtatttgttacctcattggaaaaatgggagttgaatctcaagttccttgtttgtaagattttactcagatttgcacagctaaaaatgactacatggagacccaaagccacctttctgttcccatcatcagctttccatctgcctctgtcactgaccccgggacagaaggttcaagccttaagggaatttggagagagaactagattttgaggggaactcacactcacttcccttttgggccacagtaggagacagtaaaagcagccccatgtcaggcaaagggtcttacaggagtggatcatggctgctgtttccacttctctctggcttcccagcttatgactgtgtatcttagttgtcaaagccttccagttcatcctcacctacagcttgacttcccaagggcccatgccagctccctgtctacctgccagtgagttgatgagtctcggtgttagtagtaaaggcaggcgggaagcaagcagaagtgctactgggccttgagggtaagccaggcctcagccttctgaccccatcactaatgggttaataggaaaagcagtatccatctagtacagcctgccttttcaggaatagtgagtaaaagcaaagatgactaaaatacattaaagttttctgtaattgtctctaaggtctcccaacaaacatataccccatctgtttcaagctctgcataacctttcccagaagtcaagttcaggccctggcctcatggtgcctggcccaggttaagagtgctacctgatgatggagttaatacacgttgctttgacctctgactttaagatgtcctcccacttttccaccccgcaatctctagccctctctgggcacagcagcaattgggaactagttcctgtactgcctttatctcattttacaaaacaaacttctacaaagaagctggaaaggaaggaggagaaaggattatcatgcaggcacagggagggggcctagagaagagctctggcagattatgtccctcttaaaaaatgcaaccagaatcatcaacaaagtatcacctcaaaaatatgcaggagaaaaagaaaggaatcaatgttggggtggttggagcagaaggagccaaactgcccagaaggtgtcctctgaaggctgcgaggagcagataaggtcagccccagaggcagatggcacacacagaatggcaggatgagggggagctgcagatttatgcaaagaagccctagagaatggggcctgctgcccagggaatgtgggggctcacttatcaaagactactggaaaatggctgagccggcaaccccttccactacagtgatgcctggttttcttgaacagcctgtaactctgcctgtaacaaggagaaaattaaagcaacgaatctggccaaatagaaaattaaggaaaactagaaacagctcctatggagagcagggattggggaggtgtagaggggctgatcctgaatgtctggaggatcaggaaaatgtaagcaattgtttaagggactggtaggaatcaagatctggagagagatcctcccgactctggtggctggggaatatgaactgtggagacatggtttcaaggactcaaaatgatatgacagcttaacatttacagttcagtgcagaggctctcaaagcatgatcccctgataggagtgtgagggggcaacaccatcacctaggaatttgttagatatgcaaattcccagacccactgaatcccagacaggtggggccagcaacctgtgaatctacaacaggctcaagtttgagaacaaatgacttagtgtaaggggctgctaattgatataaaatgttacctgtggtctattattttgtctgtagtgaatattgggcttgttaaggataaataaggtttgtgggctggtaagtggttcttctctacaaggttgcaacagctggcttcagttaacttcaaaaaggccctttaagcaaagacagtagtccccccactcatccatggttttgatttcagttacttatggtcaaccatggtccaaaaatattaaaaggaaaattccggaaaccagtcactcgttttaaattgtacaccattctaagtattgtttgacttgttctattttattattagttattgttgttaatctcttactgtgcccaatttataaattaaattttatcataggtatgtatgtatagggaaaaacataatatatatagggtttggtactatccgagggttcaggcatctacttgtggtcttggaacatatgccccgcagataaggggggactgctgtacaatgcaaaggacaaagattaaattatattagcaatctaggagcagaagggcaagactgcttttttaaaaaacagctaaaggtttaggaggttttattaatatttaaattgtattgaaaccacagctgcagcctttgactccagcatagagatatgcaaatatggctttcaaaagaaaggcaatttcagacagccctcaaagtaacaagaacaaataaaacaaatgattttgtaatttatctttattgactgatgttgcacaaggcacagcccataccctgtgagagtcagcaacagccgagctctctgaggagagaagagaaagccaggctggagggagaggcaggccgacccatagacaggtgacaggaaagacacagagcaggcagatgggagaagaagacaactaaattaaaagggaaggaaaataaaaacccagccctgggtcctgtagaccatctgatcttgctggctctcagcagcaacaacaataatcattaatgactatcatttgccacactactactaagtgccatgcactattcctcacatacaaatgaggaaaatgaagctttgagaggtcaagcaacttacccaaggtcacacaacaaaaggaaggggcagagcccagattcaaagatttgtgtgaggctgaagccctgtgctctttccagtgcattatgctgggaaccagtcctgggaggcagtgaataacaataaggttaatgggccgggcgcagtggctcatgcctgtaatcccagcactttgggaggcggaggcgggcaaatcacgaggtcaggagatcgagaccatcctggctaacatggtgaaaccctgtctctactaaaaatacaaaaaattagccgggcgtggtgtcgggcacctgtagtcccagctactcaggaggctgaggcaggagaatggcatgaacctgggaggcagagcttgcggtgagccacgatcgcgccactgcactccaacctgggtgacacagtgagactccgtctcaaaagaaaaaacaaaacaaaacaataaggttaatgattgaggggacactttgtgcccagttctgtggtattctgtatgggcatgcgtgtgtctgtgtgtgtgtatatgtatgtaactgtggaaaagagggtgaaaacctccatttctgaccttcaaattggttactatccaatgagtaaggcaagaaaagaaagccaaagaaaacttgcagaattctggtgtaaaagttcttttggggccgtgtggtggggccaggctctgcctgttgtgggagacttctggtggaggcatctcagctgggccttgggccttgagtaaaatttagccagatgaaaaggaaagctggagattacacaggcccaggtgagagcctccagctgctagaattggaggaaggagcacctgattcagagagatgagaaaaggcaagagaatcctgaaaggatacatatctctgaccctttgtccccatccaatctccccagaccttccatcccaagcccaaacacaaccttacctgctgctccttttcaggcaccctggccaccaaatataggaacccataaattttgctcatactctatgttctactaggcaagtcctgatctgtcatctctacaggccccaatccttcccgctcacccctacagagccttctccaggttttctaggccagaatctctccccacttagaatactccagaagttttgctttatttgtgagactttattcaattgaagttacttgtgtgcatatgttatcctctctatttgactagaaggtccttataatcccttatgaccataattattttatctttgatataacccagctctgtaactagcagatactttgttaggcatccagtgggtttttcctaaatgaatgaagtaaaggatgaatgaatggactcagtgcattgaagggcttatccaactattggttccactctcaagacctttggaaaactagccatgttctggaatgctaattcccttcaatgcctttcgcccatttttctatgaccctgatttactccaaaaacaatataagggatctaagtgtccaagaatgactccttctaaacccacacctaaggattttctctctttttgtgtgtgtgtgtgtgagacagagtttcactcttattgcccaggctggagtgcaatggtgcgatctcagctcactgcaacctccgcctccagggttcaagtgattctccctgtctcaccctcccgagtagctgagattacaggcgcctgccatcacacccagctaatttttgtatttttagtagagacagggtttcaccacgttggccaggctggtctcgaactcctgtcctcaggtgatccacccaccttggcctcccaaagtgctgggattacaagcatgagccaccacacccggcctctttgattctcttttgcctatcatgaagtctacccctttgtaattaattagaccaatgtccacccagacagaataacattttcccctatccatcagcgaggtcttctccgtgatggacattcaaggcagacagagagactgctgctgcaataactggggaaataattatggtgttcatgatgatttctttgcaggttcaaagcactagcccagccattatctctcccacttcactaggataaaattgctaaccccactttataggtgctaaaacaggtccagggccttgtcaaaggtcactcagtgagctggtggcagacctggaaataactagcctaggagtctcgatattcattaggccacagatggaaatgccctcattatgctgtctgggctatgtctgagagagagtcaactaactggactccagttaaatggagatatgcactggaagataagtttgtgactacagagtgtttttctctgcaatgctgcagcagttggcactggttaattccagagggtgtgtgtgtgtgtttgtgtgtgtgtgtgtgtgtgtgtgtgtgtgtttaaagcattatcacgcgtcctagatgagggaagagagggtgaatccaaggtaacacagacacacaggtaagcagatgtttgccatcttctcttgaaagtcatataaaaccaaatgacagtgtatattagcaggagaaactcaggaggctcttcccagctgttaggctatacgactctggaataagctagtacaaattaggtagaaagtctaggattgttcctagagcctggtggcgggaggtctttcctggaggcaaaggactgtggggctgtctcagggccttctgcagctgctaaagtgagaagcctgccgacgggatcatccccaagcccacagaagctctgaaagctatggaaaccaagatctgtacaggagccacttctggtttctaatgcctgagagattaaaatggaaaaaaaaattcccatggaaattcaagaatgcaagaatgttctggggccaggcacggtggctcatgcctgtaatcccagcacttttggaaggccgatcacctaagatcagaagttcaagaccagcctggtcaacatggtgaaaccccgtctctattaaaaatagaaaattagctgggcgtggtggtgtgcacctgtaatcccagctactcaggaggctgaggccagagaatcacttgaaccctggagccagaggttgcagcgagctgagatcatgccattgcactccagcccaggcaacaagagcaaaactccatctcaaaaaaaaaaaaaaaagttctacaacgtggccacaggtccgttctggctaaggcagtgatgtccccctcccaccaaagcccaaaccttctaacatcatcctaaagtgtgggaatcacctcttcacctcaggccagctctgggcttttctcagcctattcatcagcctccattagtcctcagctctgctgaggcctcagcagcttcccagtcccactgaaggctgtggggcatagaatgggcagagggcaggccgggcgtggtggctcaagcctgtaatcccagcactttgggaggccgaggcgggcagatcacgaggtcaggagatcgagaccatcctggctaacacggtgaaaccccatctctactaaaaatacaaaaaattagccaggcgtggtggcaggtgcctgtagtcccagctacttggtaggctgaggcaggagaatggcatgaacccgggaggcggagcttgcagtgagccaagatcctgccactgcactccagcctgggcgacagagcaaaactccgtctcaaaaaaaaaaaaaaaaagaaagaatgggcagagggcataaaacctgagtccagaggtggtggttgcacaacattgtgaatgcactaaatgcccctgaattgtacattttaaaatggctaattgtatgttatgtgaatttcaatcgatttttaaaaaaaataaaactgagccacctttggggtggggagaggagctgggccaggctctgaggatttgagggttgaaactccttgcagggagtgaaatgaacgacaatggggaggccagtctgggcctcccaactcctcctccaggaccagatgggaactggggctagggagaaaggcccaactggggcggcgccgggctctgggcagaagagaagcactcagtgaatgtgaggaggctgcagccgtcggctcatttgcatcataagtgattggttttccctgctcgtccctcatcaggacacaatggacagttgtttgctggcgcagcagatccatttaccaagggagagaggagacagagcacaagtgaccgatgggtaatagtgttgaagggtgggcagccgcctcccctcccctgtgctcccaggccactgggactcttgttctcacacaatgagaagggaccttagagagcaaatcaccgcttcactttatagaagaagagactgaggtgctgagaggaggtgagccttgctgtggtcaaacagcaagaacatagcaaaactaagcattttaaactctaacctctggatcctttttctttgagacaaggtctcgctctgtcacccaggctggagtagtacagtggcacaatctcagctcactgcaacctctacctcccaggctcaagtgatccccccacctcaactttctgtgggccacgacacctggctaattttttgtagagacaaggtctcactgtgttgcccacatttttctcgaactcctgggctcaagtgatcctccagccttggcctcccaaagtgctaggattacaggtgtgagccacagcactgggcctgtttggtttttgttttgttttgtttttttgagatagggttccactctgtcatccaggctagagtgcagtggtatgatcactgctcactacagcctcacactcctggttcaagtgatcctcccacctcagcctcctgagtagctaggactataagtatgtgccaccacgcttagctaatttttatttcttttattttttctagaaacagtgtttccctatgttgcccaggctggtctcacctgggttcaagtgatcctcccacctcagcctcctgaatagctgggattacaagtgtgagccactgcaccaggcctggattctaaactgtcatttgagggttcacttcgtttccccataataccttctctgtgcccttattcccatctctgtggtctcctgttcccggggccttcgtttccatcattctgtctcctgggtctatttctttttctctgtttctgttcctctctgtatcttttcctcttggtttccaggcagctaggataattactagacttttaattaacccctgccctaacaaaggtgggtctggcatgaggcagcaatttagcaagtgtcttggtttgttttggggataggtggggagagaaaaatatgtgttggggcctattataaaccaggcactaagacagacacataatgcactttatctcatttcatcctttcaatcttgcaaggtaggtgttcttagagacaaaaagggtgaggctcagagaggttaagtaacttgtgcaagggcacccagctagcaaattgtagttacctgactccaaaacctctgttcttccatctcacaccctggcacagggtctaactcagggtaaggggctcattgatttcaggcgcaagggaggcacaaagtcactgaaggagaccactgttttgttgctgtcctctaggcagcgactgcgtccccccagagccccctccttctctgagccccttctgcagcgtggcgaaatctcacaaatgcaagcttttgcccccagggaggtggggaggcagtgatcaagaaagaaacctgacaaacccagaccaaccatgggggtctccctcctgttaacacccctccctaacagccctcctggtggttccctgtctgcccctcccctttatgggtcaagcctgctggcgtctgtttcattgtgctgtgggggaaggggagagtcaggggtgagtgggtgtctgtgtgcatgaacataaggcctccgggttcattctgacactgaatgaaaaactcaccaattattcgtccagtctcattaatatgcagacagacatctgttatttaggagtcaacagcagaggcattttcttgtcgggaggggcactagtgtacagggctctcttgtctctccgctgctagcgggtagctactcaggaatcatcccacacctcccgacctggagcctcccctctctctgaccctcactcacagctttgaggacagcaagtaagggattgaccagacagagatggagggagatctgggaacctggctggaaggaaggaagcaggagaggagctgccttgtgtagaacaaactgagaacaaaacgctaaaccctttcctggggaagagaatgtggagttgggggagagagctgtgccaagagtgcctgccccactgggaatctcagggacatgacccctccccccacaccttcctcagcctgcaggacaagtctgagtgcatctgaagcagggagagggtcactatggcaacatgaagtcctcacccagagactgcagaaaacgtaataagaggagttcagaaaaatggagaccaagggacctcaatctttttttttttttttcaatttatttatttttttttattgatcattcttgggtgtttctcgcagagggggatttggcagggagggacctcaatctttggaggagtcactaaagctctcttcaggccccaagataggggtgggaacaagacataaccacctcctgctttctgtcttctgtcttcctccagcctttaagtcccagcacaaaatacccctccaagaagcctttcccaactccctcaggcccagcttagaagcacttaagccttggtgtcttggttgtaaagaataaaagttgacatcagctgagcaacacaatgaggtagatgtggtgatcagcccccttttctaggtgcaaaaactgaggttcagagaggtgctgggcctcaccaaagattccccagggaagaagcagcagagctcaacccaggccctgggacttctgcctctgaacctgaagctcttcccacgactaccccctgggagggccagagtcacaaggggaggacccttgtcagctgaagtgtttcaggagtttgattgagtcctctcttcccatccaccctgtccttccccctcctccctcctaggcaggcggattgcctaggttaagaaacactagtctgggcgaggtggctcacgcctgtaatcccagcactttgggaggccaaggcaggtggatcactaggtcaggaaattgagaccatcctggctaacacggtgaaacctcgtctctactaaaaaatacaaaaaattaggccgggcgcggtggcttatgcctgtaatcccagcactttgggaggccaagacaggcggatcacgaggtcaggagatcaagaccatcctgactaacacggtgaaaccccgtctctactaaaaatacaaaaaatgagccggacgtggtggcaggtgcctgtagtcccagctactcgggaggctgaggcaggagaatggcgtgaacccaggaggcagagcttgcagtgagccgagattgcgccactgcactccagcctgggcgacagagcgagactccgtctcaaaaaaaaaaaaaaaaaaattagccaggcgtggtggcgggtgcctgtggtcccagttactggggcggctgaggcaggagaatggcgtgaacctgtgaggtggagcttgcagtgagccaagattgggccactgcactccagcctgggcaagaaagcgagactctcaaaaaaaaaaccactagtctgggcgcggtggctcctgcctgtaatcccaacactttgggaggccaaggtgggtggatcacctgaggtcaggagttcgagaccagcctggccaacatggtgaaaccccatctctactaaaaatacaaaaattaggtcaggcatggtggctcacgcctgtaatcccagcactttgggagactgaagcaggcggatcatgaggtcaagagatggagaccatcctggccaacatggtgaaaccctgtctctactaaaaatacaaaaatggctgggcacggtggctcatgcctgtaatcccagcactttgggaggccgaggtgggtggatcacgttaggtcgggagttcaagactagcctgaccaacatggagaaaccccatctctactaaaaatacaaaattagctgggcatggtggcacatggctgtaatcccagctacttcaggaagctgaggcaggagaatcacttgaacccaggaggtgaggttgccgtgagccgagatcgcgccagtgcac

SEQ ID NO: 6 - DNA, 105029 bp, Homo sapiens
gtgcactggcgcgatctcggctcacggcaacctcacctcctgggttcaagtgattctcctgcctcagcttcctgaagtagctgggattacagccatgtgccaccatgcccagctaattttgtatttttagtagagatggggtttctccatgttggtcaggctagtcttgaactcccgacctaacgtgatccacccacctcggcctcccaaagtgctgggattacaggcatgagccaccgtgcccagccatttttgtatttttagtagagacagggtttcaccatgttggccaggatggtctccatctcttgacctcatgatccgcctgcttcagtctcccaaagtgctgggattacaggcgtgagccaccatgcctgacctaatttttgtatttttagtagagatggggtttcaccatgttggccaggctggtctcgaactcctgacctcaggtgatccacccaccttggcctcccaaagtgttgggattacaggcaggagccaccgcgcccagactagtggttttttttttgagagtctcgctttcttgcccaggctggagtgcagtggcccaatcttggctcactgcaagctccacctcacaggttcacgccattctcctgcctcagccgccccagtaactgggaccacaggcacccgccaccacgcctggctaatttttttttttttttttttgagacggagtctcgctctgtcgcccaggctggagtgcagtggcgcaatctcggctcactgcaagctctgcctcctgggttcacgccattctcctgcctcagcctcccgagtagctgggactacaggcacctgccaccacgtccggctcattttttgtatttttagtagagacggggtttcaccgtgttagtcaggatggtcttgatctcctgacctcgtgatccgcctgtcttggcctcccaaagtgctgggattacaggcataagccaccgcgcccggcctaattttttgtattttttagtagagacgaggtttcaccgtgttagccaggatggtctcaatttcctgacctagtgatccacctgccttggcctcccaaagtgctgggattacaggcgtgagccacctcgcccagactagtgtttcttaacctaggcaatccgcctgcctaggagggaggagggggaaggacagggtggatgggaagagaggactcaatcaaactcctgaaacacttcagctgacaagggtcctccccttgtgactctggccctcccagggggtagtcgtgggaagagcttcaggttcagaggcagaagtcccagggcctgggttgagctctgctgcttcttccctggggaatctttggtgaggcccagcacctctctgaacctcagtttttgcacctagaaaagggggctgatcaccacatctacctcattgtgttgctcagctgatgtcaacttttattctttacaaccaagacaccaaggcttaagtgcttctaagctgggcctgagggagttgggaaaggcttcttggaggggtattttgtgctgggacttaaaggctggaggaagacagaagacagaaagcaggaggtggttatgtcttgttcccacccctatcttggggcctgaagagagctttagtgactcctccaaagattgaggtccctccctgccaaatccccctctgcgagaaacacccaagaatgatcaataaaaaaaaataaataaattgaaaaaaaaaaaaaaagattgaggtcccttggtctccatttttctgaactcctcttattacgttttctgcagtctctgggtgaggacttcatgttgccatagtgaccctctccctgcttcagatgcactcagacttgtcctgcaggctgaggaaggtgtggggggaggggtcatgtccctgagattcccagtggggcaggcactcttggcacagctctctcccccaactccacattctcttccccaggaaagggtttagcgttttgttctcagtttgttctacacaaggcagctcctctcctgcttccttccttccagccaggttcccagatctccctccatctctgtctggtcaatcccttacttgctgtcctcaaagctgtgagtgagggtcagagagaggggaggctccaggtcgggaggtgtgggatgattcctgagtagctacccgctagcagcggagagacaagagagccctgtacactagtgcccctcccgacaagaaaatgcctctgctgttgactcctaaataacagatgtctgtctgcatattaatgagactggacgaataattggtgagtttttcattcagtgtcagaatgaacccggaggccttatgttcatgcacacagacacccactcacccctgactctccccttcccccacagcacaatgaaacagacgccagcaggcttgacccataaaggggaggggcagacagggaaccaccaggagggctgttagggaggggtgttaacaggagggagacccccatggttggtctgggtttgtcaggtttctttcttgatcactgcctccccacctccctgggggcaaaagcttgcatttgtgagatttcgccacgctgcagaaggggctcagagaaggagggggctctggggggacgcagtcgctgcctagaggacagcaacaaaacagtggtctccttcagtgactttgtgcctcccttgcgcctgaaatcaatgagccccttaccctgagttagaccctgtgccagggtgtgagatggaagaacagaggttttggagtcaggtaactacaatttgctagctgggtgcccttgcacaagttacttaacctctctgagcctcaccctttttgtctctaagaacacctaccttgcaagattgaaaggatgaaatgagataaagtgcattatgtgtctgtcttagtgcctggtttataataggccccaacacatatttttctctccccacctatccccaaaacaaaccaagacacttgctaaattgctgcctcatgccagacccacctttgttagggcaggggttaattaaaagtctagtaattatcctagctgcctggaaaccaagaggaaaagatacagagaggaacagaaacagagaaaaagaaatagacccaggagacagaatgatggaaacgaaggccccgggaacaggagaccacagagatgggaataagggcacagagaaggtattatggggaaacgaagtgaaccctcaaatgacagtttagaatccaggcctggtgcagtggctcacacttgtaatcccagctattcaggaggctgaggtgggaggatcacttgaacccaggtgagaccagcctgggcaacatagggaaacactgtttctagaaaaaataaaagaaataaaaattagctaagcgtggtggcacatacttatagtcctagctactcaggaggctgaggtgggaggatcacttgaaccaggagtgtgaggctgtagtgagcagtgatcataccactgcactctagcctggatgacagagtggaaccctatctcaaaaaaacaaaacaaaacaaaaaccaaacaggcccagtgctgtggctcacacctgtaatcctagcactttgggaggccaaggctggaggatcacttgagcccaggagttcgagaaaaatgtgggcaacacagtgagaccttgtctctacaaaaaattagccaggtgtcgtggcccacagaaagttgaggtggggggatcacttgagcctgggaggtagaggttgcagtgagctgagattgtgccactgtactactccagcctgggtgacagagcgagaccttgtctcaaagaaaaaggatccagaggttagagtttaaaatgcttagttttgctatgttcttgctgtttgaccacagcaaggctcacctcctctcagcacctcagtctcttcttctataaagtgaagcggtgatttgctctctaaggtcccttctcattgtgtgagaacaagagtcccagtggcctgggagcacaggggaggggaggcggctgcccacccttcaacactattacccatcggtcacttgtgctctgtctcctctctcccttggtaaatggatctgctgcgccagcaaacaactgtccattgtgtcctgatgagggacgagcagggaaaaccaatcacttatgatgcaaatgagccgacggctgcagcctcctcacattcactgagtgcttctcttctgcccagagcccggcgccgccccagttgggcctttctccctagccccagttcccatctggtcctggaggaggagttgggaggcccagactggcctccccattgtcgttcatttcactccctgcaaggagtttcaaccctcaaatcctcagagcctggcccagctcctctccccaccccaaaggtggctcagttttattttttttaaaaatcgattgaaattcacataacatacaattagccattttaaaatgtacaattcaggggcatttagtgcattcacaatgttgtgcaaccaccacctctggactcaggttttatgccctctgcccattctttctttttttttttttttttgagacggagttttgctctgtcgcccaggctggagtgcagtggcaggatcttggctcactgcaagctccgcctcccgggttcatgccattctcctgcctcagcctaccaagtagctgggactacaggcacctgccaccacgcctggctaattttttgtatttttagtagagatggggtttcaccgtgttagccaggatggtctcgatctcctgacctcgtgatctgcccgcctcggcctcccaaagtgctgggattacaggcttgagccaccacgcccggcctgccctctgcccattctatgccccacagccttcagtgggactgggaagctgctgaggcctcagcagagctgaggactaatggaggctgatgaataggctgagaaaagcccagagctggcctgaggtgaagaggtgattcccacactttaggatgatgttagaaggtttgggctttggtgggagggggacatcactgccttagccagaacggacctgtggccacgttgtagaacttttttttttttttttgagatggagttttgctcttgttgcctgggctggagtgcaatggcatgatctcagctcgctgcaacctctggctccagggttcaagtgattctctggcctcagcctcctgagtagctgggattacaggtgcacaccaccacgcccagctaattttctatttttaatagagacggggtttcaccatgttgaccaggctggtcttgaacttctgatcttaggtgatcggccttccaaaagtgctgggattacaggcatgagccaccgtgcctggccccagaacattcttgcattcttgaatttccatgggaatttttttttccattttaatctctcaggcattagaaaccagaagtggctcctgtacagatcttggtttccatagctttcagagcttctgtgggcttggggatgatcccgtcggcaggcttctcactttagcagctgcagaaggccctgagacagccccacagtcctttgcctccaggaaagacctcccgccaccaggctctaggaacaatcctagactttctacctaatttgtactagcttattccagagtcgtatagcctaacagctgggaagagcctcctgagtttctcctgctaatatacactgtcatttggttttatatgactttcaagagaagatggcaaacatctgcttacctgtgtgtctgtgttaccttggattcaccctctcttccctcatctaggacgcgtgataatgctttaaacacacacacacacacacacacacacacacaaacacacacacacaccctctggaattaaccagtgccaactgctgcagcattgcagagaaaaacactctgtagtcacaaacttatcttccagtgcatatctccatttaactggagtccagttagttgactctctctcagacatagcccagacagcataatgagggcatttccatctgtggcctaatgaatatcgagactcctaggctagttatttccaggtctgccaccagctcactgagtgacctttgacaaggccctggacctgttttagcacctataaagtggggttagcaattttatcctagtgaagtgggagagataatggctgggctagtgctttgaacctgcaaagaaatcatcatgaacaccataattatttccccagttattgcagcagcagtctctctgtctgccttgaatgtccatcacggagaagacctcgctgatggataggggaaaatgttattctgtctgggtggacattggtctaattaattacaaaggggtagacttcatgataggcaaaagagaatcaaagaggccgggtgtggtggctcatgcttgtaatcccagcactttgggaggccaaggtgggtggatcacctgaggacaggagttcgagaccagcctggccaacgtggtgaaaccctgtctctactaaaaatacaaaaattagctgggtgtgatggcaggcgcctgtaatctcagctactcgggagggtgagacagggagaatcacttgaaccctggaggcggaggttgcagtgagctgagatcgcaccattgcactccagcctgggcaataagagtgaaactctgtctcacacacacacacacaaaaagagagaaaatccttaggtgtgggtttagaaggagtcattcttggacacttagatcccttatattgtttttggagtaaatcagggtcatagaaaaatgggcgaaaggcattgaagggaattagcattccagaacatggctagttttccaaaggtcttgagagtggaaccaatagttggataagcccttcaatgcactgagtccattcattcatcctttacttcattcatttaggaaaaacccactggatgcctaacaaagtatctgctagttacagagctgggttatatcaaagataaaataattatggtcataagggattataaggaccttctagtcaaatagagaggataacatatgcacacaagtaacttcaattgaataaagtctcacaaataaagcaaaacttctggagtattctaagtggggagagattctggcctagaaaacctggagaaggctctgtaggggtgagcgggaaggattggggcctgtagagatgacagatcaggacttgcctagtagaacatagagtatgagcaaaatttatgggttcctatatttggtggccagggtgcctgaaaaggagcagcaggtaaggttgtgtttgggcttgggatggaaggtctggggagattggatggggacaaagggtcagagatatgtatcctttcaggattctcttgccttttctcatctctctgaatcaggtgctccttcctccaattctagcagctggaggctctcacctgggcctgtgtaatctccagctttccttttcatctggctaaattttactcaaggcccaaggcccagctgagatgcctccaccagaagtctcccacaacaggcagagcctggccccaccacacggccccaaaagaacttttacaccagaattctgcaagttttctttggctttcttttcttgccttactcattggatagtaaccaatttgaaggtcagaaatggaggttttcaccctcttttccacagttacatacatatacacacacacagacacacgcatgcccatacagaataccacagaactgggcacaaagtgtcccctcaatcattaaccttattgttttgttttgttttttcttttgagacggagtctcactgtgtcacccaggttggagtgcagtggcgcgatcgtggctcaccgcaagctctgcctcccaggttcatgccattctcctgcctcagcctcctgagtagctgggactacaggtgcccgacaccacgcccggctaattttttgtatttttagtagagacagggtttcaccatgttagccaggatggtctcgatctcctgacctcgtgatttgcccgcctccgcctcccaaagtgctgggattacaggcatgagccactgcgcccggcccattaaccttattgttattcactgcctcccaggactggttcccagcataatgcactggaaagagcacagggcttcagcctcacacaaatctttgaatctgggctctgccccttccttttgttgtgtgaccttgggtaagttgcttgacctctcaaagcttcattttcctcatttgtatgtgaggaatagtgcatggcacttagtagtagtgtggcaaatgatagtcattaatgattattgttgttgctgctgagagccagcaagatcagatggtctacaggacccagggctgggtttttattttccttcccttttaatttagttgtcttcttctcccatctgcctgctctgtgtctttcctgtcacctgtctatgggtcggcctgcctctccctccagcctggctttctcttctctcctcagagagctcggctgttgctgactctcacagggtatgggctgtgccttgtgcaacatcagtcaataaagataaattacaaaatcatttgttttatttgttcttgttactttgagggctgtctgaaattgcctttcttttgaaagccatatttgcatatctctatgctggagtcaaaggctgcagctgtggtttcaatacaatttaaatattaataaaacctcctaaacctttagctgttttttaaaaaagcagtcttgcccttctgctcctagattgctaatataatttaatctttgtcctttgcattgtacagcagtccccccttatctgcggggcatatgttccaagaccacaagtagatgcctgaaccctcggatagtaccaaaccctatatatattatgtttttccctatacatacatacctatgataaaatttaatttataaattgggcacagtaagagattaacaacaataactaataataaaatagaacaagtcaaacaatacttagaatggtgtacaatttaaaacgagtgactggtttccggaattttccttttaatatttttggaccatggttgaccataagtaactgaaatcaaaaccatggatgagtggggggactactgtctttgcttaaagggcctttttgaagttaactgaagccagctgttgcaaccttgtagagaagaaccacttaccagcccacaaaccttatttatccttaacaagcccaatattcactacagacaaaataatagaccacaggtaacattttatatcaattagcagccccttacactaagtcatttgttctcaaacttgagcctgttgtagattcacaggttgctggccccacctgtctgggattcagtgggtctgggaatttgcatatctaacaaattcctaggtgatggtgttgccccctcacactcctatcaggggatcatgctttgagagcctctgcactgaactgtaaatgttaagctgtcatatcattttgagtccttgaaaccatgtctccacagttcatattccccagccaccagagtcgggaggatctctctccagatcttgattcctaccagtcccttaaacaattgcttacattttcctgatcctccagacattcaggatcagcccctctacacctccccaatccctgctctccataggagctgtttctagttttccttaattttctatttggccagattcgttgctttaattttctccttgttacaggcagagttacaggctgttcaagaaaaccaggcatcactgtagtggaaggggttgccggctcagccattttccagtagtctttgataagtgagcccccacattccctgggcagcaggccccattctctagggcttctttgcataaatctgcagctccccctcatcctgccattctgtgtgtgccatctgcctctggggctgaccttatctgctcctcgcagccttcagaggacaccttctgggcagtttggctccttctgctccaaccaccccaacattgattcctttctttttctcctgcatatttttgaggtgatactttgttgatgattctggttgcattttttaagagggacataatctgccagagctcttctctaggccccctccctgtgcctgcatgataatcctttctcctccttcctttccagcttctttgtagaagtttgttttgtaaaatgagataaaggcagtacaggaactagttcccaattgctgctgtgcccagagagggctagagattgcggggtggaaaagtgggaggacatcttaaagtcagaggtcaaagcaacgtgtattaactccatcatcaggtagcactcttaacctgggccaggcaccatgaggccagggcctgaacttgacttctgggaaaggttatgcagagcttgaaacagatggggtatatgtttgttgggagaccttagagacaattacagaaaactttaatgtattttagtcatctttgcttttactcactattcctgaaaaggcaggctgtactagatggatactgcttttcctattaacccattagtgatggggtcagaaggctgaggcctggcttaccctcaaggcccagtagcacttctgcttgcttcccgcctgcctttactactaacaccgagactcatcaactcactggcaggtagacagggagctggcatgggcccttgggaagtcaagctgtaggtgaggatgaactggaaggctttgacaactaagatacacagtcataagctgggaagccagagagaagtggaaacagcagccatgatccactcctgtaagaccctttgcctgacatggggctgcttttactgtctcctactgtggcccaaaagggaagtgagtgtgagttcccctcaaaatctagttctctctccaaattcccttaaggcttgaaccttctgtcccggggtcagtgacagaggcagatggaaagctgatgatgggaacagaaaggtggctttgggtctccatgtagtcatttttagctgtgcaaatctgagtaaaatcttacaaacaaggaacttgagattcaactcccatttttccaatgaggtaacaaatacccacttcatagggctatgatgaagactgatataaaatgtaatattggcagttagctccattttctctatcttccttcactgtttccagcaaatacagcaggactgaactatgtgatgacttcattctctttgctcaaaaaggattccaatctctgagcagtgtgaggaccaggaaataatggtagagagtgtcatctgtggattaagcatgttaaatacaagtggtaggcagaattctaaagatgtcctcccttgattgctgtcttctggttattcattccaacagtaatctaggtactgctgcgaagggactttgcagctataattaaggctatgggccttaagatatgaagatcactttggattaccaagtgggtgcaatctaatcacttgagcccttagaaacagagaaatgtctctggcaggagttagaaagatacagtagtcagcaagattcagtgtgagaaaaacttgaccacccattgctggttttgaagatggaggcagacaggccaggagcctaggaatgtggggagcctcaagaagctgagaatgatgcccagccaacagccagtgggaaacagggatcttagtcctagaactgcaaggacccagagcctctagaagggaacacgccctgcgaacacctttattttggcctcatgaaacctgaaacaaagaaacagttgagccacctcagacttctgaccttgcaacaatttgttttggcagcaacaggaaatacaaaaggtatttaagctgcctcaataaatcctaggaggtagatactatcattacccccattttacagagtgggagactgaagcacagtgaaaaggctctgagaaagtcggctggcctaagtctcaagaacagtcattcatggtggaagtgtttgctaccaagtttatttgcagtgttaacagcacaacatttacaaaacgtattttgtacaatcaagtcttcactgcccttgcacactgggggggctagggaagacctagtccttccaacagctataaacagtcctggataatgggtttatgaaaaacactttttcttccttcagcaagcaaaattatttatgaagctgtatggtttcagcaacagggagcaaaggaaaaaaatcacctcaaagaaagcaacagcttccttcctggtgggatctgtcattttatagatatgaaatattcatgccagaggtcttatattttaagaggaatggattatataccagagctacaacaataaacattttacttattactaatgaggaattagaagactgtctttggaaaccggttcttgaaaatcttctgctgttttagaacacattctttagaaatctagcaaatatatctcagacttttagaaatctcttctagtttcattttcctttttttttttttttttttgagccacagtctcactgtcacccaggctggagtgccgtggtatgatcttggctcactgcaacctccacctcccgggctgaagtgattctcctgccttagccacctgagtagctgggattacaggtgtccaccaccatgaccggctaatttctgtatttttagtagagatggggtttcaccatgttggccaggctggtttcgaactcctgacctccagtgatctgcccaccttggcctcccaaagtgctgggattacaggcgtgagccaccatgcccaggtttcaagtttccttttcatttctaatacctgcctcagaatttcctccccaatgttccactccaacatttgagaactgcccaaggactattctgactttaagtcacataatcgatcccaagcactctccttccattgaagggtctgactctctgcctttgtgaacacagggttttagagaagtaaacttagggaaaccagctattctcttgaggccaagccactctgtgcttccagccctaagccaacaacagcctgaatagaaagaatagggctgataaataatgaatcagcatcttgctcaattggtggcgtttaaatggttttaaaatcttctcaggtgaaaaattaccataattttgtgctcatggcagatttccaagggagacttcaagcagaaaatctttaagggacccttgcatagccagaagtccttttcaggctgatgtacataaaatatttagtagccaggacagtagaaggactgaagagtgagaggagctcccagggcctggaaaggccactttgtaagctcattcttggggtcctgtggctctgtacctgtggctggctgcagtcagtagtggctgtgggggatctggggtatcaggtaggtgtccagctcctggcactggtagagtgctacactgtccaacacccactctcgggtcaccacaggtgcctcacacatctgcccaattgctggagacagagaacacaagcagagattagtgtcaattcattctcctggactaggctctaatcaatcgactccagggtcctggttgtatgagttcttaggattaatgaggtagaagctaattttttttttttttttttgagacggagtcttgctctgtcgccgaggctagagtgtgatggcgcaatctcggctcattcaacctccgcctcctgggttcaagcaattctcctgtctctgcctcctgagtagctggaattacaggcacatgccatcacacccagctaatttttgtatttttagtagagacgggggtttcacaatgttggccaggctgctctggaactcctgacctcaggtgatccacccaccttggcctcccaaagtgctgggattacaggcgtgagccactgcacctggcctttttttttttttttttttttttttgagacggagtcttgctcttgttgctcagcctggaatgcaatggcacgatctcagctcactgcaacctccacctcccgggttcaagcaattctcctgcctcagcctcccaagtagcagggattacaggtgcctgccaccatgccaggctaattgttttttcttttttttcagatggagtctcactctgtcactcaggctggattgtgatggtgtgatctcagctcactgcaacctcaacatcctgggttcaagcgattctcctgcctcagtctcccaagtagctgggactacaagtgcgtgccaccatgcctggctaattttttttagtatttttagtagagatggggtttcgccatattggccaggctggtctcaaactcctgatgtcaggtgatccgccctgaggctgaggcaggagaatcatttaaacccaggaggcggaggttgcagtgagccaagactgggccactgcactccagcctgctaagtgacagagtgagactccacctcaaaaaaaaaaaaaaaaggcaatgcttcaggacataaggccttgctctgaagaggccctaggagtgactcctggtgacagtgaaagcccacagcctctggcaactgtattaacatgaacttcaatctgttaaaggaaagccaccaggaaaacagcactgtaatttaacgatgtggaaaaatgtatgtaatatcttaaggaaaaaagcaaaacagtgtaattatgatcacattttataaaatacacgtgtatatatacgcacatatgcctggtggagttttatggtgatcatctccaagtggtggaattactgggattattttattgtttttgtgtaaatttatactttcttttttctttttgagacacggtctcgctctgtcgcccaggctggagtacagtggtgtgatcgtggctcactgaagcatcaacctcctgagctcaagtgatcctcccacctcagcttcccaagtagctgcgactacaggcatctgccaccacacccagctactttttaaatttgttgtacagatgaagtctccttatgttgcccaggctggtctcgaacttctaggctcccaccttgacctccatcttgacctcccaaagtgctggaattataggcatgagccaccatgcccggccttgatttatgtttttgtgatgaacattcatatcttactcccaccccatggaaacagttcatgtattacttttacaatataaaacaaataacaataaaaacatcaaaaagacattttagccattcattcaacaaatatttaaaatgtgccaagaactgtgctactcaagcaccaggtaatgagtgataaaccaaacccatgcaaaaggaccccatatagcacaggtacatgcaggcaccttaccatggaagccattgtcctctgtccaggcatctggctgcacaaccacaattgggtggacaccctggatccccaggaaggaaagagcattcaaagtgtcaaagtaggactactggaactgtcacttcatcattttttttgtttgtttttgagacagggtcttgctctgtcacccaggctggagtgcagtggtgtgatctcagctcactgccacctctgcctcctgggctcaagcaatccttccatctcagcctcctaagtagctggaactacagacacgtaccaccacccctggctaatttttttgtatttttggtagagacagggttttgccatgttgcccaggctggtctcaaactcctgggctcaacttcacccccgggattataggcatgagccaccgcacccagccttggctaatttttaataatttttttgtagacatgaggtcctactgtattgcccaggctggtcttcagctcccaggctcaagcgattctcccaccttggcctcccagtgttgtgattacaggggtggggcactggcccagcccatcatttctctctctctctttttttttgagacggagtctcgctctgtcgcccgggctggagtgcagtggcgcgatcttggctcactgcaacctccgcctccggggttcaagcgattctcctgccccagcccctcaagtagctgggactacaggcgtgcgcccctacgcccagctaatttttgtatttttagtagagacggggtttcgccatgttggttggccaggatggtctcgatctcttgacctcgtgatctgcccacctcagcctcccaaagtgctgggattacaggcgtgagccaccgcacctagcttttctctctctctctttttttttttttttagacaaagtctcactctgtcacccagtctggagtgcagtggtgcaatcttggctcactgcaacctctgcctcccacgttcaagcgatgctcacacctcaacttcccaaatagctggcattacaggcatgctccaccaggcctggctactttttgtttttttttttttagtacagatggggtttcaccatgttggccaggctggtctcaaactcctgacaagtgatccacctgcctcggcctcccaaagtgctgggattacagacatgagccaccatgcccagcctccagcccatcatttcttgatgatttgttgaaacacagtatgctggggcagtcacagagaggagggggagggacatatgggaaaaagagttagagggaaaaagtcttccctcagtatatttaatatgtgcagttctcaaatccttacccatcccttacagatggagtcttttggcacaggtatgtgggcagagaagacttctgaggctacagtaggggcatccatagggactgacaggtgccagtcttgctcacaggagagaatattgtgtcctccctctctgacagggcacccaatacttactgtgccaagggtgaatgatgaaagctccttcaccacagaagcaccacacagctgtaccatccattccagttgatctaaaatggacatttagatgtaaaatcactgcagtaatctgcatacttaacccaggccctctaccctacactctccggatgaaggcttatagcaagacctctcaatgggagagtctgtctctctgctccaaaggacaatggtcttaaaatagtaggggtatggattttaagtcaatttgccactgatatgccatgtactctggttatcagtctccataaggccacttggtataaggtttgatagtctctcaaataaaatgcttgaaagaaaaaaaaatcaaagatctaatttccattaatttgctaaattgctggctaagacactgtgtgaaaaaacacccaccttccttccctcccttcctcccttcatcctaattctgtgttggtaactgataatcacggccactgaaaataccatacttggtggtaattactgtaaatgtcaagagatgggaagataattcatccagtcaaaaaaatacatgttatcctggttagagactcagcagggaaaggctacatgctgagctggaatccatatactcaggggaataaaaatcagaagagactgtggagatgctgtgtacctggaaaatcagaactgcccaatgggctctgttggctgtgttcttcaagacattcatgtatgttgctctttcccatcagcccgtttctgggaattgctgaggtgctcctgtctgtctgactgaacgaaggttgactaactcacccccaaaataatactttctggcaaccctggtttccactataccaaagtaaaaaaacactgagaaatccttgagtggaacttggaaatttcataaaaatccaattgataactaataaagaggatggaaacaaaattacattgcagccaggttttcttgctgtcactcatctgcctgtgaccagatgctaaggcctttctctaaggtgtaagaggacctaagtccctgggcagaagcaggcacaggaggcaaaggtgggtagcttttgctgtgaaaagaacaaaccaaatttatacacacaccaaggcctttgtgctgcgcaactccagaggtaagctttatagcagtcctaagcataacattgtattaagtgtcaagtttaattagaaaatgttcatggagagggctgggcacagtggctcatgcctgtaatcctagcactttgggaggctgaggcgggtggatcacgaggtcaggagatcgggaccatattggctaacacggtgaaaccccgtctctactaaaaaaaaaatacaaaaaattagtcgggcgtggtggcacacgcctgtagtctcagctatttgggaggctgaggcaggagaatcacttgaacccgggaggtggaggttgcagtgagccgagatcgcgccattgcactctggcctgggcaacagagactcgacctcaaaaaaaaagaaaaaaaaaaagaaatgttcaccgagaatcttcccctgctctgggcccgtccgtggtgggccagctgctgtgctttcttctatgtaagtaaattaagatggtttaggaagaggagaactcctccttgatttttacctatccaaagatattttctcactaacatgttggcactaacagcagctcaacgccatctgaacacataacatactgaatcctaactattaaccaccttcatgctcttgagaagggggacaaggtatagtttttttttgccataggataacatttaggtgctgttttgtttggagagtggtagagaaatagaatagcctctagaacatttcagcaatctgaggaacccccatcgtgggatcttgcttataatactccactatgtaagacaaaggctggtgctggaactctggggttctcccaggctcttacctgtgggcatgttggtgaagggcccatagcaacagatttctagccccctgaagatctggaagaagagaggaagagagagggacaggggaatggagagaaggaaaatctagttataaaagaatattggcttttattcaaaaaacagactttcaaaaaggaagagcttttctttttcttctgttcaccacctgatgatttctgctgctacttcccagggacaagcagtccaatgtccagaacactactggatttcagaagatcttcttgaagtgcatatgtagttgacctgcactctacaggcattctttgtcattcaaggactgagcatctcacttttgtcaccaatcaggccaaggctcctccctaatgatctctgcaggtgctttaacttgttagatgcaagggaaaaaaggtccttctgtatgtttaataagaggcttggatggctagaaactcaaagttattggctgaagtttgatgtttatccagacttggtacctcaagtactcactatgaccccatcaacagaggggtctatgttgattttaggtgtacatgctccttgtctcctctgacttttttttttttttttgagacggagtctctctctgtcacctaggctggagcgtagtggtgcgatctgggctcactgcaacctctgcctccagggttcaagcgattctcctgccttagcctcctgagtagctgggattacaggcgcgcaccaccacgcccggctaatttttgtatttttagtagagacagggtttcaccatgttggtcaggctggtctcgaactcctgacctcgtgatctgcctgtcttggccttccaaagtgctgggattacaggcataagccactgcgcccggccctctctgactttcttctagccccctaaacatctgttccttccttctcactactctgagaatggccattgtatctttaggccacctaagcagtttttaatctagaagtgaagccaggttctgcctctcctcattgaactagtctgactacctggtttcctgaagacacagatcacactgcactgcctcttccacttacagggcttggcaacactgttcaaaacaactttctgtgatagtcacaatgttctatatctatgctaataaggtagccatgagtcacatatagttattgagcactggagatgtggttagggtgaatgaagaactaaacttcatattttaatttttttctttttttttgaagagatgaggtctcattctgtcactcaggctggagtacagtggcacgatcatagcttgctgcagtattgaacttctgggctcaagcaatcctcttgcctcagcctcctaagtagctgggactacaagtgcacaccaccatgactggctaatttgtaaaatttaaatttaaacagtcccatgtggctggtggcaacagtgtgggacagtgcaaattctcataaacacactggcataggttcttagcaaataacttgggtatcacttaaaaataaaccctaaaattgtatcattttggatggatatgttttgggtgactctcagtgtcttgaccttcccattgcaataaaaagaaaattgccaaggcctaaaattcacctggcttcaaagagactgcgatagagaaaaaaatcaggaagctaaaaatacacggatggccttttagaaagtggtcaccctcccccttgacagacagacggacagaaacacacacacacacacacacacacacacacacacacacacacactctcttactttaccgccagagtgaaaagaaatggcagtaggacaagtctgtgtgttttttttttttttttgagacgcagtcttgcactgtcgcctgggctggagtgcaatggtgccatctcggctcactgcaacctccacctcctgggttcaagtgattctcctgcctcagcctccctagtagctgggattacaggtgcacaccaccacacccggctaattttttgtatttttagtagaaacggggtttcactatgttggccaggctggtcttgaactcctgacctcatgatccacccgcctcaggctcccaaagacaagtctgtttgttttaagggacagcatccatctgtgccactctcactacctgtatgaataaaccgcacccccaacctgttgataggacctgcatgctcataatgctagaagttctccccaggcagccaagtggagccaaatgctgacatgaaaagtacaaaagattaggaatgtttatatccaggctaacactcagtgatgaggatgcctagttatgagataagaaatttgaagtttcgggcttggcgtagtggctcacgcctgtaatcccagcactttgggaggctgaggcaggcggatcacgaggtcaagagatggagaccatcccgtctaacacagtgaaaacccgtctctactaaaaatacaaaaaattagctgggcatggtggcgggcacctgtagtcccagctacttgggaggctgaggcaggagaatggtgtgaacccaggaggtggagtggagctggtagtgagccgagacggcgccactgcactccagcctgggtgacatagcgagactctgtctcaaaaaaaaaaagaaatttgaagtttcaggccgggcgcggtggcctgtaatcctagcactttgggaggccgaggtgggtggatcacttggggtcgggagttcaagaccagcgtgaccaacatggagaaaccccatctctactaaaaatacaaaatcagctgggcgtggtggcacatgcctgtaatcctagctacttaggaggctgaggcaggagaatcacttgaaccctggaggcagagattgcggtgagccaagatcacgccattgtacttcagcctgggcaagaagagcaaagcttcgtcttaaaaaaaaaaaaaaagaaatttgaagtttcacctctacatatacatttctcttccagagaaaaatactatggtgacatttagtattttcagaatgtcattactttgaccacatactttccatcattgctattctgcatggaggaaaaaatccaaagcactagaatttctttttaaagaggggaagaatctggtgctaatactgcctagcatacagtggaggaaaaacagaggactggctcacatggcgctcccctgtggtaaaggcagaagcagaaataaggccagcagcttttcttggcatctggaacaattacttgataggctcagaaggtaaaaacaggctgacctcagcagttcaaaactccaggcttcatttgtgatcatgtcccaaagcagttttccttaggaaattacctctactggttccctcttaagtttctataaagggacagaaagtgctcagtagaaggatgttttgttttgttttgagacaaggtctcacaatgttggccaggctggagtgcagtagcaccatcatggctcactgcagcctcgacctcccagactcaagcattcttctcacctcagcctcctgagtagctgggaatacaagagtgtgctacgacacccaattaatttttaaatttttttgtagagacagggtcttactatgttgcccaggctagtcttgaactcctgggctcaagtgatcctcctgccttggcctcctaaagtgctgggattacagaagtgagccgctgtgcccagctgggattttttttttttttttgagatgaagtctccctcttgtccccaggctagagtgcagtggcgcaatcttggctcactgcaacctccgcctcctgggttcaaccgattctctagcctcagcctcccgagtaatcctgagctaggattacaggtgcctaccaccacgcccagttaacttttgtatttttagtagagatggggtttcaccatgttggccaggctggtctcgaactcctgacctcaggtgatccacccgccttgggctcccaaagtgctgggatcacaggtgtgagccaccgcgaccagcctgggatgttctgaaatgcctggtagtgcacacttgaaaaaggaagaaaagcagactgggaacatagcacttagggagctgagaaagcagccagctcaggcctgacaggtaagtgtgaaatcttgcagactttctccctgtgaggaagtcagagttctggctaagtcatctgctacaatatgatcaggagaaagtcattgagtcttcttgggtctcatctgcaaagttgttagaatgctccattttttttccctccgtgaagccttcaacaacttttcaagaaactatagtattgttgttaagagtttagaattggaggccgggtgcagtggctcatgcttgtaatcccagcactttgggaagccaaggcgggtggatcactggaggccaggagatcaaggccagcctggccaacatggcaaaaccccatctctaataaaaatataaaaattaaggccgggtgcagtggctcatgcctgtaatcccagcactttgggagcctgaggcgggcagatgatctgaggtctggaatttgagaccagcctggccaacatgttgaaaccttgtttctattaaaaatacaaaaaactatctcggtgtggtggcacgtgcctgtaatcccagctatttgggaggctaaggcacgagaatcacttgaacctgggagctggagactgcagtgagctgagattgcgccactgcactccagactggccaacagaatcagacaaaaaattagctagttgttgtggcacatgcctgtaatcctagccacttgggaggccaaggcacaagaattgaacaaggtttgaacttgggaggtgaaggttgcagtgagcagagatagtggcactgcactccagcctgggtgacagagtaagactctggcccgaaaaataaattaacaaagaatttagacttggagctagacttcctgagttcaacttctagttccatcacttattacctgtgtgactttgagcaacttattcaacctctctgagcctcaattttcacatctgtaatataggcataattacagtacatagctcatagagttgtcataaaattgttaattagttaaaacatggttgggcctttagagcagtcccagcataaagtgatcttttttttttttttttcttttgagatcttctgtctgtcgtctaggctggagtgcagtggcgcaatctccgttcactgtagtcccctcttcttgggctcaagagatactctcaactcagccttccgagtagctggaactacaagtacatgccaccacgcctggctaatttttgtatattttttttggtagagatggggttttgccatgttgcccaggctggtatcgaactccttggctcaagcgatctgcctgcctcagcttcccaaagtgctgggataacaggaacgagccgctgtgcctggcccagtgaacattatataaattttagctattattggctgggcacggtggctcacgcctatcccagcacttggggaggccaaggcgggaggatcacaaggtcaggggttcaagaccagcctgggcaagatgagttttcagtgagctgagatcgcaccactgcactctggcctgggcaatggagtgagactccgtcttgggaaaaaaaaaaagagagagagagagcaagagagagagagagaaagacaccccagtgaagtgaaaagagcaaagtctttagattctcatctgcttaaagtcccagctcttccacttatcagctaagatctgaacccgagacgggaatccaaattacacagcctctctaaatctcttagttttatcattcataaagtagagacaatacttatttatgtggttgggatggaagagtgaaaaaagaacctgtgtgaaagtatctagcactgtgtatgtatgtaataagtcttacaaaatgaagcggcccatctctgcaaaggggagtggaatacagagtggtggggtgagatttttgtcaacttgagggagggagctttacctttctgtcctgggattctcttgctcgctttggaccttggtggtttcttccattgaccacatctcctctgacttcaaaatcatgctgaaagaaaccaaacacaacccatcaggataagagaaagagaagcttccttcaatggaagtggagcagacacgtcatatttaaggcattcaggccaggcgcagtggctcacccctgtaatcctagcactttgggagactgaggcaggcagatcacttgaggtcaggagttcgacaccagtctgaccaacatggtgaaacctcatctctactaaaaatacaaaaaattagttgggcgtggtggcaggcacctgtaatcccagctacttgggaggctgaggcaggagaatcttttgaatgcaggaggtggaggttgcagtgagctgagatggtgccactgcactccagcctgggtaacagagcgagactccatctcgcatctcaaaaaattaaaaataaaattaaaaaaaaaaaaattaggccgggtgtggtggctcacgcctgtaatcccaggactttgggaggccgagacaggcggatcacgaggtcaggagatcgagaccatcctggctaacacggtgaaaccccgtctctacttaaaatacaaaaaaattagccgggtgtagtggcaggcgcctgtagtcccagctactcgggaggctgaggcaggagaatggcgtgaacccgggaggcggagcttgcagtgagcggagatcacgccactgcactccagcctgggcaactgagcgagactccgtctcaaaacaaacaaacaaacaaacaaaaaaaccaaaaattagctgggcgtggtggcatgcacctgtagtcccagctactcgggaagctgaggcatgagaattgctggaatccaggaggcagaggttgctgtgagccacgatcatgccactgcactccagcctgggtgacagagtgaaactctgtctcaaaaaaaaaaaaaaaaaaaaaaaaaatttaaggcattcagaattgccaggcaggcagtagctgggcaccaatggctcacacctataaccctagcactttggcactttgggaggctgaggcaggaggacagcttgagaccaggagctggagacccagctgggcaacacagtgagaccccttctctagaaaaaagatacataaaacctcagccaggcatagttgcatgtgcctgcagtcccaatttcttgaaaagctgaagctggaggatcacttgagcccaggagttggaggctgcagtgaactgtgatcataccaccacactcccgcctgggtgacaaagtgagactctgctaaaaaaaaacacacacacacacacacataaaacaaaaaaaagaaagaaagaaaaagaattgctgggcagagatttgaccaaaagcaagtaaaatcattctttttggtagaccaggtgaaatgactaggatctcagctgttgaaatcaattcactgaagcaaatcttttgtgtgcagaacttaacaatcggcttttcacctcactgggacttaatgtattttaattttcaacatctatctcctctcaaaacattcacttagcatttagattagactgctaatactgtgctgttataaaggtaactgaaaaattccctatctcctaaatcaattgtatattatcatctaaggaaataaaggcttttcagatttccactgagagatttacagttaacacaaccaaaatgataaaatatacattcaatgcactaaagaaagttagaggtttttcataattactattatgactggtcatggacatgagaataaagaataatgagactggggagaaatttgaggaagaacgctcagaaacaattctgactgaaactcagattgtagggaaggccttatgtgttgccaagagtattgtgaagaaaactaaaggcaagagtataaccactggctattactaggggaagaatatctgacatttcctagttacttgaatgaggagtctagtgataaatttgtcagaagactcccatgttcatagtcctccttgtacccctgagcttcatacaatgtgtccaactgcctacttaacttctctatccagaagtctagtatacatctcaaaattcatgcatctggccgggcacagtggctcacacctgcaatcccagcactttgggaggccgaggtgggtggattacctgaggtcaggagtttaagaccagcctggccaacatggtaaaaccccatctctactaaaaatacaagtattagccaggcattgtggcaggtgcctgtaatcccagctactcgggaggctgaggcaggaaaatcacttgaaccgggaggcggaggttggagtgagctgagatcgtgctaccgcactccatgcactctagcctgggcaacagaacgagatgctgtcacaacaacaacaacaacaacaacaacaacaacaacaacaacaacaaattctcacatctaaaacagagttcctggttccattcctgcttcctgcctttcccactcccccatattccctaccatgccttcttcatctaatttaatattactaacaagatctattgttcaagccaaaacccaagtgtcactccttcaatttctctttaccttatcctccaaatttaatccattagcaagtcctctcttcaaacccatcccaaaccaaccttgtttttaaccatctccacaccaccaattaccacaaggataaaatctgaattccttaccaccaaatactatgtgatctggccctcatctatgaccttctcccattccttgtgtaatctctgcctccacacataatttgcaaattactccagctacactggcctattattattattattattatttttgagacggagtcttgctctttcgcccagcctggagtgcagtggcgcaatctcagctcactgcaatctccgcctcctgggttcaagcgattctcctgccccagcctcccaagtagctgtgattacaggcacatgccaccattcccagctaatttttttttgtttttgagatggagtttcactcttgttgcccaggctggagtgcaatggtgcgatctcagctcaccacaacctccacctcccgggttgatgaagtgattctcttgtctcagcctcccgtgtagctgggattagaggcacgcgccaccacgctgggcaaatttttgtatttttagtagagacagggtttctacctcagtgatctgtccgccttgacctcccaaagtgctgggattacaggaatgagccaccacacccagccgtgcccagctaatttttgcattttttagtagagatggggttttgccacgttggccaggctggtctcaaactcctgacctcaggggatctgcctgcctcggcctcctagagtgctggaattacaggtgtgagccactgtgcccgaaccttttatcattattatttcttgagacaggagtcttgctctgtcgttcaggctggagtgcagtgatgcgatcttggctcactgtaactcctacctttcggttcaagtgattctcctgcctcagcctctggagtagctgggattacaggcactgggattacaggcacacaccaccacaccatgctagttttttgtatttttagtagagatggggtttcaccatgttggccaggctggtctcgaactcctgacctcaagtgatttgcctgccttggcttcccaaagtgctgggattataggcacgagccaccacacacgaccaacattggcctatcttttaaaaaataaaccaagctctggccgggcacagtggctcacacctgtgatcccagcactttgggaggttgaggtggttggatcacttgagttcaggagtttgagaccagcctgaccaacgtggtaaaaccccatctctactaaaaataaaaactagtcgggtgtggtagcacgcgtgcctgtaataccagctactcaggaggccaaggcaggagaattgcttgaacccaggagacagagtttgcagtgagccaagattgtgccactgcactccagcctgggggatagagggagacaccatctcaaaaaaaccaaaatacagaaatcaaaaaaccacactcattattacctcaagacctttatgtttgctattcctctgcctataagatgcattcccttcatttttcaaggacaattatttcttgttatttaggtctcagctcaattttttcagaaaggctttccctggcctccttaaacgaaagtaatcaacaacctttgacagctaatactattccactgttctgtatatttctccatagcatttattgttatcttaaattcatctttattgtgtatctcccctcgacagaacctgaatcctaccagggacttagttagtcttatttactgttgcattcctagtgcccagaacacagtaggctcccaataaatagccactgaataaaagttaaaaccaacaaaaataatcatttaattaattatgaatacatcgaattgtgcacaatagtttataaaattactttttttttttttttaagacagggtctcattctgtctcacaggctggagtgcagtggtgcaatctaggctcactgcaacctccgcctcccgggttcaagtgattctcctgcctcagcctccccagcagctaggattacaggcacatgccaccacgctcgactaatttttttgtgtttttagtagagacaaggtttcaccatgttgaccaggctggtctcgaactcctgacctcaagtgatccacctgccttggccactcaaagtgctgggattataggcatgagccaccacgcctggcctataaaattactttcacatttcattttgcctgatctgttgtcacagaagttctcagatggctgttctgaaattattcctcctcctacactctatcttatttacttctcactgttctcagtatcataaagtgcaacatctttttgaagcaatctgaattataaacagatacatttgcatgtatatatatgtatatatgcatatgcacacacacacttttttttttttaagagacagggtcttgctctgtgcaagtgcaagagtgcaatggtatgatcatagctcactgcagccttgaactcctgggctcaagtgattcttctggcttagcttcctcagtagctaagactacagaagcacactgccatgcccggctaattaaaaaaaaattttgtggagacagagtctcactatgttgcccaggctggtttcaaactcctggcctcaagtaatcttcctgtctcagcctcccaaagggctgagattataagtgtgagccactgcatctggactgcatattaatatgaagagcttttcttcaacaacagtgaacagttttctacaaaggtatatgcaagtgggcccacttcttgttcttatgaatcttttctttccttttataaaactccttttcctttctcttttccccaaagaaaggactgtttcttttgaaatctagaacaaatgagaacagaggatatcctggtttgcgctgcaaaattttttttttttttaagacggagtctcgctctgttgccaggttggagtgcagtggcacgatcttggctcattgcaacctccacctcccgggttcaagagattctcctgcctcagcctcctgagtagctggaactaaaggcgcatgccaccacgctgagtaattttttgtattttagtagagacagggtttcaccatgttgcccaggctgatctcgaactcctgagctcaggcaatctgcctgtcttggcctcccacagtgttaggattacaggcatgagccactgcacccgattttttttttcttttgatggagttttgctcttgttgcccaggttagagtgcaatgatgcgatctcagctcactgcaacccccgcctcccaggttcaagtgattctcctgcctcagcctcccgagtagctggaattacaggcaagtgccaccaagcccggctaattttgtatttttagtagaaacggggtttctccatgttggtcaggctggtcttgaactcccgacatcaggtgatccaagcgcctcagcctcccaaagcgctgggattataggtatgagccacagtgcaggcctgcataattcttgatgatcctcattatcatggaaaatttgtgcattgttaaggaaagtggtgcattgatggaaggaagcaaatacatttttaactatatgactgaatgaatatctctggttagtttgtaacatcaagtacttacctcattcagcatttttctttctttaatagactgggtcacccctaaagagatcatagaaaagacaggttacatacagcagaagaacgtgctcttttcacggagatagagaggtcagcgattcacaaaagagcacaggaagaatgacagaggagaggtccttccctctaaagccacagccctttaataaggcttgtagcagcagtttccttctggagacagagttgatgtttaatttaaacattataagtttgcctgctgcacatggattcctgccgactattaaataaatccctagctcatatgctaacattgctaggagcagattaggtcctattagttataaaagagacccattttcccagcatcaccagcttatctgaacaaagtgatattaaagataaaagtagtttagtattacaattaaagaccttttggtaactcagactcagcatcagcaaaaaccttaggtgttaaacgttaggtgtaaaaatgcaattctgaggtgttaaagggaggaggggagaaatagtattatacttacagaaatagctaactacccattttcctcccgcaattcctagaaaatatttcagtgtccgttcacacacaaactcagcatctgcagaatgaaaaacactcaaaggattagaagttgaaaacaaaatcaggaagtgctgtcctaagaagctaaagagcctcagttttttacactcccaagatcaatctggatttatgattctaaaacccctggtgacagaatcagaggctgaaaacaccactaattataaccagcaggtatggatatttggaagtctaggggaggctgatatgaagttaagaccagaggaaatatctgtccactccctcttctcaacacccatcttctagacgccaaggctagctatagatctccattatagtgttcaaggaattaggaattatccatgtcaatagttttgattaatgtggacggagaacatctatattactagatggcaatatgtgaaagaagaaaacagtattgttgaaaacctaaatctgaaatgtcaatgtaatgacaaattttcacccctagaatgtctacctggggagtcctaaccctctaatattcccctgagagggatgggagaatacagtgcagagcttttatataagtatttcagaaagcagtagctaaagaatcacttgtttatttcccagtgtttcaaaggcccttctgaagaactaagcaaactaaggaaagaccatttagttttaaacaggagaaatgtatttaactaaatcctaaacacagcaggctatctgcaagcagcagcagcagcagcagccatgctccctcacagaatccttacaatttttgaagttttttgtttaactgctacaaaagccgatttagtaacatttattacacttaaaaacttcagttcatttgtagttcaaagcaaatgtattggctttgagtttaaagactgaactactttagatttgatttgcatttttttttttttttttttttgagatgcagtcttgctctgtcagccaggctggagtgcagtggctggatctcagctcacggcaagctctgcctcctgggttcatgccattctcctgcctcagcctcctgagtagctgggactacagatgcccgccaccatgcccggctaattttttgtatttttactagagatggggtttcaccgtgttagccaggatggtctcgatctcctgacctcgtgatctgcccgccttggccccccaaagcgctgggattacaggcctgagccaccacgcttggcatctttttacctttcattaactttgatgcaaacctatagcttaaggtatcttaaactttaatgacatttttctctaaaatagtagtttgtaataacttgttctggcacctggctccaatgaacactaccctctgaccctgtggtataattttcatgagtaagtggaaacctaagatcttagaagttcaacggcaatgtgtccaaggggtttagatcctctccttaagtgcctgtatctctgtgaaaagaatcatcataggctaggcgcgatggctcacacctgtaatcccagcactttgggaggccgaggtaggtggatcacctgaggtcgggagtccaagaccagcctgactgacatggaaaaaccctgtctctactaaaaatacaaaattaggtatggtggtgcattcctgtaatcccagctactcgggaggctgaggcaggagaatcgcttgaacccgggagggggaggttgcagcaagccaagatcgtgccattgcactccagcagcctgggcaacaagagtgaaaaactacacctcaaaaacaaaaacaaaaacaaaagaatcatcatcaagtgaactggaacacatccagagaactaattttgttagaaagattttagagttgagccacacaatctgcatcttctgcgtcctccatgcactcgtctgctttctggagccccatgagtgagtcttaatcctgttccagataacagttctcttccgggtaacggttcttcagatacttgaagacagtgtcttatttccttaaatcttctcatttcttcttcaaaagacagtatttcaagttacttttatgtatctttaccatctacctctggataaacactctccaatttgtcagtgaccatgttaaaaaccaagcacggtgcttaaaactgacatcatctttcaggcaatcactccattggagaatacagtggggctctggatctgtacttcacttgctccagagcctctgcttgtgttaatacggcccagtttcaaataagcatttttagcagccctgaaatgtgtactcagatttagtttatagtcaactaaaaacacccagaggtctcctgtattacacaagttataattaaaaccttaaaagagaaaggtataggacaaatgatctgtctcctcccttttttgctttttcatatgttaagactatctcggagctgttatcagacttttttcctgaaaaactctcaacaatactcaaactaggtgttacatgaagctggggtctccaggttttgcctcacttgttctttcttttgttgttgttgagacagagtctcactctgtcgccaggctggagtgcagtggcaggatctcagctgactgcaacctcagcctccagagttcaagcaattcttctgtgtcagcctcccaagtagctgggattacaggtgcacaccaccacgcccagccaatttatgtatttttagtagagactgggttttaccatattggccaggctggtctcgaactcctgaccttgtgatctgcccgcctcaggctcccaaagtgctgggattactgatgcgagccaccgcgtccagctgcctcacttgttgttttaggacttaggctccacctcaccagtgtagtcccagcaggtagataggagttaatagttgactatctcagctcaccaccctccaaaccttttttttttttttttttttttgagacaagaatctcgctcttgtccccaggctggagtgcaatggtgcgatcttgggtcactgcaacctccacctcctgggttcaagcgattctgctgcctcagcctcctgagtagctgggattacaggtgcctgccaccacgcccacctaatttttatatttttagtagagacggggtttcaacacgttggccaggctggtctcgaactcctgacctcaggtgatccacccgcctcggcctcccaaagtgctgagattacaggtgtgagccaccgtgcctggcccacactccaaatcttaacccaaaacaaaaggaggtaaggaagcagcaaaactattatttgtctttcataaagtaattgattgactattagaagactatcatccatgctatgctcaacaaatattcttattttttcacgttttttttttttttttttgagacggagccttgctctgtcgccaggctggaatgcagtggcatgatctcggctcactgcaacctccatctccccggttcaagtgattctcctgcctcagcctcacgagtagctgggactacaggcgcacgcgaccacacccagctaatttttttattttttagtagagacggggtttcaccatgctggccaggatggtctcgatctcctaatctcgtgatctgcccgcctcggcctcccaaagtgctgcgattacaggcatgcgccaccgtgcctcgcctcatgtggttttatgcagcagatgcaaggtattctgtaaaggttcttggtatacctgttttcataacaacatgagtagtctcttcagtaattagattagttaaagtgatgtggtgttttctggcaaacttgtacacgagcatctgaaattaaatcaaatattccattatcatgagttacctctagcacacagctcagaatactagttattccaccatggcatatgtttacctatgtagcaatcctgcacgttctacacgtgtcctggaactatttaaagtgaatttttttttttttttttttagacagagtcttgctctgtcacccaggctggaggtaaaaaaaaaaaaaaaaaaaaaatagaataccagttatcctagctttaagtctctgtttttctcagaaagggtacatttaaaaaattctaagacacctgaagtctcggctgggcgcggtggctcacgcctgtaatctcagcactttgggaggctgaggcgggcagatcacaaggtcaggagatcgagaccatcctggctaacacggtgaaaccctgtctctactaaaaatacaaaaaattagccaggcgtggtggcgggcacctgtagtctcagctactcaggaggctgaggcaggagaatggcgtgaacccaggaagcagagcttgcagtaagccgagatggcgccactgcactctagcctgggcgagagtgcgagactccgtctcaaaaaaaaaaaaaagatacctgaagtctcaaataaatagtttaataaaaattatgtacacatcagcagacataaaattacaactaaggattcaaaataatattataaacctactacgtaccacaaaacttaaaacttaaaaaatatatactgggccagacacggcagctcatgcctataatcccagcactttgggaagctgaggtgggaggactgcttgagctcaagagtctgagaccaagaccagcctgggcaatacagtgagatttcatgtctttaaaaaaaaaaaaaagtaaaaagaaaaaatatatattaattttgctttaatagcagatatcattcgattccctaagatcgtttctttgcatagtgacactctactgtactataaatttatcagcctacactttataagctgagaggtaactagcctacacagaaagttatgctacagatatacatggcttaaaaccaagactcaaccctctgatagttacaaaacactgaaatcaggatgttactaaaggtcagtgcaaaagcgatcaattctctcgtaagaaggcttagaaggggttcatgttcttccccaaagaaatttagagtcctctagctattatctatcaaccaaataaaaatcaataggcagcaaaagaaattaaccagatcaattatgggcacagttgacctagctggtaggtattgtctgataaataactttgtttaccaagggccatcatttactagccatagccacagccactcacaccagtatttacgtgttgcacaatactgccatgaaggtcaggccatctttctttcatgttgcctcactccatactgccacagggcactgaaaaaaggcaggctagagaagctaatgacatcctcccccttttgctaccaccctccgccaggatcattagcaattctgaactgattaattgctgaaatcccagccttgaaactgttcagttagaagagcaatgctgaactgctgaaaagatcatcttaatatgggcttcagaattaatcatgtgtaatacagtcagtagctttcatcataaatttaccacacttcaccaagtctgaatagagctcaaagttttcctcttcgcttgtttaaagacaacatgtacccaagccacttgtagtctaatctgcagctcagaattgcctttgccaagaaagattagaccattttagccatctctaaaaagctgaacttgcaaaacaaagggataaagaacgctaattttcaatgaataaataaggaattctggacgtgcaggcaagtgatcaagagccattgaaacagacacaggtaagagctttcagagcaaattgctggtctggacatgggattatgagatgaaaacatttatagccatcactgtgcacttactcattgtatctaccagggcagccacagcttactttgcccttttagtagtgggatacatctggccacagagatgttatgctaagtaactacctatggagaagttaggatgaaaaatcctaggaaggatatattaataaagatatttcagaatgacttggtcatctctcagtgtgcaataaatggcacacccactactgaatccatttgataatctggtatgttatctcatcatagttttaaagaaatattcacgcaattcttcttcttattattgagacagagtttcgctcttgttgcccaggctggagtgcaatggtgcaatctcggctcaccgcaacctccgcctcccgggttcaagcaattctcctgcctcagcctcctgagtagctgggattataggcatgcgccaccacgcccggctaattgtgtatttttagtaaagatggggtttcttcatgttggtcaggctggtcttgatctcctgaccttaggtgatctgaccacctcagcctcccaaagtgctgggattacaggcttgagccaccatgcccggccatgcaattatttttattatgaagtgatgacaatgacaattaattacaggggtggtaaacttctcaggatgtctgaaatccacaaatagcccaagcagaaacgaggttttactggtcttaatattttaatgggtatttttccacagtatgaagcaattcccatttctggcattaaggacccaaggtgatgccaaaatcctaatagcaagggatattgcagggcagaagtggcagggcattcttacaagccaggatgaaaacaaacactagagaaatgctactatctggcagtacatttggaaccagtctgaatttagttaaatatgctggtaaattcacccatgtgagacaagggggagaaaaagatgccttctggggaataaaactatacctacttgcttttacagatagaaaggaaaattccaattcgaaagtcctatatcatacccaaagtatagcttttccactaatatttaataattattttctcaagtaaatatacataaaataatccacactatagctttatctagatctaaattttcagaaattagtaatcgaaattaaattacacagaactgtgattgttttctagatttcttcctctaggttattaattgacaatacctacataaaactctttccagaatgttgttaagtcttagtcattagggagatacatatggatacactcacaaattcttctggggtcaggccagacaccaccatggacattcttttgttgaccctttctgttgaagctgtcaattctggcttctccctgctcacactttcttccattgcattatacccagcagtatcagtagtatgagcagcagctggactctgggcagattctgcaactttcaattggggaactttcaatgcagaggttgaagatggtatgttgccaacacgagctgactctggggctctgtcttcagaaggatcagattcagggtcatcagagaagaggctgattccagattccaggtaaggggttccctctgaaaggaatgggagaagtttaatttacacaacgatgaatgttgaattacaaagttctggtctctgttaagaattaaaaagaccaataaagttaggttaagagaaaaatgggtacatgaatacagtgttggtggaaatccaaagtagcttagtttcctaaaaaggaaatatggcattatgtagcaaacaccttaacacgtatttacactttcagtcaacaatgctagttttagaaatatatcctagggagataaaagatatatgcaaaggtttagtcataggaatagtataattttagaaacaatgtagttgtccaataataggagattaaattacgatatacctagtccaatggagtactcttcacccattaatttgaatataaatgttgatgtacaataaaacagaaatgttactaatatattaaagacacctaagcaatattatttatcatgacattattttaaaaataaaagtttatgggccgagcacggtggctcacacctgtaatcccagcactttgggaggccgagacgggtggatcacgaggtcaggagatcaagaccatcctggctaacacagtgaaaccctgtctctactgaaaatacaaaaaaaaaaattagctgggcgtggtggcgggcgcctgtagtcccggctactagggaggctgaggcaggggaatggcgtgtacccgggaggcagagcttgcagtgagctgagattgagccattgcattccagcctgggcaacagagcgagactccgtctcaaaaaaataaataaataaaaataaataaataaataaaagtttatgtaaaatgactaaagaaacacagaaatattttattattaaagaataagagtacaggccgggtgcggtggctcaggcctgtaatcccagcactttgggaggccaaggtgggcggatcacctgaggtcaagaggtcgagaccagtctgaccaacatggagaaaccctgtctctactaaaaatacaaaaaattagccgggcgtggtggtgcatgcctgtaatcccagctactggggaggctgaagcaggagaatcgctcgaacccaggaggcggaggttgcgctgagccgagattgcgccattgcactccagcctgggcaacaagagtgaaactccgtctcaaaaaagagtacgggtaatatttttttttttgagaagggtctcggtctgtcatccaggctgcagtgcagtggcacaaacatggctcacctgcagccttgacctcctggactcaagtgatcttcctgtctcagcctcctgagtagctgggaccacaggtgtttgccaccttccagctgattttttttttttttgagatggagtttcattcttgttgcccaggctagagtgcaatggcgcgatctcagctcactgaaacctctgcctcccaggttcaagcgattctcctgcctcagcctcccgagtagctgggactacaggcataagccaccaagcctggctaattttgtatttttagtagagacagggtttctccatattggtcaggttggtcctgaactcctgccctcaggtgatctgcccgcctcggcctcccaaagtgctgggattacaggcgtaagccacccaccacgcctggccccagctagtttttttttttttttactttttatagagatcaggtctcgctacattgcccaggctggtcttgaactcttggcctcgagcaattctcccaccttggcctcccaaagtactgagattacaggcatgagcagtggctgtaatctgtccttattttatcttttaagaggtggcatctcagcttggtgaagtggctcacacctataatcccagcactttgggaggccaaggtaggaagattgcatgaggccaggagttagagaccagcctcggcaacataacaagacccgtgtctaaccccaccccaaattatcttttttattccctatattgtccaatttgggggcaatgagcttatagcaattttgtaagaaaggaaaaaaaagttgaaaaatgtggcaaatgctttatttttgtttcttcatccaaggtaatgacaccattacttttttcacttaataaatcagcagatatcattaccaaattaaaaacagcagagatgtcatccttgaaacatttcagaaaatgccatggtatcaggaattaagcatagctaagtagaatgtatgagattcctaaaatgaccctaatgaacatggccaaataccacatttgatgccaaacagtgtcttttatgataacgtgtttttgaggattaaaaactttctttactgattaaaactctgatttacaagccataaaacaccattcattaaaagtgatttttaaggcataaaatatgtagtcatttatattcattaactcataaaaaaaacttgctttgggatttgactcattttctaataaaggactggcctaaaactttattctttggcctttggactcttgtctaacagttgaaataaaatatatgtgtgtatatatatatatatatattttttgagatggagtcttgctctgtcacccagactggagtgcagtggtgtgatcttggctcaccgcaacctccgcctcccgggttcaagtgattctgctgcctcagcctccagagtagctaggattacgggcatgcactagcacacccagttaatttttttgtatttttagtagagacagggtttcaccatgttggccagacaggtcttgaactcctgacctcagctgatccacctgcctcggcctcctggagtactgggattacaggcgtgagccactatgcctggcctgaaataatacatttagagtacaccaagactccctcatcctcaaaatcattagttaaaccattaattaaaatatagatggattaacagtttcaataattttcaagtaaaccttgattaacacttgagctatttttctaaagtgggcttaattaagtataacaaaagtgtccatgatagactagtacatctaaaagttggttaaccagaatatctttatgtaggattcagagtaaaatcaaagtgtttgttccaatacagcagatgaaatattacctagatcttgccttggcaagtaagatgtttccgtcaaatcgtgtggcccagactcttccagctgttgctcctccacatcaacaaccttaatgagctcctcttgagatgggtagtttctattctgaagactcccagagcaactgtgcatgtaccacctatcatctaatgatgggcatttagaaggggatgacctagaaagataaatggaaggagaaaaccatcgccaccaattgtgaaaggacaaatcatacttgctgggcagccaaagcataaatgaaacagctcatgtcagagagatcagaaatgactggcaaaaaagagcccgcaagacagcctagaagtctggattcatgttgcctgccaatatgtcagggttgacatataacatggggttgggttggtctgaggcaccatatctcccagctgtttaaaagcaggtcagtagctgggtgtggtggctggcgcctgtaatctcagctactcgggaggctgaggcaggaaaattgcttgaacctgggagacagaggttgcagtgagccgagatcacgccactgcactccagcctgagtgacagagcaagactctgtcaagaaagaaaggaaaggaaagaaaggaaagaaaaggaaaggaaagaaagaaaagaaaaggaagggaggaaggaaagaaaggaagaaaggaaagaaaggaaagaaagaaggaaagaaggaaggaagggagggaaaggaaaggaaaggacggaaggaaggaaggaaggaaaggaagaaagaaaggaggaaagaataaaagcaggtcagcaaatttttaccaaattactcactgccactcactctatacacaatattctacttgagtctaaatggatatgttagaatcagatctcttatgaagatagaaagttgatcaatgtcgacatctctacactcattctttctactcagttttagcagaattcacagaatcatccctattgcctgccttttcaatgttcaaattcattctaaaaacaaaagccagctataaaatattgttagaaaagcatacacacccagtaaatagttcctctgctcttccaagtgcttaggactttgcaaaataagatacttatcaacagatttaaagggcctcagaggttaattaatttaaacaattattgggtgcttactatgggtcaaatactaaggctaggccccctggattgaagatgggtgagacctgaattactgctctctctctctttttttttttgttttgagacggagtcttgctctgtcgcccaggctggagtgcaatggcacggtcccagctcactgcaacctctgcctcccaggttcaagcaattctcctgcctcagcctcctgagtagctgggattacaggcacctgccaccacgcctggccctccagtaaggaaaagaatagtactggactacatagtccagtactggactgctatacagccctgtgttaatagtggtgtaaatacacatctctgaaagatattctaaatgttttctggctttgggagggcaaggcgggcggactacttgagtccaggaatttgagaccagcctgggcaacaaggtaaaactccatctctaccaaaaatacaaaaacttagtgggtgtgggtggcgcatgcttgtggacccagctactcaggaggctaaggtgggaggattgcttgagcctgaaaaacggaggatgcagtgagccatgactgcaccactgcaatctaggtgacacagggcgaccctgtctcaaaaaataataataatagtaattattattattattttctgtggtaaatcaacagctagactttttctagaaagacaagaattttaattagggcaagggctgccttgaagaagtctaccatcagtttccaagcttgttcaggttttacctccattatatttttttctgaccttcagaagggacatatctatctaaccgcacatttctcatgttgtagcttatgttataggttcaaaaaacctatataggattaaacaaaagaagtatcctagagcaataaaagtgtataaatgcctgtatgcaaaaaactggagaaagtatggtgaaaaaaattaacaatcagagttcaatataaataaagatgtcagataccacagcatctttacattgatgtttcttacctttccactcctggttctttatttttactggtagaactatctgcagacacctcaaacttgtcagcagaaaggccttctggattctggcttatagggtattcactacttttctgtgaagttaatactgctttaaatggaatgagaaaacaaatctactttactgctttgttctgatagtgataattcaggttagaatactgatttttttcaaaagcatcaatctatgatacacaaattggtttttaaacaagtatatcaggcagaattttataaacacaagcaatgcaacagacagatgctagcaccaaatggaattcaatgattaaaaaataataatgataataaaaggaacactttaagacagagtaaataaagacacccagctgagacaaggctgaaaaaaaaaatctatattccttggccctgaatgataaaaaatatatataacaaatttttatctctgcagcaaaataaattatgcccaaatcccctcagacaataggaaagaaagagtaccggagagcacaaagtacattattttctccatccctactgcctccacattgaagactgtatgaaatggggatttcagcttctgcatgtcgggggtaaacaagacatgagtgtcagacatgaaagaaaaaacaggtgacattttgcttcacattttcaattaccgaaaaaaaagaaaaaaacaaataaaccccctaaaccaacacatacacaaaaaaatcccaaggtgctggttgataagaaatcttaaataatacatggaactaatgatgaaatggcacaagaagggaaaaatcacaaaacatactgaaggcaaagttctggcatgttagttctttttttttttttgagacggagtctcactctgttgcccaagctgaagtgcaatggtgcaatcttggctcactgcaacctccacctcctgggttcaagcgattctcctgcctcagccttcctagtagctgacattacaggtgcctgccaccacgcccagctagtttttttggtatttttagtagagatgggattttaccctgttgatcaggctagtctcgaactcctgacctcaagtgatccacccgccttggcctcccaaagtgcggggattacagacatgagccactgcgcccagcctaattcattttgtaatatatttactcctccaaatgtatcactttgtgccactgccttctaggaagtggcttaaaggcagaagtacttatttatttatttttatttatttattttttttgagatggagtttgctcttgttgcccaggctgcagtgcaatggcatgatcttggctcaccacaacctctctgcctcccaggttcaagctgttctcctgcctcagcctcccaagtagttgggattacaggtatgcaccacctcgcccaactaattttgtatttttagtagagatggggtttctccatgttggtcacgctggtctcgaactcccgacctcaggtgatctgcctgcctcggcctcccaaagtgatgggattacaggcgtgagccactgcgcccgaccgttatttttcaacgagatgggtgtcttgctgtgttgaccaggctggtttcaaacttttttttttttttgagacagagtcttgctctgttacccaggctggaatacagtggcatgatctcggctcactgcaacctctgcctccaggttcaagcgattctcctgccttagcctcccaagaagatgggattataggtgcccaccaccaccccttggctaatttttgtattttttgtagagatggggttttaccatgttggccaggctggtcttaaactcctgacctcaggtgatccgccaaccttggcctcacaaagtgctgggattataggcatgagccaccatacccagcctggtctagaactcttaaactcaagtgatcctcctgccttggcatctcacagtgctgggattataggcgtgagccaccatgcctggccaaggcggaaatatttaataagtaaaaacaaatagttaaaaattgcaaaagtcttctattcattaaaaagtcactgatgactgtaattcattttgagcttttattagaaaagctaaaagccataaatataggtagaaaattgaaacaaaagattgtattaattaaactgtttttttaagacactgggtagcctggggggaaataatcattgatttcctgagttagtcttcaaatgcattatttatagtttcctttatgcttgtcttttctggacctgtgagtttctaggattgttaagaactctgttgaaagtaagtaggatctaactatgaagagaggtatcatcctccccacccccaatacagggtgataattgataaagggtaatgtgcaagttccaaggaaccatatcaaacggaattaaccattggaaagagttaaaaaagtggccaggtgatgtggctcacgcctacaatcccagcactttgagaggccgaggtggacagatcacctgaggtcaggagtttgagaccagcccggccaacatggtgaaaccctgtctctactaaaaatacaaaaattagctgggcgtggtggcgggtgcctgtaatcccagctacccaggaggctgaggcggacattgtaatgagccgaaatcacaccattgcactccagcctgggcaacaaaagtgaaacttcatctcaaacaaaaacaaaacaaaacaaaacaaaaaaaatgaaaggcagagggaaggctcagatacaaacacagctattaaaaagtcattcctccttttggccagaaccaccatctttcagtaatttgccaaaatgacgaacacaaagggaaagaggagaggcacctgatatatgttctctaggccttttagaaaacatggagttgttcctttggccatgtatatgcgaatctgtaagaaaggtgaaattgtagacatcaagggaacgggtactgttcaaaaaggaatgccccacaagtgttaccatggcaaaactggaaaagtctacaacgtgacccagcatgctgttggcatcgctgtaaacaagttaagggcaagattcttgccaagagaattaatgtgcgtattgagcacattaaacactctaagagccaagacagcttcctgaaacgcgtgaaggaaaatgatcagaaaaagaaagaagccaaagagaaaggtacgtgggttcaactgaagcaccagcctgctccacccagagaagcacactttgtgagaaccaatgggaaggagcctgagcagctggaacctattccctatgaattcatggcataataggtgttaaaaaaaaaaaaaaaagacctttggactgtaaaaaaaaagaaaagtcattctatcaccagaacatttagcatataaattcctcttcttactacaatgggcctcatgcaatgaagcaaataagataacttgttagaagttaacaactcaatagaacctgaaaaacagagcaaaacctttctgcttttttttctccttaatccttaattcattctctgaacagcaagcccaacctaagccttgtgacatgatgatctacttgctggctggtttaggaaagtctaaatgcagagatccagagtccaagtttcagaatattattgtagttcctcttaaatcattccctcatctagatgtcttaacatgttacattctttgtggataggaagtatgggccacaccaaacatttaataaacttacagactgcccactgtgtgctaagcattgtacagggtattgtgaagaattaaggaagacactggaagacaacagatattaagaaataataaactaggccaggcaccgtagctcccaagtaggtgggattacaggcatgtgccaccacgcccggctaattttttgtagttttagtagagatgtggtttctccatgttggtcaggctggtctcgagctcccgacctcaggtgattcgcctgccttggcctcccaaagtgctggggttacaggcgtgagccaccgtacccggcaacaatattctttttactagaagttctggccaggtgccatggctcacacctgtaaccccagcactttgggaggctgaggtgagaggactgcttgagtccaggagtttgagaccaacttgggcaacatagggagaccttgtctctacaaaaaataaaaaaaaaaattagctgggtatggtggtggacgcctatagtcccagctacttgggaggctaaggcaggaggatcgcttgaggaggtcgagaggctgcagtgagctgtgattatgccactgccctccagcttgggcaacagagcaagaccctctctataaggtgaggctcaggtcggggaggatggctcaagatcaggagttcaagaccagcctagttaacagtgcgtccctgtctctacttaaaaaaaaaattaaagaaaagaaaaaattatttttaaaaagttcatttgagtttcagttagactcacaccagatttagggagaaaaaggctcaaaacttatgttggtattaagttgtgatatccaaaacaattcagaaattaagcatttcagttacagatctccagaaaaaaataaacacacgtatataccaaagaggagatagtagatttacacagatattcaaagtcacacaataataacattttaaatcttacacattataattgaaagtctagtctgtgtttagactgaagatggtgaaagtaccctaaagaagagtattatactggggatgggactctgatctctcattatctgagagatgaactaaatgaagatagttacaaagaaagcatttaaggaaatacattttgaagcactgccatagcaacagagtttctagctagcttctttatccaagagctactgtttcttcctgaacacaaaaatactgcaaggcacaactggggaccaaagccactgttctgtataagtagcagacttgagttcctagaaagactccaagaaaggtcttaaagttcccagttggactgtggaacggggtgctgaagaaggaactttaacactcagataagaatcactgagctaggaatgaagtgtactttgggagtactcaccacccctgcatgtttctaagcagcatcctagtggggaccccatgcctagcatctcctatgtgtctgtttgtttgcccctatttaaaaatctgcctgatgtattgtctttccaattaaaaactcaaatttccatctcactttccttcatttatgccattattcctcagctcagtgctcacttcttataggaagtcagctctgatcaactgcatctgcctggttactccaatggcatcctctcagaggtccatctggattttttttgataactgtaacattgctataaagcacttgactctattgcataattaggctttctgtgttgttcttttcttttccttttgaactaacaggagctctacatcactaggctttctgtggatcaaagtgcagttcctgaagtataggatgtctctccctataaatcagaagcacattaaataggtctttgtgatgtgacaccagtgttataaggaatatgtctgagtactttttcatagctttctgaaattatggggttgcctgtcaccaatttctcccattccacttagcttccaatagagcaagagctatgttgtataccatgtatcttccatgggctccccatagcatctacttgttgtaggtactcagatgacaacatgaatgactgccttgggtccctctgactggtatattagttgtgagcagggacaagaaccaaggctccataattacccatgtgctgagcaaggatcataaaatgttggagctaggtccttactcttcagaaggagataaaggggaaggaaagaattttgcttaagatatcagtgtttggccaacaatacacacctttttctgatgtgctttgttctggatttcgcaggtcctcaagggcagaagagtcacttatgatggaagggtagctgttagaaggctggctcccatgctgttctaacacagcttctagttcagccatttcctgctggagctttatcaggttatgttgcatggtatccctctgcttcaaaaacgataaatggcaccaagaaaatgaaatactttgagaagctttccattaaatgaaaatatatcatacaaattaattttagcacaggaattgaaatcacctagtatggaactacaagttctagctgaacaccttttaatctaaccacattcatgcaattaatgcccatgaaattatttccaaatgatgttagtgagggaaaaaatcctcaaattcccccaaatagacttgatgttattgtgatgtccttttgaagttggttattttcttttaaagctagggagtgaaaaaataattaaggcatttaaacactatcgatatttaaaattagcatgaatctgttaacattttatttatatgggcacatttcaaagacttggtgttgtgagattcatcagacatttaggttagttcatataaaaatgtgtgatttttagactgatgtaatgttgaaaaaagccctctatctatggcattttataaaaatacaacaaatataaaaatactatcagtaatcctgcctagattactggcttgtgaggactcttccttttctgggattctttgaacctttagtttcttttctttctttctttctttttttttttaagtctccctctgtcacccaggttggcaccatctcggctcactgcaacctcttcctcccaggttcaagcgattctcccacctcagcctctcaagtagctggcattacaggtgcttgccaagacgcccggctaattttggtaatttttgtagaaacagggttttactatgttggccaggctggtcttgaactcctgacctcaagtgatcagcccgcctcggcctcccaaagtgctgggattagagacatgcgccattgtgcctgacctgaacctttagtttctaacagaaaaagcaaaaagctaattcatgaatctatctgtttgctcagttaattagacaactatttactatctattaagcaccaggcgctgtcctagtactgaggatatagccctcatggtgctgccattctagacagggacatctcatctagaatgtgtccacctagagatcattagcaaggacctgtgagagggaaggatccaacagaaagagccctgagaaagcctgtaaggatagttactgtttttaaaataatgagttctttttgcttatgggctcctgttgtttattggtccatttcaaagaagagtgtgctaagtccaagtatttgataaacaaagaatttaggtatgtaaggagttttccaaaatatccttcttaagaatttattttatttatttattttttttgagacagtcttgctctgttgccccaggctggagtgcagtggtgcgatcttggctcactgcaacctccgcctacctggttcaagcaattctccctgcctcagcctctcaagtagctgggattacaggcacctgttaccatgcccgactaatttttttttttttttttgagacggagtctcactttgttgcccaggctggagtgcagtggcgcaatcttggttcactgcaagctccgcctcccaggttcaagccattcttctgcttcagcctcctgagtagctgggattacaggcgcccgccaccatgcccagctaattttttgtatttttagtagaaatggtgtttcaccgtgttagccaggatggtctggatctcctgaccacatgatcctcccgcctcggcctcccaaagtgctgggattacaggcgtgagccaccacacctggcctaatttttgtatttttagtagagacggggtttcaccatgttggccaggctggtcttgaactcctgacctcaggtgatctgcccgcctcggcctcccaaagtgctgggattacagacgtgagtcactgtgcctggcttcaaaatatacatgtttaaaaatcacttttagaaggaacagcaatggttgccaaaaagtccagtgggggagtagggcaggaacacattgtttcactctccgtttcttcttctgatccttaaaaatgactttgccctttactaaaaacaagccatcttctttctcctgctacactgagttcacaattttcaggaggtttttatgaccagaaaatgtattcctagcttcacaaaggtttctactgctactctaacactgctttgctgccaaggtctgcagcaatgccattgccaccacgtggtactcgtgagtagttacatcactgatcaaaccctagccaaagtcttgcctcagtcaacctggaatgaaagcacatagatatctgaccaaaatgcttcacaggctgtattagtcactactgtcacaaccatcacatctaacctctacgtggccattacataaatcagaaaaagtagtggggtaattattaatagataactttcctttgggtttcccaaaggaattattttttataacttagacaaattccccagcaggtaagtggccaaatacattagggagaataaaaccaataggtttctaagacttcttgattctaattctgaagtgctccttcaattagctctagccttctacttctactatgctgctctgatctctacttttaatacagctacattactgtagaagttccctaaaagccttgtttatcatgtctttttcttccataaagacccttagtgctccatcctggccatcacagtgaaacactggctgaggcagaagaatcacttgaacccaggtggcggaagtgcagtgagctgagatcgtgccacggcactccagcctgggcaacagagcaaaactctgtctcaaaaaaaaaaagaaaagaaaaaaacccttagtggtataccactgctgatttatactttttgaacactatataattgttagtcattactgccattaggataaaattcctcaacatagcattcaaaaggccctttataccctggtattatctctcatttctcccaacacccctcacacaagttgttttcctataacacatgacaactttacgtttcctgggaattccatgactctgtacctttaccttacttgctgccactcctctttttccacttggaaaaattctcatctttcaaggcctagtttgaatgtctccttaagtccccaccaggaggagttgtgaaatatgagaagtaagggcaagtgggcagaatgtggctaattctaataagactcctgaaatgtgcagcagagcagccggaactggtctggagggaagcagagtgtatatctgacccttgtttgttcacattcattacatataaatatatatataaaaccttcccataaaacatgtgtatttaatgagttaaaactatttctaatgttcctactactacataataagcctaatccagatacaagctgaagtcttagcacaaatagtggctttatcatgctagttttgtcgacatgttgtgaatattttcaaatatacagaaaacttgaagcaactttgcaatgagtgtttatatatctactacttagaatctataattaacatttcctatatttattttatcacatacatacacacacacacacacacacacacacacacacacacacagaagtccccaccaataatccatctcctatcgggaacagatgatctctcactacttgatttacattgctaatgcattagtatacccaaatggaacacatgaccttgataggaggaagcttcccttaatcatatttgtctccctaatgcctagcagacagtaagcactcagcaagtgtttattaatgagaagataaattaataaataagtatagttaatcagtcttctgtaaaaacaaacaaaaacccagatatcaatgataccaaattaggaattctctatcatctatatactttttctcggttcagtacaaaaagggaaaaaaaaatcccacttcaatagtttttcctgcctgtgctactttagacgtaagacagcctgaaatctgacttcaacggttttgggtagatgcttagtaaaaacacgttgcaaaatgaatcctgaacaaatagacacatctctgggaataagattagaaatacagaaaaacaaggacattgtatattgaatgtcaaatataatacagtatggctaaggcagatgtaatcagaaattgcaaccttaaactttaaaacacaatggacagaattagatgatgggtatattgacagagtcccaaacccacattcaaaaaggatcataggaattgcaaagagagaaaaggcctcctaaatcttttcatcaatttagttgccatggcaatcctgaagaagtggagaatactggtgacagctcagatacagagtggggagtcatctcaaaggtttcttgacaactccaaggggcttcaggtctagagggatttgctctgtacagagaatgggcagtagaagataagccttctctaattgtagttctcatagcaatgcaagatttagattttaaaactggatatcacccagtgttggcaaggtacaggaaaatgggaactatcatataccacaggggctggaagagcataaactggtttaatctttctaaaaaacaatttagtaacatgtatcaaacaccaaaatcctagtcccagtaatttagactaaggaaataatcagggatgtaggcaaatatttagctatcaggatgccactatagtgatgtacataatagcaaactgtgcctcttaccctgaaacctccaacattcagcaataggtcaaataaatcatgatacactggaaagatagaatcccatatagtaattaaaaatgaagtcacttaagaattttaacgacccaggctgagtgcggtggctcacgcctgtaaccccagcactttgggaggccgaggtgggtggatcacttgaggccaggagtttgagaccagcctggtcaacatggagaaaccctgtctctactaaaaatacaaagttagctgggcatggtggcacatgcctgtaatcccagctactcgggaggctgaggcaggagaatcgcatgaacccgggaggcagaggatgcggtgagccaaggtcacaccactgcactccagcctgggcaacaagagtgaaactccatctcagaaaaaaaaaaaaaaaaagaaaaaagaattttaatgatccagtaaaagctagattataatgcacagaattatctggatttcttgtttttgagacagggtctcaccatatcacccaggatggagtgcagtggcaccatcatggctcaccacggcctcaacttgctgggatcaagcaatcctaccccagccactcaagtagctgagactacaggtgtgcaccactaagcctcactaatttttttttttttcccagacaggggttgcccagaacagagtgcagtagcgtgatcacaactcactgcagccttgacctccggggctcaggcaatcttcctgcctcaccctcccaaagtgctgggattacaggtgtaagccactgtgcctagcttcctggatatattttaaagataaagtatatacaagcacccctgtgcacacacaggaatactaaaagaatatacaccaataaattgctaaccatttctggataacacaaattacaattaacttatcattttaatcattttaagtgtacagttcagtggcattattttcacactgttgtgttaccattgccactatctatctccagaactttttcatcatcccaaactgaaatctgcactcatcaaacagtaactccccatttccccctccccaagtccctagtaaccactattctaccttccatcctatgaatttatcttttttttttttttaactgctccttgtggagcaaggcttatctataggcaatgtacccagagtaaccaaatgtaactattctaggtatctcatataagtggaagcatataacatgtgtcctttggtgtccggtttatttcagttaacacaatgtcttcaaggttcgtccatggatgatttttgtttatctgtattttctaagttttctatgatgcacatatataactttataagaatatcaggcttttctcaacttcatctaatctgacttcagaaagttcataaaaaaacatcattcacttactagcagctaaaagggtatttaagatttaggtgggaaaaagaagccacagcaggatgaatcgagggggtctgaacagcttcattttaagaatgtgcctacggcaggtcagagaacataagcaaactgtctaagatcacatagcccagtacagaactctcaccaatattattgccagcaactgctgtgtgtgtattctgcatagaaccctgtgctgggaatacaaagaaccaacctaattattagaagttgtcaatttagtgggagataaataaatgaaaaaaataaactgagatgagcctgaatttttgcatgagaacttggaaaattttggtgccacttctacaaataaaaattaggaggccaggcctggtggctcacgcctgtaatctcagcactttgggaggctgagacgggtggattatttgaggtcaggagttcgagacgagcctggccaacatggtgaaaccctctctctactaaaaaaatacaaaaaaatgagctgggtgtggtggcagtcacctgtaatcccagctacttagaaggctgaagcacgaaaatcacttgatcctgaacctgggagctgaaggttgcagtgagccaaaattgtgccactgcattccagcctgggtgacagagcaaaactccatctcaaaaaaaaaaattaggagaaagagcctggttctatgatgaagatgatattcatttttagacgttgtgatacagaatgttttttctagactattctgcctttagtacataaacatttcatattacattatcaaatggtcatatatatggtaaagcttttatttatttcataggtgaccaaattattggccttgaccattaggtccagaaagtaaaattgtgtactttctttttttttttttttgagatggagtttcactcttgttgcccaggctggagagcagcagcatgatctcagctcactgcaacctccgcctcctgggttcaagtgattctcctgctttagcctcccatctttcttttttttaaagaaaaaagatgatttatgagcaattaaaaaaaaaataggccaggcgtggttgcacacacctgtaatcccagcattttgggaggctgaggtgggatcacttgagcccaggattttgagaccagcctgggcaacatagtgagatgttgtctctagtaaaaacttaaaaattagctggaggtgttggtgggcgcctgtggtcccagctactcgggaagctgaggtaggaggatcgcttgagcccaggaagtcaaagctacagtgaaccatgactgcactactccattccagcctgggtaacagagtaagagaccctgtgtcaaagaaaccaaaaagaaaaaaataactagattttaaaagggaaaaaaaaaaagaagaagagaaagaagtatccacaaaacagtgaaaggctagatggtctctattaggaagagaaccctatagtctccaacttggtaccaagaataaacaccaaaattgcgattgctggcaataatattggtgagagttctgtacctggctgtgtggccttaggcagtttgcttaccttctctgacctgcagtaggcatattcttaaaatggagctatgcagagtcccttgaatcatcctgctgtggctcctttttctcacctctcttgatacagtaagtgccgtcatgtttttgctataggggaaatgatgtgtttttgtttgtttgtttttgagatggagtctcactttgtcacccaggctggagtgcagtggtacaatcccagctcagtgcaacctccgcctcccaggttcaggcgattctcctgtctcagcctccagaatagctgggattacaaggcattggccaccacgcccagctaatttttgtatttttagtagatgtggggtttcaccatgttggccaggctggtctcaaacttctgacctgaggtgatccacccaccttggcctcccaaagtgctgggattagcaaatgggtttcgaaggtttagcttattcattaaaatcagtatttagtatgctacaatgagctaggcagtgtatgtgtaggctgtgtgtgcgcgtgtgcgtgtgtgtgaaataaaaggtagtatgagttccatcaaggtgcttacagtctaatttaaggagacaatgaaccacaaacaattgtgccattaattcaaagagatgatgtcagcaaacctaagaatgtgggatacatactactgaatgcaaaggacaccacacacacgcatgtgcacacacacacacgctttttacctgagtggttaaaatgtcactctgagaggatagccctgagcagtcttcagagacgcttgtttcactctcacacccagatgctgcttcaccttaaataacaaaaacagaggttcagatgtaaaagcagactataaacgctgcaacttgctgtgtctttttcttctcattggcaggactggatttactttcatgtcacacaaaatgattaaattccttgctttgggacacctggatttgcttttataaaatgaaaccagaagtaagtccaccagtaattaggatgttaaagctcattcagtcaaagatgacgtcctagctgtgtgaaggacttttttctatgaaaagcaccttaggaggaacatgtttcaagtttaagaagcagttcctttaactatacttggaaatttgtaaaatgtgctccccaaaagcataaacatttagctcacttctataaatagactggggcaaacacaaaaacctggttccaatacctaagtttgaatccatgctttgctcttcttgattattttcttccaagcccgttcctctttcttcatcatctgaaaccaattccttgtcactcagaccaactccctggctttcagactgatgcctcatttgtttggaagaaccaatcaagaaaggatcctgggtgtttgtatttgcagtcaagtcttccaattcactgcactgtgaagaaaacaagctagcagaacattttgtttcctcactaaggtgatgttcctgagatgcctttgccaatattacctggttactgcagtcatttaagctattcttcaatgataataaattctcctctgtgttcttagacagacactcggtagcaacggtgctatgcctagtagactgagaaggtatattgtttactttaccaaataacaagtgttggaagcagggaagctcttcatcctcactagataagttctcttctgaggactctaatttcttggcccctcttcggtaaccctgagccaaatgtgtatgggtgaaagggctaggactcctgctaagctctcctttctggacgcttttgctaaaaacagcagaactttccttaatgtcattttcagcaaaactagtatcttcctttatttcaccatcatctaacaggtcatcaggtgtctcagaacaaacctgagatgcatgactacttcccataggctgttctaagttatctgaaatcagatatggagagaaatctgtattaacagtctgaactacttcttcatattcttgcttttttatttcaggatgcttacaattacttccaggaagactttgtttatagacctcaggttgcaaaacccctaatctaagcatagcattcaattttggccctctgtttctacctagttctgcttgaatgttttcatcactggaacctatttcattaatactggagcccacttcattagtactggaacctacttcattaatattgcttgagctggcttctttaaaaacattttctctaatgttattacggctaattgtgctcactgtacttggaatgttctcatttcccatttctctttcaggtgacattgaatgttcctcaaagttttcctctagcagatttttcttacatttagttttaacaaatgacttgatgggaaaaagtggtggtatacgatatgggttttgtaaaagtccatgtttatttggagtaatgagtccagtttcgttgcctctgaactgagatgatagacaaaacctagagcctcctttgatactacatttggcattatcaactggcttatctttctgaccaaccacaggaaagcctgcagtgatattaactgtctgtacaggcttgatattagactcattctttccttgattttcttccttttgttcacattcaaaagtgacttttggactttgtttctttaaggacccagagtgggcagagaatgttgcacattcctcttctgcatttcctggatttgaaaacggagcaaatgactggcgctttgaaaccttgaatgtattctgcaaatactgagcatcaagttcactttcttccatttctatgcttgtttcccgactgtggttaacttcatgtcccaatggatacttaaagccttctgtgtcatttctattatctttggaacaaccatgaattagtcccttggggttttcaaatgctgcacactgactcacacatttatttggttctgtttttgccttccctagagtgctaacttccagtaacgagatactttcctgagtgccataatcagtaccaggtaccaatgaaatactgctactctctacagatctttcagtttgcaaaaccctttctccacttaacatgagatctttggggtcttcagcattattagacactttaactgtttctagtttctcttctttttcttctcttggaaggctaggattgacaaattctttaagttcactggtatttgaacacttagtaaaagaaccaggtgcatttgttaacttcagctctgggaaagtatcgctgtcatgtcttttacttgtctgttcatttggcttgttactcttcttggctccagttgcaggttctttaccttccatgagttgtaggtttctgctgtgcctgactggcatttggttgtacttttttttctttatctcttcactgctagaacaactatcaatttgcaattcagtacaattaggtgggcttagatttctactgactactagttcaagcgcatgaatatgcctggtagaagacttcctcctcagcctattctttttaggtgcttttgaattgtggatatttaattcgagttccatattgcttatactgctgcttataggttcagctttcgttttgaaagcagattctttttcgagtgattctattgggttaggatttttctcattctgaatagaatcaccttttgttttattctcatgaccactattagtaatattcatcacttgaccattctgctccgtttggttagttccctgatttatcatttcaggagtcttttgaactgccaaatctgctttcttgataaaatcctcaggatgaaggcctgatgtaggtctccttttacgctttaatttatttgtgaggggacgctcttgtattatctgtggctcagtaacaaatgctcctataattagattttcagttacatggcttaagttggggaggcttgccttcttccgataggttttcccaaatattttgtcttcaatattactctctactgatttggagtgaactctttcacttttacatattaaagcctcatgaggatcactggccagtaagtctattttctctgaagaaccagaatattcatctacctcatttagaacgtccaatacatcagctactttggcatttgattcagactccccatcatgtgagtcatcagaacctaacagttcatcacttctggaaaaccactcattaactttctgaatgctgctatttagtgttatccaaggaacatcttcagtatctctaggattctctgagcatggcagtttctgcttattccattcttttctctcacacaggggatcagcattcagatctacctttttttctgtgctgggagtccgcctatcattacatgtttccttacttccagcccatctgttatgttggctccttgctaagccaggctgtttgcttttattacagaattcagccttttctacattcattctgtctttagtgagtaataaactgctgttctcatgctgtaatgagctggcatgagtatttgtgccacatggctccacatgcaagtttgaaacagaactaccctgatacttttctggatgcctctcagctgcacgcttctcagtggtgttcaaatcattattactgggttgatgatgttcagtatttgttacatccgtctcagaaaattcacaagcagctgaaaatatacaaaaataacaaggtactcaaaaactgaattgtcattaaaaaaatacatacttcatacaccttggaggtggaaatcaaccaactggctatattagagaaactaacctcataaactaccaagtatactgaagatgtagctcatactctttcatttaattcctatttacctagattatttccacttaggatccattaaatttttaatttcagaattttccctatgcagaaaccacacctatttctctaacgtctaagagtgaattaaaagcagattggccatcagaaaactggttctgatgtactctaaagattactggccattaagtctacttaatactctgttctatctacagacttaccactccctatatttaaaaaccagtaggtaaaagatgaaacacaaatacaccaattaaaagtaaagggcaggccaggcacagtggctcaagcctgtaactgcagcactttgggaggctgaagtgggcagactgcttgagtccaggagtttgagaccagcctcggtaacatggtgaaaccccatctctataaaaccacaaaaaattaaccgggtgtggtggcatgcgcctgtagtcccagctactcaggaggctgaagtgggaggatagcttgagccttggaggtggaggttgcagtgagccaagattgcatcactgcactccagcctgggcaacagagtgagaccccatctcaaaaaaaaacaaacaaacaaacaaaaaaaaaaacgaaagggcaacaatcagttacagaaggtcttattataggtacattagtctagtaccatttaaatctatcagaccataccacgacatttgacagagaatgatactctaactctgccaagagattttgtgggttgtaaaggtcccaaatggtcttcagaataatctaattacagtactgtatctacccactctcttttcagtgcctgttaagttggcaaactttgccattacccttttttgcagaatccaaactgatttcatccctggttccttgaggggtgatttgtaacaattcttgatctcccacactatagggaaaagacagagtcctaataagaaacactagttacatgtatgcagaactgtcaaatgaccaagatcaaacattttagctctttcgattacagaaagctgaccaatcttatttagttagtgaaagctgctctctcctttagaaacttctagttgaaatgaaatggttgctgggcacggtggctcaagcctgtaattccagcactttgggaggctgaggcgggtggaccacttgaggtcatgagttcaagaccagcctggccaacatggtgaaaccccatctctactaaaaatacaaaaattagccgggtgtggtggcgcgcgcctgtagtcccagctactagagaggctgaggcaggagtatggcttcaacctgggaggcagacgttgcggagaggtgagatcacacctctgtactccagcctgggcaacagagcaagactctgtctcaaaaaaaaaaaaaaaaaagagagaaagaaagaaatggaatggtcaattaaccgggcgtggtggtgtatacctgtagtcccagctactcgtgagattgagacaggagaatcgcttgaaccagggagttggagattgcagtgagccgagatggcgccactacactccatcctggcaacagggcaagaccccgtctccaaaaaaaaaaaaaaaaaaacctgggtcaagcaataattcctaaggaaggtaggtaacatagttggggttgcttgtagtttattatataacatacagacaaagcttgagagatatgtggaaataaggaacagaggaaagaaagagttgaaaatgaagtccttgaacattttcatcagtcacaattactgctgtgtcaatattactgtatatgaggaacttagagaacaatctgctagaagcaagcatgtgcagagttctactgttatcctaaattcctttggacagtgctaataactaaatccaacaaacaaaaagggtatttcctccactataaaatgagagaactaaactagatgatctctaaggtttcttccaataccatgattctagtctggagaaacaccagcctacttgagggaggaaggtgggaagagggagaaattcagaaagaaagcaaacaaaaaactgtggggtatgcttagtacccggatgatgaaaaaaatctatacaccaaatcccaagtcgtgtgtttacctatataacaaactgcacatacatccctgaacctaaaataaaagttaaaatatttttaaaaagagagaaacatcaatccttaatattaactaaataggaaaataccagcttcatagacaaaggttctctttgactcacctgcaataagttgccttattaacggtatcttcagaagaatcagatcctaaaaaatttccccccaaaaaataaatcaataaaagttttcttaattaaaagggttaaaaaaatgtacttgttgaaaaacagatattcaactagaaatatttactgagcatctactgtggcaggtacaatgctagttaagctagtatgtaatacagagaagtggttaaaggcatgggcttcgccaggcacagtggctctcacctgtaatcccagcacttgaggaggccgagatgggtggattatttgaggttaggagttcaagaccagcctggccaacaaagtgagacccccgtttctactgaaaacaaaaacaaaaacaaaaaaaaagcacaggctctgacatctaacttcctaggtttgaatcatggctcagccacttactaggtttaataccttggaaaaatttcataacttctctgtgccttaattttctcatctgtaaaataagtataataggaacaatctcagaggtctgacaagcatctaatgagttatacaagaaaagcacaatagtgcctggaatatagttaagtgctcctaaatatcaactactataactatttttacaatgcctgttgtctaggaatttatgatcataaggggggaaaacagtaagtgttatgataaatagatggtggtgcctgggagctcaaaagatggctatcctttttaattataaatatattctaaaagaaaatccaatttgagagcccagtttgaattctgagctcagcagctcttttttttttttttttggaggtcttgctctgtcacccaggttggagtgcagtggcatgatcatagctcactacagcctcaaactcctgggttcaatgtatccactcacctctgcctcctgagtagctgggactacagatgcacaccaccacacccagctaatttaaaaaagaaatttttttgtagagatgaggtcttgctatgttgcccaggctggtctcaaactcctggcttcaagcaatcctctgccactgctgagattacagatgtgagctactatgctggcctcaacttttctttttataagcttaaaaaaatttattatttttaaaaattattatttttttgagatgcagtctcactctattgcccaggctggagtgcagtggtgtagtgttggctcattgtaacctccgcctccctggttcaagcgattctcctgcctcagcctcccaagtagctgggattacaagcatgtgctaccacacccagctaatttttttttttttttgtatttttagtaaagaggggtttcaccaggttatccaggctggtctcgaactctgacctcaggtgatctacctgcctcagcctcccaaagtattgggattacaggcatgagccaccgcaccggccaaaaatgtattattattttaaaaatagagacagggttcccctatgttggccaggctggtcttaaactcgtggactcaaccaatccttctgcctcggtcttccaaagcgttaggattacaggcacgagccatcctgcccagccaagattcagctctttttttttttttttgagatggagtttcactcttgttgcctaggctggagtgcaatggtgcgatcttggctcactgcaacctctgcttcctgggttcaagcgattctcctgcctcagcctcctgagtagctgggattacaggcataagccaccaccccggctaatttttttttttttttttttagtagagatggggtttctccatgttggtcaggctggtcttgaactcccgacctcaggtgatccgcccacctcggcctcccaaagtgctgggattacaggcgtgagccactgcgcctggcaattcagctcttcttaaaaggcttcctcatctagtacaatttatcttggaactaaatactgtagcaatccatcatgttttttcttattgctactctccatctttccaaaacatatttacacatatttaaaaccagatattctttcttttgctctcttttttttttttagatggagtttcgctatttttgcccaggctggagtgcaatggtgcgatctcggttcaccgcaacctccacctcccgggttcaagtgattctcctgcctcagcctcccgagtagctgggattacagttatgtgccaccacacctggctaattttttattttttggtacagacagagtttctccatgttggctaggctggtctcgaactcccgacctcaggtgatccacccactttggcctcccaaagtgctgggattacaggtgtgagccaccatgcctggcctcttttgctccctttttaaagtaagattcttcaaggtgggaactgcgtcttttacattttttataactcaccatagggctcataaaattcacttcccaaagctgcctaccacaaatacaaattatgaccaagatttttggcaaaactataagataaggaatccagcaattattattaaatacttaaaaaacctgagacccttacccaattcaatgtagacagacgtcttttgaggttgtatccgctgctttgtcctcagagttctcacagttccaaggttagagagttggacactgagactggtttcctgctaaacagtatggtaaagaacagtcaagcaattgttggccagttctgtgcttttcctcctgaagagaaacttgacaccatggacaaaataaattgaccatcatcagtcagctaacatgtatgatgcctggaaaaaatgcccaggaatttacacactaaaatgtctggggctgggagcggtagctcatgcctataatcccagcactttgggaggctggagcaggactgcttgaggccaggagttcaagaccagcataagcaacagagtgagacccagtctctacaaaataatagtagtagtaataataaaatgtgtgggatatgtgtgatttgaatttttttttctgttgtcttaaatttttcaaacctgattatgtattatttgtgtaatttttgaagtattaatatagcatattttgaagctgatacttgatatacattccaatcacatctgataacttttttttttgttttggggggtgtacagagtcctgctctgtcacccaggctggagtgcagtggcgcaatctcagctcactgcaacctccgcctcctaagttcaagagattctcctgcctcagcctcctgagtagctgggtctacaagcgtgtgcaactatgcctggctaatttgtgtgtgtgtgtgtatatatatatacatatatatgtgtgtgtgtgtgtatatatatatataacatatatataacatatatatattatatatatataacatatatataacatatatatatgttatatatatataacatatatataacatatatatatatatatatataatatatatatatatatatatatatgtaatcccagcactttgggatatatgtgtatatatgttttttttttttgagacagaatcttgctctgttgccaggctagagtgcagtggcgtgatctcggcacactgcaacctccacctccctggttcagttgattctcctgcctcagcctcccgagtagctgggactacaggcgtacaccaccacgcctagttaatttttgtatttttagtagagacaggtttcgccatgttggccaggctggtctcacactcctgacctcaggtgatctgcctgcctcggcctcccaaagtgctgggattacagccatgagccaccgtgcctggccaataacatttttaaaaaggataaatgatgacaataaaaccccagcactcctaagaacatttagtataggaacgagtatttaaaagcccaacattactttttttttccttcctttttagctctatatcttttgaaaaatgaatgctggtactgtgagaactacttttattttatttgtatttttttagacagagtcttgttctgttgcccaggctggagcgtggtggcgtgatctcggttcactgcaacctctgtctcctgggttcaagtgatcctcccacctcagcctcccaaggagctgggactacatgcgcacgccaccatgcctggctaatttttgtattttttgtagcgatggggtttcaccacattgcctaggctggtcttgaactctaggactcgagatccacccgccttggcctcccaaagtgctgggattacaggcaagagccactgcgcccagctagaacaattacttttttttcttttttgagacagagtctcactctacggcccaggctggagtgcagtggcgcgatcttggctcgctgcaacctccgcgtcctaggttcaagcaattcttgtgcctccgcctcccgagtagctgggattacaggtacgtgccaccacacccagctaatttttgtatttttagtagagatgggtttcaccatgttggccaggctggtctcaaactcctgacctcaaattatctgcctgcctcagcctcccgaagtgctgggattacaggtgcaagctactacgcccagccccagaatgattactttttaagatctccatcattcatgcacatataagtaacaacagagcaaatcactacattttctttaacaattacaccttttaagttcaagtaattttccctttttttaaaagatagggtctcagtcacctgcgctggagtccagtggcacagtcatagctcaactgcagccttgactctctatgttaaagcaatgctccagcctcagcctcccaagtagctaggaccacaggtgcataccaccacgcccagctaagtttttttgttttttttttgagacagagtctcactctgtcgcccaggctggatcgcagtggcgggatctcggctcactgcaagctccacctcccgggttcatgctattctcctgcctcagcctcccgagtagctgggactacaggagtccgccatcacgctcagctaatttttctgtgtttttagtagagacgggctttcaccatgtgagccaggatagtcttgatctccacacctcgtgatccacttgactcggcctcccaaagtgctgggattacaggcgtgaagcttttttttttttttttttgagacggagtctcgctctgtcgccaggctggagtgcagtggcgcaatctcggctcactgcaacctccgactctcaggttcaagtgattctccatcctcagcctctggagtagctgggattacaggcacgtgccaccacacccagctaatttttgtatttttagtagagaccgggtttcaccatgttggccagggtggtctcaatctcctgacctcatgatccactggcctcagcctcccaaggtgctgggattgcaggtgttagccgccgcacccagccagttctttttttttttgcaactagatcttgctttgccgcccacgctgaagtgcagtggagtgatcatagctcactgtagtctacatctcctggactcaagtgatccttctgtctcagcttcccaagtagctgggactacaggcacacaccaccatgcccagataatttaaaaaaacttttaatatagacaaggacttgctatgttgcccaaactggtcttgaactcctgagctcaggcaatcctcaagcctcctagtgctggaattacaggcgtgagccacggcacccagctacttttttttttttttaattgcagagacagtgtctcactgtgttgcccaagctgggctcaaaggacctcctacctcagcctcccaaagggttgggattataggcatgagccatggcacccagctgaagtaatttccaaatgcttaaaaatatcagtgaccttatggctattttagataagcatcacagagcagataaagctccaaagcaaggaagggcctataagagctctcttttttggccgggcttggtggctcacgcctgtaatcccagcactctgggaggccaaggagggtggatcacctgaggtcaggagttcgagaccagcctgaccaatatggtgaaaccccgactctactaaaattacaaaaattagccaggtctggtgtcgtacccctgtagtcccaactactcaggaggctgaggcaggagaatcacttgaacctgggaggcggaggttgcagtgagctgacatcgtgtcactgcgctccagcctgggcgacagagcgagactctgtctcaaaaaaaaaaaaaaaaaagaaatctgtctttttggtgtatctgatggggatcttgctatgttgcctgggctggtctcaaacctggactcaagtgatcctcccatttcagcctcctaagtagctgggattataggtacattcacctcacctggctgtaaggtctctctcttgattatatcaggtaccctgaccttctctgaactctaactgattagaacacttgtctaaccacttaatataccatctttccttcttcactaactttttatataaatctatgagcatctagcacattcactaacatattcacaatgctcaataaagagatgttgccagaataaatgaaaatggttttaccggccgggcacagtggctcacacctgtaatcccagcaatttggggagccgaggtgggtggatcacctgaggttaggagttcgagaccagcctggccaacatgatgaaaccccgtctctactaaaaatacaaaaattagcctggcatggtggcgcgtgcctgtaatcccagctactaagggggctaaggcaggaggactgcttctagcctgggccacagagcaagactccatctcaaaaaaaaaaaagaaaaaaaaaagaaaagaagaagaagaagaagaagaaaacaaatggttttaccaaggaaggattttcgggttcactctgtagaagtcttttggcacggtttctgtagcccatactttggatgatagaaacttcatcttttagatgttcaggagagttattttccttttttgcaaaattatagctgtttgcatctgtaaaatacaagggaaaacattatgtttgcagttagagaaaaatgtatgaattataatcaaagaaaccaagagaaaccctatgtatgctctttgttgtgttaagacaatgcattaaggttacctgtgattttttttaaaaatcaaattttaaaaaatcaactggaaattttactcctaggaaacaaaaacaaatacacagaccatcaaagttatttagagtccttgttttctaccttaacactaagaaatttgcctatcaatactgtatttcactaaagctaagacaccaacaatgtaagttgcactattattttctgtatcactaagaaagaaagcacacaaattaaacaaatgacacaccctcaatagtaaaatgttcccaatttcagagatgttaagatgtgaaaaatgtgcaccttacgattgataaaataaggtgtgagaccagtgggagtaattttttaaaaatagattacagatacagaactaaaattaacctagactaaaaggtcttatcaccacgtcatagaaagtaattgtgcaaacttcctgagttttcatggacagcacttgagtgtcattcttgggatattcaacacttacactccaaacctgtgtcaagctgaaaagcacaaatgattttcaatagctcttcaacaagttgactaaatctcgtactttcttgtaggctcctgaaattaaattgtttgagaaacacactcagcaagtgattatcaaccttttaaggacactaaaataagaaaagacatgtaaacaaataaaaataagatgcagcaacagtagaaaacctctataatcaatacatcattgacatctgtataaaccgtgtgatggcagtgatttagtaactttttgtcattcatttaagcctaccaaatgcctaaaattatctgatataatactgccctaaatccacagcagatataatgcattgcatagaaaactagagtacttttttttttgtttaatttagagacagggtcttgctctattgcccaggctagcatgcagtgccacaatcatagctcactgcagcctcagacttctgtactcaagctatcctcccactatagcctcccaagtagctaggactatgggcatatgccaccatgtacatttatttatttattttgttggtagtgatggggtctcactatgttgcccaggctgatttcaaactcctggcctcaagcaatcatcccacctcagcctcctagagtgctagggttataggcatgagcaatcacaccctgctgagcttactgttcttaacatctgaaccctgcccaatccctcacttagttctgcctctcaaggatttctgtcaaattatgattatacttctttgaaaacacatagataacaatgtccaaagggagatttgggtttagtaaagtggaattaaagcacaattcattcattcctttaagcatctgagtgcctactatgtaccaaacttaggaaaaacagtgttgagacagacaaaattactactctcatagaatttacattgtagcagaagagatacacaatatataaatacattgtgtttgtgtaaataattagatagaaataaacacacacctgtgaaccccagcactttgggaggccgaggtgggcagatcacctgagctcaggagttaccagcctgggcaacatggtaaaacctcatctctacaaaaaatacaaaaattggccgggcatggtagcgtgtgcctgtagtcccagctatttgggaggctaaggcaggaagaggctgggagacagaggctacagtgagccgagatcacgccactgcactccagcctcagtgacagagcaggaccctgtcttaaaaaaaaaaaaaaaaagaaaaggaaacacaatcaaaaatataaaaacaagattaacagacaatgggggcacggcgatacagccctactttacataagtctgcaagtttttacactagaagcattagagaaaggcagtaagtttctaatacctgtataaggcagatgtcccataaaactttcaggaaaataactttggaaataatttactgtgtgctaaaaactcttttataaatttttctgatgaatggttttataggaacgctatgttattaaataatttctactttttcctactgtggttgcttccaacctagcatcattaccaaattatataccttttggttatatcattcttacataaaggacactgtgaaggccctttcttctggttgagaagtttcagcatgcaaaatctataaattataaagaaagaaagaacaatttaatttacttccttttgtagaaagaatactcaaaaggcaaatagccatgaaaagataatctcacaactgcccttaagagccatttaaaaagtaatggcaggtgaattacaagcaatagtttcctaattgtttttggatgctgcataagcaaaaacctaaactacataagcaatgatctatgaaaactgaacttacatgcatatggcttactgttatgatcacataaaacttaataaaagttaatatggcatatttaatgatatattcataattatttcatgctgcataatcaaatataaacggtaagtagttcatgtaagatgcttataattagtttaaaatctcaacacctcaccacaaagctatagtaatcaagaaagtgtggtaatagcataagaatagacacatacatcaataaaatggaattgacagtacagaaataaactcatacatacatctgtgatcaagcgattttcaacaataataaataccaagacaattttttttttttttttttttgagacggagtctcgctctgtctcccaggctggagtgcagtggcacgatctcggctcactgcaagctccacctcctgggttcacgccattctcctgcctcagcctcccgagcagctgggactacaggcgcccagcaccatgcccggctaatttttttatttttagtagagacggggtttcaccatgttagccaggatggtctccatctcctgacctcgtgatctgcccgcctctgcctcccaaagtgctgggattacaggtgtgagccaccatgcctggccgacgatttttattttcttaattttttttttttttttttgagacagactcactctatcacccaggctggagggtagtgacacaatctcagctcactacaacctccacctcctaggctcaagcaattctcgtgcctcagcctcccgagtagctgggattacagacatgcaccaccatacccagctaattttttgtatttttagtttcaccatgttggctagtcttgaactcctggcctcaaattgatccatctgccttggccttccagagtgctgggattacaggcatgagccaccgtgcccaggccaaagatgattaaatgggaaaataatactttttgtgtttttaacaaacagtgttgagacaaaagtataaccacatgtaaaagaatgaaattatactcctatctcacaccaaataacaaaagttaactcaaagtggatcatagaccagaagtagagagagcaatggtgatgataattaaaagcagcgattcactcatacaaccaatatttactatgtctagtactattctagatggaggggattcaatagaaaagcaaaataagatcctgcaaaataaaacataaaggacataatatactggtgaagggggtgactaggtagggagtaaatagcagacactgacaatgaagagacccaggaaagaaaagattaaggggctaaaaaaaaagtcactagggctgtgcacggtggtccacacctgtaatcccagcacttgcggggtgggtgaatcacttgaggccaggagttcaagaccagcctggccaacatggtgaaaccctgtctctactaaatattcaaaaattagctgggtgtggtggtggtgcactgtagtcccagttactcgggaggctgaggcatgagaataagttgaacctgtgaggcgggggttacagtgagccaatattgcaccattgcattccagcctgggcaacagagtgagattgtgccaaaaaaaaaaaaaaggcattgggaattgtgagaaaagacacttagagaatattttttactagccaggtaatttaacatttattaccctctcttggccgggtgcagtggctcatgtctgcaatcccaggaggctgaggcaggcagatcacttgaggcctggagtttgagaccagcctggctaacatggtgaaaccctgtctctactaaaaatacaacaaaattagccaggcgtggtgggcacacgcctgagtcccagctacttgggaggctgaggcatgagaatcactggaacccaggatggcagaggttgcaatgagctgagaagagtgccactgcactccaccctgggcaacagaggaagactctgtctcaaaaaaaaaaaaaaaaaaaaaaaaaaggccaggagcggtggctcacgcctgtaatcccaacactttgggagaggtcaggagttcaagaccagcctgaccaacacggagaaaccctgtctctactaaaaatacaaaaattagccgggcatggtggcatatgcctgtaatcctggctactcaggaggctgaggcaggagaatctcttgaacccgggaggcggaggttgcagtaaactgagatcgcgccattgcactccagcctgggcaacaagagcgaaactccatctcaaaaacaaaacaaaacaaaacaaaaaaaccccaactatatctatatctctatctatctacctacctatctatctgtctacagtcttgaactcccgacctcaagtgatcgcctgcttcagcctcccaaagtgctgggattacaggtgtgagccattgcgctgggctactttctatctttatttttgtacagatgtggtttcactatattgcccagtctggtctcgaactcctgacctcaagtgatcctcctgccttggcatcccaacgtgctgggattacaggcatgagccatcaagcctggccttatcttcatttttatagagtagaggcttgtcccagatcacacagtaattaagcaatgaaggttatattggatccagaattggattgtagcaaagcccacaatcttccttttttcttttttgacatggaaactaagtctggagagaggcacccacaatcttcctaccagagaaagtgaatgtaggtaggtaaggtcaaggagacttgggtccttcttcgccgatatagatgcttcaagtaccatattgcactcaacaaaacaatgactctatagtttggaagatgaggctgtcaaaaagctacctccactgtacataagtacctttaaaactcagaatagaggctcccactccttcagaatctacaaatactacatatactctagtataatggatcaagaaggcatcaagcattactccagcaaatagtacaattgaacaattcagagcaggggtagggaggaaattcccttatgatagtactgcagaatatagtacagtagagtgacaagctaagctgtctcgtgctgtagtctatacaattatataaataattcagtggaactagatacgcaaaaatcaaccaagataaggattcgaatctttttttttttttttagacggagtctcgctctgtctctcaggctggagtgcagtggcacaatctctgctcactgcaagctctgcctcctgggttcacgccattctcctgcctcagcctcctgagtagctgggactacaggtgcccgctaccacgcctggctaactttttgtaattttagtagaggcggggtttcaccatgttagccaggatggtctcgatctcctgacctcgtgatgtgcccatctcagcctcccaaagtgctgggattacaggcgtgagccaccgcacccggcctcgaatctttctttatgctagaaaaagaatacatgtataaaggttgttaactaaacttaaaagaaaatgaacttgtatatgacttgaaaagacagagctaactaaaatactggccaggcatgatgactcacacctgtaatcctagcactttgggatgcctaggtgggcagacgggttaagcccaaagttcaagaccagcctgggaaacatggcgaaaccccgtctctacagaaaacacaaaatttagctggatatggtggtgtgcacttacagtcccagctacttgggagactgaggtgataggatcgcttgagcctaggaggtcaaggcaacagtaagcctcatgatcgcaccactgtactccagctgggacaacagagtaagaccctgtctcaaaaaaaaaaaaaaaaagtagctgttgaaaaatttaagttacatttattgctcacattctatctctttgaacaatgtggttctagatcttcaaaaaagtattacaggctgggtgcggtggctcatgcctataatcccaccattttgggaggtggaggtgggcggatcacttgaggtcagctcaagaccagcttggtcaacatggtgaaacatggtctctactaaaataaaaggctgggcgtggtggctaatgcctgtaatctcagcactttgggaggctgaggtgggcggatcacctgaggtcaggagttcgagatcagccttgtcaacatggtgaaaccctgtctctactaaaaatacaaaaattagccatgcatggtggtgcacgcctgtaatcccagctacttgggaggctgaggcaggagaatcacttgaaccagagaggcagaggctgcagtgagccgagattgtaccactgcactccagcctgggcaacagaacaagactccatctcaaaaaaaaaaaaaaaagtattacacattgcatttttttgtttggaaagttcaaactaatgcatgactgccttaagaaatattttctagattggtattattatctttttttataggcttcataaaagatttcagaactggctgggcaaggtggctcatgcctgtaatcctggcactgtgggaggccaaggcgagcagatcacctgaggtcaggagttttggaccagcctggccaacatagtgaaaccccgtctctactaaaaatacaaaaattagccaggtgtggtggcacatgcctgtagtcccagctactcgggaggctgaggcaggagatttgcttgaacccaggagatggaggtggcagtgagctgagatcatgccactgcactccagtctgggcaacacagtgagactccgtctcaaaacaaaacaaaaaaaaacagccgggcgtggtggctcacacttgtaatcccagaacttagggaggccaaggcgggcagatcacgaggtcaggagatcgagaccatcctggctaacacggtgaaaccctttctctactaaaaatacaaaaaaattagctgggcgtggtggcaggcgtctgtagtcccagctacttgggaggctgaggcaggagaatggtgtgaacccgggaggtggagcttgcagtgagccgagactgcaccaccgcactccagcctgggcgacagagcgagactccgtctcaaaacaaaacaaacaaaaacaaacaaacaaacaaacaaaaataaaaaaaagatttcagaactttaggcttgcttgggtcaataaagttgttttatttttagcaattagagtttatccgtagaaaatacaattaatacaacaaaagcatgggggtatcgctcccaggctcccagctttctcatcatatagatcaaagtgttattcagattatattgatattacagaagagatttcatgaaaaagtcgatctatcacatgggcattatactggactttttttttttttgagacggaatcttgctctgtcgcccaggctagagtacagtggcacgatctcaactcactgcagcctctgcctcctgggttcaagaggttcctctgcctcagcctcctgagtagctgggactacaggcatgtgcccccatacccagctaatttttgtatttttagtagagatggtgttaccatattggccaggctggtctcgaactcctgacctcgtgatccgcccacctcagcctcccaaagtgctgggattacaggcgtgagccaccacacccggctttggacttttaattctaatataacattcaaaacacaatttaaaatatggctggcccatctctacaagaaacttaaaaattagctgggcaaatgccatgtacctgtagtcctagctacttgaggggctgagatgagagattgcttgaacccagattgcaaggtaaaagtgaactatgatcacaccactgaactccagcctgggtgtcagagggagacactgtctcaaagaaacaaacaaaaatatatatgtgtcacacacacacatatatataacatatttatatgtatacacacacatatatctttatgactggttctttcctgactatcacaatcctgactatcacaagcttgaaaccaagcttctcactcttctccagttgccaactctaatcctctcaatctcaacagctgttttttgttgttttttttttttgagacagttttcactcttgtcgcccaggctggagtgcaatggcgcaatctcggctcactgcaacctccgcctcccaggttcaagtgattctcctgcctcagcctcccaagtaactgggattacaggcatgcgcctccacgcccgtctaattttgtatttttagtagagatggggtttctctatgttggtcaggctggtcttgagctcctgacctcaggtgatccacctgccttgggctccaaaagtgctaggattagaggcgtgagccaccgtgcccggcctcaacagctgtctttacctccaacttcactgggctcaaagcacctcagcatcttcctgtagaattactctccttttccttcattactgtttatgagtaataatcaactctttcttacatcctttttctatttccaatcccttctgcctcctcttggaccttctctttcttgcaaatggcttcccatctttgagggcttcttccttttctaacacaactcctatacacatatgcaaagttagcttatttttcctggatgtattttcttttcttttcttttttttcagacagagtctcactctgttgtcaggctggagtgcattggcatgatctcggctcagggcaacctctgcctcccaggttcaagtgatacccctgccgcagcctaccaagtagctgggactacaggtacgtgccaccatgccaggctagttttttgtgtgttttagtagagacagtgtttcgccattttggccaggatggtcttaatttcctgacctcgtgatccgcccacctcgacctcccaaagtgctggtattataggcgtgagccaccgcgcccgtcctctattttcttttatttgtacatttgctcgtattattatctctgcctataagcctataatttccttcttccacaagttctcaaagcaactatattcataacttaatctctctttttttgttaagagacagggtcagccaggcgcggtggcttacacctgtaatcccaacactttttaaggccaaggtagctgaagtcaggagtttgagagcagcctggccaacatggtgaaaaccctgtctcgactaaaaatacaaaaattagctgggtgtggtggcagatgcctgtaatcccagctactcaagaggctgaggcaggagaatcgcttgaacccaggaggtggaggttgcagtgagccgagatcacaccactgcactccagcctgggcaatagagtgaaacaccatctcaaaaaaaaaaaaagacagggtctcactctgtcatctaggctggagtgcagtggtgtgatcatagctcactacagcttcgaactcctggccttaagtgatcttcctgccttggcctcccaaagtgctggggttatgggcaggagctaccacactgggcccttgagtccctgtaataatagtatagtatgttcagcatttgttactcaagctgacaagaaaacatacagttcattccagaaagattctcatccagataaattgaaagccccagggctttaaaggttaatctttagctctctgtagtaaatactgggacttttttttttttttttgagtctccctcttgtcgcccaggctggaatgcagtggcatgatcttagctcactcagatgaaaattatggactatcttcccagaaaaatgtacatggccatagttttgaatacaatttaaatataattctaggaaattcataaagactattcataaaccccaagttaagaactctggaatttaaaaattcctcaaaggatacataagaaattgatcattgtggttgtctggggagggaacagggaggcaggggttgtagggtaagagggaagtatactttgcatcatatacctttttgtgctaataaactttttaccaagtacatagtttgtacctggtaccaggttatgtaccaggtacataaatacttaaaaacaaattagttgacatttaaggtaagatgtgagccatagcttaacataaagaaaaggagaaagcccacttgttctactaaattacctactctactttttctgaaattcttttattaagaaacaaacattttcatttcaaaagacaagatcatcaaatacgtaaatataacttgaatcactgctataaatgaattttggcctaaatagaaactggtatcaggtcctttcctgtcttcacaatgattacaaagcgggcaaacactgacccttagaagggggaatgcataaggatatgcagaaatgaacagaaaggagaaactgggaaggctcaaacacaatgtgcttatttcaaaactgcttgcagtttgctttcactgatggacacaaaaaatacaaaacactgttcaaaatgatgttacatcctaatagataatatatgtcagtcgggtgtggtggctcacgcctgtaatcccagaactttgggaggccgaggcaggtggatcacaaggtcaggagttcgagaccagcctggccaatatggtgaaaccttatctctactaaaagtacaaaaattagccaagcatggtggcgggtgcctgtagtcccagctacctgggaggctgaggtagaagaatcgcttgaactcggggggcggaggttgcagtgagccaagatcatgccactgcactccagcctgggcgacagagcgagactttgtctcaaaaaaaaaaaaaaagataatatatgtcaaaactttaccaggaactatgattacaaccaacttttgataactatatactctctgagaaagaatgaaatggagttggatttttcgttctcacttaattgaagaaagtaaagcttctataaagttaggtgtttcctgggttatgaaggacaaaaacaaaagctaataatggagccacataacacattcaaacttacttgcaaaatatgtggtcacactttgtggagacaggttccttgatcaactccagactagcagggtagggggggagaaaaagaaaataaatgaggctcaataatttatttaaaaataaagctattcttagtgaataagttcaactttgagctgttatgactgagtcaacataaggcctcaagttcgttcaatatttattaaatgtctgctgtgtcaggaactgagaatacagcagagaatacgatccttaccttcagtgagctttcagatatcaaaacagaattatattgatcccttcaatactctatactatcatcagcatttaaaagattagttgataatagttcgtacgaattcatttccagtgatatatttttctgcactatcactgtgggtgcacatctcatctttaagctccataaagacaaaattttctgcttatatttcttttgaattccttcctagaacttttttttgtttactgtaaatgcctttttaacttaatatggaaaatttcaagtatttcaaaatttcaagtaaataaaataataaaatgaactatatggaccatcaccctggtccaacaaccatcaactcatggccaagctgtttcacccatatccacccctaccccagattattttaattattattacttttaagataaggtcacactctgtcacctaggctggagtgcagtggtgcaaacatacctcactgcagccttgaactcctgggctcaagcaatcctcccagcacggggtttacaggcatgagccaacacacccaaacccaagtgtcttcttttttttgagatggggttttgcttttgtagcccagactggcatgcaatggtgcgatctcggctcactgcaacctctgcctcccaagttcaagtgattctcctgcctcagcctcccaggtagttggaactacaggcgtgcgccaccacgcccggctgatttttcgtatttttagtagagttggggtttcaccatgttggccggctggtcttgaactcctgacctcaggtgatccgcctgccttggcctcccaaagtgctgggattacaggtgtgagccaccatgcccagccccaagtgtcttctgatctataggtgtctcttactttttctcccttgtcatttatttttaaaattaggtcatttgacctgtggagtttcccccattctggattttgctgattgtataaccctatggtgaggtttaacttgttcctctagccttatttcctataaactagacttacaggcttaatcattcaggttcaactttctggcaagaacactttacagatggtactgtgtactcttattagatcacttcagaagaggcatgatgtttggtttgtgattactttgtaaaaacagtgtaataagtactcactaaaggaaatttagaaaatgataagcttaaggccgggcatggtgcctcatgcctgtaatcctagcactttgggaggctgaggtgggtggatcacctgagctcaggagttccagatcatcctggacaatatggtgaaaccctgtctacgctaaaaatacaaaaattagccgggcgtggtggcgcatgcctgtggtctcagctactttggagactaaggtagaaggatcacttgaatcctggaggtggaggttgcagagtgagccaatatcgtgccactgcactccagcctaggtgacagaggaagactctgtctcaaaaaaaagaaaataaggccagacacgggggctcatgcttgtaatcccagcacttgggaggccgaggcgggcggatcatgaggtcaggatttcgagaccagcctggccaacacagtgaaacgctgtctctactaaaaataccaaaactaactgggcatggtggcatgcgcctgtaatcccagctacttgggaggctaaggcaggagaatcgcttgaaccggggaagtgcacgttgcagtgagccaagatcgcgccactgtactccaacctgggcgacagagctggactccatctcaaaataataataagcttaaaaataaaaacttcagaaaatacatcacccaagttcccatccctacctgtctatccacaaaaccaaggcattcctgagattagttcatttattatactaatataacaagtgtttattaagtatctactactatattcaagtactattctaggagatagaaatgtagcagtttacaaaataaagcctgctctcatagagctcatattctagtgtggtagacagttgatacggaattaaagaatacatgggaataagtgcattaaagagaaaaattaagcagggtaaggggaaacaggtagttcaatatctatgtgggggtgagatgtacatggggggagtcaggaaaggtttcactgaggtgagactagaggatagcttaataatgtaaagaaacacactatgcaacaattaggggaagagcattccaagaaagagggagcagagaaggcaaaccctgagcaggaccatgcctgtgtatgcaggacatcagataggtcaaggtgctaaaatgtaataatccaggaggatattgtagggaaagactatcagagaggtagctggtaacttctggtaggaacctataggctattttaaatctttagctttattctggtctttttaattttctttttttttttcagacagagtctcgttctgtcgcccaggctggagtgcagtggcaccatctcggctctctgtaacctccgcctcctgaattcaagtgattctcctgcctcagcctcccgagtagctgggactaaaggcatgcaccaccatgccttggcctcccaaagtactgggattacaggagtgagccaccatgccagccatctttttaatttttaatgttaattaatttttgtagagacaggatctcactatgatgcccatgctggtcttgaatgcctggcatcaagcaatcttcctgcttcggcttcccaaagtgctgggattacaggtgtgagctactatacccggcctttagctttcttctgaatgtgaacctttttttttttttttggagatggagtctcactcactctgctgctcaggctggagtgcagtggtgtggtcttggctcactgcaacctctgcctctcggattgaagtgattcttgtgcctcagcattccaagtagctgggactacaggcgcgtgctgccacacccggctaatttttttgtatttttggtagggaaggggtttcaccatattgcccaggctggtcttgaagtcctgacctcaagtgatccatctgcctcgaccgggattacaggcgtgagccactacacttagctctaaatgtgaatttttgaaacggattttttggataaagtccaggcaagatatcaaagaacgactaacctggcagtgtgacaagaatgtggttttttccttaaatatttaactttttagaaaaggatcacaagggccaggtgcggtggctcacgctgtaatcccagcattttgggaggccaaggcgggccagcctgggtgacagagaatccatctcaaaaaaagaaaaaaaaaaaagaaaaggatcacaagaaaagcttgtggacagtaaccttattgtgaagggttgtaatacaactcttgtaatcatggggtttttgacatagcacagggcagtgaaaagaaaaacaatgaactaagtcaggaggctgggtttctactaccagttgtgtatataagcagagccaccttgggctaaccactctacctgaacctgtttccttctcttgccattcaccctgccagactccttgggctattgcaagaataaaattaaatgctacttgggaaaatgcttcacaacctgagatgacttgggaaaaatgcttcacaacctgagataacttgtaccaacattggtattattactgggaccaaatgtgactttaaaaagaaaaacaaccttgacaaagaaaactctgattggttactaaatccctatttctgagataagctacatttcaaagaaattctccgtaaaagaaaaattggattcagttatcataccagatggctttcattctcaccactgactcaattctgaaacaattatatttcagtatggtaattataatctaaactatataaacacactgtaaacacaaactttgaacagatgaaaactccgatatgtaaaaaggtaatgaatgttgaaggaagactgtgaaaagggaaaagaaaaaaaattaaaatgttccccttctaggtcctgatgagagtaaatgtttactataaaaatgattcaaatattttaaacacttttcaaaccaggcaatattttaggcctactgtatatttgcattttgagcttccaatacggataagtgactggaaaaagcagctaggtttaggttgaaaaacaacaacccaccggggaacacattttagcaaattcttctgaaagtcaaaaatgttatagtcataggtaaaaagttacaaagaactaccaattgtcagaaatagctgccaatattgacttagaagacagcagaaggaattttagttcaagaaacctaaaacaggctgaaaaccttacctaccctatagctaccacaaataacactgtttccagtcatgatcattcctgatcacatattaagacataactgcaaattgtgctatactgtactatattaaaaggaagtgaaatatgatccctatcctagaactttccatacaaatgaatgtaaaacaccataaaaattaatcttaaggccgggcgcggtggctcacgcctgtaatcccagcactttgggaggccgaggtgggcggatcacgaggtcaggaagtggagaccatcctggctaacacggtgaaaccccgtctctactaaaaatacaaaaaattagccgggcgtggtggtggacgcctgtagtcccagctacttggggggccgaggcaggagaatggcgtgaacccgggaggcggagcttgcagtgagccgagatggcgccactgcactccggcctgggtgaaagagcgagactccgtctcaaaaacaaaacaaacaaaaattaatcttaagccaggcgcagtggctcacgccagcactttggaaggccgaggcgggtggatcacgagatcaggacttcaagaccagcctgaccaacgtgatgaaaccctatctctactaaaaatacaaaattagccggccacggtggcgtgcgcctataatcccagctactcaggaggctgaggcaggagaagcgcttgaacttgaacctggcaggcggaggttgcagtgagccaagatggcgccactgcactccagcctgggcgacagagccagactccaaccccccaccccgaaaaaaaaaggtccaggccgggcgcagtggctcaggactgtaatcccagcactttggaaggctgaggcgggtggatcacaaggtcaggagatcgagaccatcttggctaacatggtgaaaccccgtctctactaaaaatacaaaaaattagccgggcatagtggtgggcgcctgtagtcccagctactcgggaggctgaggcaggagaatggcctgaacccgggaggcggagctggcagtgagccaagatcgtgccactgcactccagcctaggcagcagagcgagaccgtgtctcaaaaaaacaaaacaaaacaaaacaaaaagtctgggagcggtggctcacgcctgtaatcccagcactttcggaggccaaggcaggaggatcacctgaggtcaggagttcgagaccaacctgaccaatatggagaaaccctgtctctactaaaaatacaaaattagctggtgtgatggcacatgcctgcaatcccaggtactccggaggctgaggcagcagaattgcttgaacccgggaggtggaggttgtagtgagccgagattgtgccactgcactccagcctgggcaacaagagccaaagtctgtctcaaaaaaaaaaaaaaaaaaaaaaaaagaaattaatcttaacaggaaacagaaaaaagcaatgaaaagctagaaaacataatagttgattgaaaataacaatttagcattttcattcttacatctttaatttttatgtatctgagtttttaattgatggtttaatttgccagaatgagaaagaacatcctatttttatgactctctcccatggaaatgaaacataaatgtatccaaatgccacactattgaggattttcctgatcactgattgtcatgagtaagttttgtgctttttcaaaagcagttttttcctacaatgtcatttcctgcttctctggctctgattttcaataaattgataaattgtgaatcctgttttcctcttatttttgtttagctataatgttgaagggcaagggagaggatggttatttataaatcttgtatcgctctgaaaacacaacatacattttccttaatctgattaacttgacttcaaatatgaaaaacaactttcataaagcagaaaagaatttacccttttttattgtgggtaagaggcaatggtacaacttttcaacttattttttgaatgttactcactactaaccatcaccatatttaaaaaaattaaagaactaatttagtttagtttattatttatttgacaaatgtttattgagtggcaactaggtcccaagtaccgttctaactactgaacatacagatgtatgtaaacaaaacaaaaatcccatcctggagtttacattctgtgggactagagataaaaaatggatacattacatagaatgtcagctagtaatcagtgttatggagaagcagcaggaatagaagataaagtgtgtgctgggggtgtggtaattttaaataggggtgtctggaaatgaaaaggtggtatttcaatcaagatttttagaccatggctgggtgcaatggctcaggcctgtaatcccagcaccttgagaggccaagggagggtagatcacttgaggtcaggagtttgagaccagcatggccaacatagcaaaaccctatctctacaacagaaaaatacaagaatggctggacgcagtggcttatgcctgtaatcctagcactttgggaggcccaggcgggtggatcacaaggtcaggagatcaagactatcctggctaacacggtgaaatcccgcctctactaaaaaagaaaaaaaaatacaaaaaattagccgggcgtggtagtgggtgcttgtagtcccagctattcaggaggctcaggcagaagaatggcatgaacccgggaggcagagtttgcagtgagctgagatcgcgccactgcactccagcctgggcaacagagcaagactccatctcaaaaaaagaaaaaaaaatacaaaaattagctgggcatggtggtgcacacctatcgtccctgctactctggaggctgaggtgggaggattgcttgagcctgacgaggttgaggctgcagtgagctgtgatagcaccactgcactccagcctctcgacagagatcctatataaaaaaaaaacctctgcatttcattgtatgtaaataagtatgtaatttcattgtatgtacagagccagtttcaaacaaaggttcttccaaatacctatcctctcaacgacaccgatcatccatgtttttttttttttttttttttttttgagatggagtttagctctgtcgctggagttcagtggtgccatattggctcacagcaacatctgcctcctggttcaagtgattctcctgcctcagcctcctgagtagctgggattacaggcacatgccactacgcccagctaatttttgtatttttagtggagagggggtttcaccatgttggccaggatggtctcgatctcctgacctcgtgatcctaccaccttggcctcccaaagtgctgggattacaggcataagccaccgccctcggcctcatccatgattttattttgccatttcaagtgatggagcttgttttagagctggaagaaaagccaaaatgccagttaatctaaactagattcctgccccagtgcagaaccaatcaagacagagtccctgtctttcccggaccacaggatttgtgttgaaaaggagaggagtgggagaggcagagtggatggagaacaaggaatcattttctatatttttaaagttcttcagttaagaaaatcagcaattacaatagcctaatcttactagacatgtcttttcttccctagtatgtaaggtcaattctgttcatttgcataggagataatcataggaatcccaaattaatacactcttgtgctgacttaccagatgggacactctaagattttctgcatagcattaatgacattttgtacttcttcaacgcgaagagcagataaatccatttctttctgttccaatgaactttaacacattagaaaaacatatatatatatctttttaaaaggtttataaaatgacaacttcattttatcattttaaaataaagtaaatttaagatttggaaggttttagaataatacaaaccaaagaactaatgacaacgtcctttatttttaaagattctagaagttgctttttgtaattagacaacataaattctgaattttttcacatattgctgccaaccccttgggtcttttcctttctccaagaaagagaaagctacagaggagtgactgaccgggtaggtggtggtagccttagctttctccaatgtttctggttgttttctttttcttgcataaaaccaaaatcaacaacgaccaaaccaacaccaatcaaggcctccccgcccctaacctttcccagtgacctgctctcatctctggatcctcctcaagcacatccctgccggcagcatctgttactactgacgctcctctacttccctcttgcgctttctcaatggcgcaaatggatccagttcttaagttctccctcccacaaaatcctgtctcctccccttcccagacatattcctggcacctcttcttccacaaggtcccatcctctcatacataccagccggtgttttttgttttgttttgttttgttttgttttgagacagtctcgctctgtcgcccaggctggagtgcaatggcgcgatctcggctcactgcaacctccgcctcccgggttctagcgattctcctgcctcagcctcctgagtagctggagcggcaccacgcccggctaatttttgtatttttagtagagacggagtttcaccacgttggtcaggctggtctggaactcctgacctcatgaccagccgacgtttttaaagacatagtgtccccctcaaggcatattccagttcctatcacgaggattcccccacggacactcagtgcccccttcctgatcctcagcgcttccctcgcgacctacaaactgcccccctccccagggttcacaacgccttacgcctctcaggttccgcccctaccccccgtcaaagaatacccatctgtcagcttcggaaatccactctcccacgccagtaccccagagcatcacttgggccccctgtccctttcccgggactctactacctttacccagagcagagggtgaaggcctcctgagcgcaggggcccagttatctgagaaaccccacagcctgtcccccgtccaggaagtctcagcgagctcacgccgcgcagtcgcagttttaatttatctgtaattcccgcgcttttccgttgccacggaaaccaaggggctaccgctaagcagcagcctctcagaatacgaaatcaaggtacaatcagaggatgggagggacagaaagagccaagcgtctctcggggctctggattggccacccagtctgcccccggatgacgtaaaaggaaagagacggaagaggaagaattctacctgagtttgccataaagtgcctgccctctagcctctactcttccagttgcggcttattgcatcacagtaattgctgtacgaaggtcagaatcgctacctattgtccaaagcagtcgtaagaagaggtcccaatcccccactctttccgccctaatggaggtctccagtttcggtaaatataagtaataaggattgttgggggggtggagggaaataattatttccagcatgcgttgcggaatgaaaggtcttcgccacagtgttccttagaaactgtagtcttatggagaggaacatccaataccagagcgggcacaattctcacggaaatccagtggatagattggagacctgtgcgcgcttgtacttgtcaacagttatggactggagtgttatgttttcgtattttgaaagcagaaactaggccttaaaaagatacgtacaactctttagggagactacaattcccatccagccccaggagtctggggcaagtagtcttgtaaggtcagtggcctgcggggacgcagtgagcgccgaatttgcctggggcaggggaaatgcgctctggcccatgtctgcgcactcgtagttccacccctcagccccagtgtttgttatttttcgggttcagcttgcttttgccccgtctccgtcgacgcaatcgccaccagtcaatggggtggtcgttttgagggacaagtggtaagagccaatcttcttggcgaaaacgcggagaaacgggactagttactgtctttgtccgccatgttagattcaccccacagagatagcggcagagctggcagcggacggtctttgcattgccgcctccccagggggcgggaagctggtaaggaagcagcctgggttagctaggggtggggtcacgtcacactaagagggtttggagaagttcaagggaggaatcctgcaaagaagaggggcgactttttccgtgtctccggacagctaatcgttttagtgacaggatgagagagcccttcgtgttctgagggaccgagtgggcgaaaagcgccggagagttggagagtctgtggttcagaatgcgaggtgacaacgtgctagcagccctcgctcgctctcggcgcctcctcggccttggcgtccattctggccgtgctggaggagcccttcagcccgccactgcgctgtgggggcccctctctgggctggccgaagccagagccggctccctctgcttgcggggaagtgtggagggagaggcgggtgtgggaactggggctgcgcgcagcgctcgccagccagcgcgagttccaggtgggcgcgggctcagcgggccccgcacccccggccccgggcagtcaggggcctagcacccgggccagcagctgcagagggtgcgccgggtcccccagcactgccggcccgcctgcaccccgcttgaattctcaccgggccccagccgccctgcacagggcaaggctcaggacctgcagcccgccatgcccgagccccctcccaacccctgtgagctccagcgtggcctgagcctccccgacgggcaccgccccctgctcctcagcgcccggtcccatcgactgcccaagggctgagaggagtgcaggcgcccggcacagccctgcgcaggatccactaggtgaagccagctgggctcctgagtcagatggggacttggaaaacttttatgtctagcctgaggattttatatgcaccagtcagcactctgtgtctagcttggggtttggggatgcaccaatcagcactctgtatctagctaatctggtgggcacttggagaacttctgtgtctagctaaaggattgtaaatgcaccaatcagtgctctgtgtctagctcaaggtttgcaaatgcaccaatcagcactctgtgtctagctaaaggtttgtaaacgcaccaatcagtgctctgtgtctagcaaatgtagtggggacttggagaatttttatgtctagctagaggattgtaaatgcaccaatcagcactctgtgtatatctagctcagggattgtaaatgcaccaatcagcaccctgtcaaaacggaccaattagctctctgtaaaatggaccaatcaacaggatgtgggtggggtcagataagggaataaaagcaggctgccccgctgggtgccagtggctcacacctgtaatcccagcaatttgggaggcctagaggggtggatcacgaggtcaagagatcgagaccatcctggctaacacagtgaaaccccgactctactaaaaagacaaaatattagctgggtgcggtggtgggtgcctgtaatcccctctactggggaggttgaggcaggagaatggcgtgaacccgggaggcggagcttgcagtgagcccagattgcaccactgcattccagcctgggtgacagagggagactccatctcaaaaaaaaaaaaaaaaaaaaaaaaaaatgcaggctgcctgagccagcagcagcaacccgctctggtctccttccacgctgtggaagctttgttcttgtgctctttgcaataaatcttgctgctgctcactctttgggtccgcatagcatttatctgctggtaacaccgaccgcagaggtctgcagcttcactcctgaagccagcgagaccacgaacccaccaggaggaatgaacaactccagacgggaggaacgaacaaactccagacatgccgccttaagagctgtaacactcaccgcaaaggtctgcagcttcactcctgaagccagcgagaccacgaatccaccagaaggaggtaactctgaacacgtccgaacatcagaaggaacaaactctggacacatcatctttaagaactgtaccactcaccgtgagggtccgcaacttcattcttgaagtcagtgagaccaagaacccaccaatttcggacacaagaacatccggcttctactgatggaaggccacgactcctcagtagaaagagggcccaggcaaagaaaatgagagagagtccttggggtggtgacactatcttgggaacatggagtgctaggaaacgataactggaagactaggatgaaatctgcaagttaaaaaatgacactacccatatatccttctcatcccattctccttttttcgagaccccgttaaagagatcttggttagggacctttggttttggaaaggcactgtttctcctttttgtcaaacactcaactttcaggccacactttttttttttttttcgagacaaagtctcgctttctcaaagaccagcccaggctggtcttgaactcctgagctcaagcgatcctcctgccttggcctcccaaagtgctgggattacaggcatgagccaccactcccggcctcagcttggataacttggcttgtacaggcctctggtggagacagtaaccaaagttcgggttgccaggtttgtttcattaaagggattttgttgaggctgaaagaaaaaaaaatcgatgtggaggaaaagctaacttgtgccaagacaaggtgagtcagtcacatggacttaacaataatgtcaattatgaaagctgaaggcctaggacccagctatctgactctactggctgtagacctaaggagcaggtagggttaaccatagctttcgtgtttacacacgttcaagattaatgctcttgctgaaagaatttttttacatgccagccaaagagagttccttatggagacctggatatggtccagctaagctagaatctcccacttcctgttttctcttagttggcccaccagctggaggagctccagaatatctaaattaatttccaattgtgtaatttgagaaaaagagacgaagattaatttccctaacgagtagggaagtgtgtttcttttttttcttttttttttgagactgagtctcgctctgtcgcccagcctgaagtgcagtggcacgatcgcggctagtgcactgcgaactctgtctcccgggttcacgccattctcctgcctcagcctcccgagtagctgggactacaggcacccgccatcacgcccagctaattttttgtgtttttagtagagatgggggtttcaccgcgttagccaggatgacctcgatctcctgacctcgtgatctgccttcctcggcctcccaaagtgctgggattataggcgtgagccaccgcacctggcaggaagtgtttcttaaagttggaaagtggtatttcagaatatccgcttttggcagactgagtcagtcacttcattttcctgattttttgcctaaggtcctggtgaattgacaaagattctgcccaaattttaacgaccccagtaattacatgtcatatgaatgaatacttgacgtcagcaggactgcgttttggtggtgaacttggttctaggtagaaacaaagaatggagaaaactgggggataattatcttagggtttcaaaaaagtgcctgatcttcacagacttcagggtccttaaaataacagtcttaattgtagtgttttacagggcagtgcattacattgtcaaaaacagtacaggtttatggttctaatgactggtttattatttttaaaaatgtttaattgaacttaatttttttaaggagacagggtccggctttgttgcccaggctggtcttcaactcctaggttcacgatccttccacctcagcctcccaaattgctaggattacaggcatgagccaccacaccgggccaattttttattttatttttgagacagagtctcgctctatcacccaggcgggagtgcagtggcatgatcttggcgcactgcaaccttgcctcccagattcaagcaattctcttgcctcagcctcttgagtagctgggaatacaggcctgcgccactacacccagctaatttttgtatttttattagagacgaagtttcaccatgttggctaggctggtctcgaactcctggactcaagcgatctgcctgcctctgcttcccaaaatcctgggattacagacatgagccactgtgcctggcctgtattataatatttttatatttgaatgacattttgaaagaacttgcatattcatttttaatttgatccttatggtaacactgtgagatcggcaaaacagacatattagacctattttacagattaaagaactgaagctcaaaggtgaactgacctgctcacagttttatgtctagtaatgggccagagctgtgtctagaacccaagtcttcccattttttgtgctcacacacatacacacaatttgctgttctgattagatgacatttcattgctttcaatttgcattgttctgaccaccagaaagtttgaaagtcttctgaggtatttgttaggtgttctgacttcttctatgaattttatgtatactttttcctgggttgttaattgtatcattagcagttttgctgatactctgggtgtgttgcagatattaaccctttgctgtgggttgtgatggttgtttgttgtcttctgattttgtggatttttttaaccatataaaatatttagtatgtaatgaaatatgcccaactcatcctttgacttctatgtacattataacctgcctttaaatgtgtatttcttttgtaggtaaaagtttcatttgatctgaatagtattaaaataaaatacctggatgaggaagatgaagaggtaaagtatattatggtacttattgctaggtgttcagaatagggatcttatttctccagtgatatgggctttaataattcgaagtagcgcttagctcatttgtgtctcaaaataataataataataataaaaacaatgagacatgcaagagatgtcgggagaagcaccagaagattccattgaaatcttgctccccagaagggtgggaacagtagggacagaaaactgctgtggttcattatgtttcatccccatttcgcttcattttattgaaccccgtctctactaaaaatacaaaaaattagccaaatgtggcagcaggcgcctgtagtcctagctacttgggaggctgaggcaggagaatggcgtgaacccaggaggcggagcttgcagtgagccgagatcgtgccactgcacttcagcctcggtgacagagcgagactccgtctcaaaaaaaaaaaaaggatatcagctttttattttcttttcttttctccttttctttctttgctttgcttttctttttgttttgggacagagtctcactctgtcatccaggctgcagtgcagtggcgcaatctcagctcactgcaacctctgcttcctgggttgaagcgattcttgtgcctcagcctcccaagtagctgggactacaggcatgcaccaccatgcctggctaatttttgtatatttggtagaaatggggtttcaccatgttggccaggctggttttgaactcctggcctcaagcaatccagcggcctcagcctcccaaagttatgggattacaggcatgagccattgtgcccagccaggatatcatcatatttaatcctcacatcaactgacatttgccccaatttacagatgaggaactgaggcacagagaggttttggtacttgcctgaggtcacacactctgggctctctgcttggggctgagggccaaggggggttgtgactgacttctctttcctgaacatcaataaaattcaatttagaaatttctgtcttcagtgctatctcgaggggcctgtgaaaaatgctgactcggtggcagctgtcttagccccatactcattgggttgccctgagccccacactgttttaaggaagtcccagcaaataatatgggatagaggtgagatccaaacctaagcagccctggctctaaaacccactgaacaaagctgcctctccaactagcatcagaaagaactaggtgagaatcctacttctatcacttactagttctgtggctctggccgcccccgcccaagttacttaacctctttttttttttttcctttttctttttctttttttagagacgaagtctcgctctgtcaccaggctggagtgcagtggcgtgatcttggctcactgcaacctctgcctccgggttcaagcaattctcctgcttcagcctcccgagtagcttgggactacagacgtgcgcaaccatgcccagctaattctttttttctttattttattttatttttttttttgagatggagtctcgctctgtcgcccaggctggagtgtagtggcgcgatcttggctcactgcaagctctgcctcccgggttcacgccattctcctgcctcagcttcctgagtagcttggactacaggcgcccaccagcacgcccagctaatttttttttttctttgtatttttagtagagacggggtttcactgtgttagccaggatggtctcgatcccctgacatcgtgatccgctgtcctcggtctcccaaagtgctgggattacaggcgtgagccaccgcacctggtcgattaacctcttttaagcctgttttctcatccatacaatggagataatggcagcacccactgcttggtaaggaatattaggtgaacacaggtgcctatgtgggttcctccattttccataaatgttaattcccttatccctcatctcctaggttagtcccagaggacagatttgaagtttgaaaacagaaagtaactgccaaaagggattatttagggcagagattgtccccttttattatgctttaggtcctcagtggtgagggcaggggacaggagaagtgggatccagcccaaattcttggatctcatcgtagagtgactctttaggggcttaggattctgcattttggacccgtccccagggcattctgatgcctgcagttctcctgtctggctttgaataactctgggtagtgctttaaatctaagctgacataccagtgggatgtgaactgtccttgcaaatgttttgagcccttcctgcgctggcctccaactctgccttgctcagtctgtctttagctcctttccattctggccttctccctttcctttttcacttcctttttttttttttttgagacaggatctcactctgttacccaggctggagtgcagtggcatgatcttcgctcactgcaagctccgcctcccgggttcaagcaattatcataccttagcctcctgagtagctgggactacaggcgcacaccaccacacccagctaatttttgtagttttagtagagatggggtttcaccatgttggccaggctggtctcaaactcctgacctcaagtgatccgcctgcctcggacactcaaagtgctaggattacaggcgtgagccaccacgcccagcctcctttttcacttcctaccttcctccccacctctgggtgtaccctcccctgagctcagcctgtatttctatctgctggccacttaccagccagtcctttcatctacaatgccctttactcacctagaaagctcacatcaaaagtcgcctcctccagaatacctctcaagttctcctctctggtcccttgaccctttgcaggtaccttttttcttgtacaagtcacatgataatgtaaggggtttttttccccatctagagcctgcctggtgggctcatggtccatttgtggaaacatgcatttccctctcctccgcccccctccttcatgatccatgctttaagagcttccccaaggcatgcagagcaagctgagaagaggtagacaagcctgcagacctttcaaagaagtggggtggcttgggaagtaaaagaagatctggagataggagttcctaaaaagcagacaagagattaccgaggggttccccacagctccagcacacagcagctgcaaaaaaaatgcagtggaattactgagggacattatgggcttgatggaggacagggaatgcttgtgccaagccaccaaggatcatgctgtggcagttgtgaccagatagactatacttttgccaaggtgaaaggatttccctactaaatcctttactttccactttgtttaaaatgagtttaacaccaagaaaatagttgtctctatgtccttatttctaatcttcctgctcaaccatgaactgcactaaacacactcagacccatctaacctaaaattgagaaagggaggttctcactcctggagagagaattactgaaagggcggccctcatacagttcagggtcatacccccaatagctggttttatatttgaaagcagacactgggactctgacctttgcagagataaaagggatactttcctaacccagagaggccaaaggagcacaggacgcccaggccgagggcagtgaagcttgcagacccaggctgtgcaacccccacagcaggtctcctcacgggatagatagactattggccccaattcctcagccctacatgcacccaccccttgccatggtttcgttgtgggtggagggtactttcccagcccctggctttgggcttgcccacgtgtcttgctctggccatggaatgaagcacaaaggagagcctgctagttcctaacccacgcctgaagacgccttaggcggttctgcggaccccgtgcacttccaccttcagccagaaggccttctctggtgcagccgttgcttcagcctcggtccaaaaggatcggagccccctggccgatccgcaggcctgcagggagccacagagcgcagcggccggcccagcgttcaagcccaagcacaggcctgcaagaactttcttccaactgccgtttgggatggttgattaggacgcgttgctgtggcggtagctcaccaatccaatgcatgcacccgctcctttattaggctatagggccagtggctgcgacagggacctgatacaacagtgcgttaaataaggagcttattgagctatcatgtcataagccggtggagaagtccaggcctagtgtagggtctctggccggggctgtagccttcatccgcgtggaaccttcccatggttcgcaggtcgcggtcttcggagccttcagcctcgtgagcccgaacagtccatagggcggcgccagaccctcttcccaacgccaccctctaaagcctcggctccaaccgattccacttctgcttcaggctcaggattttcactcttctcgaatgggggtggccctcccctgatcttctgaatcgcaacagcatctccctccctccaggacatcagagccagagctgggcgagaggccctgacctctggggtagggtggcagcgtccccttgaagatgcggtcccgcctcccatccccaggcgcccggcctctcacaccctcagcaccctgctcacctccagctgaagatgccagggcacctctgcttcctccctgctctctgcagtaccgcagagtgagcataaaagggcttaatacaggcttcgccgggcgcagggctcccgcctgtaattccagtactttgggagaccaaggcgggagggtcacttgagaacaggagttcaaaaccagcctgggcaacaaagtgaggcccgtctctaacaaagacaatgagaaataaatctaaaaattggatagactgaaacaggcaatgaggaaaggattccctatttaataaatggcattgggaaaactggctagccatatgcagaaaactgaaactggaccccttccttacaccttatacaaaaattaactcaaggtggattaaaaacttaaacataagatctaaaaccataaaaaccctaaaagaaaacctaggcaataccattcaggacataggcaggggcaaagacttcatgactaaaacaccaaaagcagtggcaacaaaagccaaaattgacaaatggaatctaattaaactaaagagcttctgcacagcaaaagaaactaccatcagagtgaacaggcaaccacagaatgggagaaaatttttacaatctacccatctgacaaagggctaatatccagaatctacaaagaacttaaacaaatttacaataaaaaatcaaacaaccccatcaaaaagtgggcaaaggatatgagcagacacttctcaaaagaagacatttatgcagccaacagacacatggaaaaatgctcatcatcactggccatcagagacatgcaaatcaaaaccacaatgagataccatctcacaccagttagaatgtcagtcattaaaaaggaaacaacaggtgctggagaggatgtggagaaataggaacgcttttacgccattggtgggactgtaaactagttcaaccattgtggaaaacagtgtggtgattcctcaaggatctagaactagaaataccatttgacccagcgatcccattactgggcatatatccaaaggattataaatcatgctgctataaagacaaatgcacacgtatgttcattgcggcactattcacaatagcaaagacttggaaccaacccaaatgtccatcaatgatagactggattaagaaaatgtggcacatatacaccataatatactatgcagtcctaaaaaatgatgagttcatgtcctttgtagggacatggatgaagctggaaaccatcattctgagcaaactatcgcaaggacagaaaaccaaacaccacatgttctcataggtgggaactgaacaatgaggacacttggacacagggtggggaacatcacacaccagagcctattgtggggtggggggaggggggagggatagcattaggagatatccttaat

SEQ ID NO: 7 - DNA, 87192 bp, Mus musculus
tgccacaaggaaaaaattagcacctggcattttatgatcatactgtatactaaggatactatagaaaattacctttaggctatataaagtgtatatgaaacaaataaatttcaaatttagccttgggacccattcctaagacatctcattatgaatgtacaaatatccccaaatcaaattttaaaaaattgaagcatatctggttccaagcattttagataaagatagtcaacctctacattaatatctagcctgatgtttatcaagaatattaactacaaagggctttaagttaaaatgtgaagaaattgttaggtgagattttgccatctactgggctcttcttaaattattttgttttctgttttgacatggggtcgcctgggttgtcctggctggcatccaggtcaagatcttcctgcttcaccctctgagtgaggtgtgtattacctgttaactgccttctctgtaagacattaatgctaatctcaactttctaaaaaacaaattaattccagactgatagtaatcatggctacttaaagcttttccctatagctaagcactcactttccctaccctggggtcttagagagcgagctcaaatagttgtatctttgtgaagaacatcttcttaataaagtattatggaaaccccaatacgctgtttggtttccatgaaggtatataaaggtttaagaaactgggcgtggtggcgcacacctttaatcccagcactcgggaggcagaggcaggcagatttctgagttcggggtcagcctggtctacaaagtgagttctaggacagccagggctacacagagaaaccctgtctcgaaaaaccaaaccaataaataaataaataaataaataaataaataaataaaatgtttaagaaaaattagggactgaacagctaagagtccagcccctctgcctcatagctgttttcctttacctcagcctgagagtcctgttaggtgggatatgagcacttgtagagcatgcatgaggggctgagcgcatcattgcaaaagaggaaaaaaaaatcacctaaaatttcctgtacacaatatattttatttgaaactgggttttattatgttgcccaggttatccctaaactaggctcaaacgatcctattacacagcctaatctgtctttgaactcaatgatccaggcactttggcctccagagtgctggaattacagaagtgaaccaccatgtccggggctgctgctgctttctttttttcctcttttattttatgtatgagtgttctacctgcatgtacaccgaatgccacaagagggcatcagatcccattacagatggttgtgagccacgccaccatgtggttatgtggtggctgggaattgaacttagaacctagaagatcagctagtactcttaacccctgaggcttctttttaagatggtggcattaagtcccgcagtgagatgacacatcacctgaactgtagcaggaactgcctgctgctgagtcatttgccctacttaccacagactctctaactaacgggagtcattctattcttagtactttccaggggagtttaggtttcaataagtatttttcaaattacttgaaaataatatgaagtaaacattaccttaagtgcttcttcatattcacctaaagggacaaaaacaaaacaaaagtcattttttttgactagttttacaaattacactgaatatcatctgccctacagttttttgctttttgagggtgtggaagagtctagctatgtagctcaggataatgtcaaacttacaatcctttgtgtgttgggattacagaagggtcacaccatacttggctaatcctatagttccagtgtaaaacaaagactatagttaatactgatgtattgtattgaaaactcttgctatacatgacagctacttttaccctgaagtggcagaggcagggtgtgtagggtggcaactgtgaaatgatacatagtttatccccccaagtaaccttttaaagccacctgtatatattttatatcaatgttaaactccttaaaaatatataatttattcttaaaatcctattcaaattcttagaatcttcatatatggactcccttattattatatggtgctcttccttctggtcataataagatttcattcctggcctcttcccctatagctatgacaaccagagcacagtgttagccaggactctggcaatggagctattgttactccactggggtgtcagaagacccttgcctgagattccactcctttctctagctgcaagaggtcttgagagatgatagcctatttatagaattgaaggatggctaaaagcaggtctctatgataaggtaagattgcaaaatacgatggggtgggatcttgcagtgatctagctgtttgcgtcctcccacactcttgtacatataactctgctctgcaagaaagcccaacaaactcactgcttccaccaagttggactttggtgagattatactttgatctgttgttggtgcccacttggtgtggcatctcctctggaaaagttattgcaacgcaatccagtgacaagagaagctactacatagcatcttcctctcaagtccctctgtgctgctctagccttctaagcacaaaatatcaacccaaatcttctgactatgctttgtgaagcctaagattcagtgaacttcctggactgtgttaagactatcattttacctggttcacataaggatgtggggactacaatatggactacaaccaactgcctgataaacacggacatgacttgcctgtgcattgatattcacatatatgccaggtcaaaaacaaatgcaataccagcagaacgagttgcatgtgacaaactagcagtgtatcatttttagaagatcagcatcttaaataccatgttggataagacctgtccttatgacccatacaaatgtactatcttctattaaaaacattggtatacaataaaagtcccctgtgaggctgaggatgtagctgggctggtagagtgcttgcctagaaagcaccaggcactaagtctgattcccagtactgcctatcgtgggggtggaagcataagcctgtaatccagtactcaggagctggaggttccaggtcatcctaggctacacactgagtgagaagtaagccgaagataccctgagaccctgcctcaataagaaaaaaagactctcctacaaaactaatgctacagatgatgactgggtacaacttcagtttacagtataccaaattctattctaaaacgtatgttagagcaaagcatggtttaaacggaaacatctcatcggacagattaatttgttttgaaacagggtttcactatgaagtccagagtgcctttaaaccaaggatcctccttgcctcagcctcctcagtactggactttaaagatgtcatgtcaggcaaatattaagtaaagctaacaaggtttttctcaggaacttaccttgactattgatggatatctatgaagagaaaaaaagcaacagtgaattctaagtctcatcacctgagcattttgttgactaggatcggtctcttagcaaattcccaggtcaggtggtcagtattcctactactgcttaaataatgtgctctgttttatcttagtggtattaacacgtagcatagtgtagggctaggagcccaggatctgggccccctacttcagtacttttgtgcctttgggcaagctttctaacctctcagaacttctgcttccttaagggaaaataaagatgacgacataccagatatacagtactgctagtctagcgcactttaaccacttcataaagggttcccatttagctccaccatcatcataaactaaatgtcaagtcttgctataattgtaggttctttctctgatagtcttcatgttgctttcccatttctcaactccagctcagatgccaatagttattattgttgctgttttgagacagggtttctctgtgtagccctggctgtcctggaacttgttctgtagaccaggctggcctcagagatccatctgcccctgcctccctgcccatagtcttcatgaagtatgcaactagcaaatacatttaaactactaggcaaatgagattaaactactatgaacttttttctttcgtccccccccccccacctccctatgggtctctgagacagtcttttgttttaaagtccaggttgggttaaacttcccaagtactggaaagacaggtgtaagccactaaaatgggctttattctgaactttaagctccttagcactttagaaaaggcccctgttgtaaatctctaacaatggcgttcagacactttacctcctcgttctcctcatccaggtattttatctggatagtattcagatcaaatgaaacttttacctgcaaatgaaacaattggctcagtgtatctcactatataagatgaatcattttgactttcttttattgaatatgaactttccaaacattacatgcattagcagtaatggtggagccggagagtattctgcctaagccaccagtagtgtggtaaacttgtgggcctttccaagaccactcttgcagcctgcagatagcagcccatgaatctccaacttacatattgaggcaaaacctcttgaaccaagagctccccaatctggctagccagccaatttgctcccaggatgccctctatggacaggccataacacacacttacatttgtatgggtgctgggaatccaaacactggtgctcacacctgtgtggcaagggcttaacccaaggagccctctccctagccccttatgttcatttttttctgtgatgctggggattcaatgcagagctttggaaatgctaactgagcccttcaccaacgtacataacaccttaatatagtttttaaaaataacttaaaacagactaagagaaaacatctgtaagagttaacagataaaggggtaaaacttgtaaaacacacacacacacacacacacacacacacacacacacacactcatgaaaaccgatagcaggaggaataatccagtgtccagtgcagctgtgcacatccttaagcttttatccccagcatgcagcaggctgaggcaggtggatgtctgtgtgtgtgtgtgaggccagcctggactacagagtaagtttcagaacagccagagagacttacaaaaacgaacaaaaaccttacagagtaatacaagtaaaaatgtgcacaaaatatacagaagaggaaataggaatgcctaataaatatataaacatattcaaccttacctctagccaaacagtgtaaacagagacacatctgacacattattaagatgtgaacattttttttttttttgagacatggctgtttctctgttcaacagctctggctgacttggaattcactttgtagatcaggctggccttagactcacagagtctaagacagagcctgcctctgtctcctaaatactgggactagaggtgtgcagcaccacgcctggtcatgaatattttttgaagttgtaatattcagtgttgtcaaaggttcagggcaaggaacaaaacttagtggcagaatgtttgtccagcatgtagaaggtccaacatttgacctccggccccacaaaataaaaaacagaacacccttctaggcattgagtcattttttctgtgcattgttataattattctgtggaccacttggcactatctatgaaaatgcttttcatttgatgcatctgagtgtttgccttcacatatgcctgtgcatcacatgagtgcgctgcctgcaaaggaaagaggaggatggctgacgttctgagactgcagttacagatagcgagcggtgagctgccacctgggtgctggaaatccaacagggtcctctggaagagctgccagtgttcttaatcactgggccatctctccagtccctatctgtctctctctcacacacacacacacacacacacacacacacacacacacacacacacaacctttggatagactctactctatagaaccacacataagttactcatactgagatgtaggtcctgtctattttataatgggaaaagaaagaaaaccttggtggggaaatcagtaagtaatggtcctatccacatcgtccagcaatactaagaacaccgtggactcagctgtaaaagactaagattgctgtgtctactgacgaggaaccacagctacaatatactgttgggcaagaaaagcaagatgtagaagactgtatgaccctaccagataaccgcatgaacatggaaatgtgggaagttcctcgggctgttttctctggctatttaaagaagacgtgaactgcacatgtaggatataatttaaaaatttccgggctggagagatggctcagtggttaagagcactgactgctcttccagaggtcctgagttcaattcccagcaaccacatggtggctaacaatcattttcaatgaaatctgatgccctcttctggtgtgtctgaagacagcgacagtgtactcacatacataaaataaatcttaaaaaaagaaaaaaaaaaaattccagccaggcaaggtgatgcacacctttaatctcagcacttgggaggcagaggcaggtggatttctgagttctaggccagcctggtctacagagtgagttccaggacagccagggctactcaagcgaaacaaaacaaaacaaaacaaaacaagttccaataaaaaaaaaaaaaaaagggcaagctgccaactcacccaacagctgctagagaaagaaagaaatctggtgctcagatcatttaacaggaccccactgcttcctcaatagccacctgcctagggcaggatggagagaaactgctggaagacagggaacgactgtaacacactggaaggcccctttctaaaatgtccttcctgctgaagttacccacatagataaaccaggtaaagaaatatttgtaaccaaaaatggttacattaaacacagatgcccaagtaggaaaacattgaccatggcaacccacaaaccagaagagtacaaagggcaaagcaagatgaaagacactaaaccaaagcacggagcagaggagctgctgcatgggcacccatgggagctgcgctgctttctgccagctctgagacatccaacctttgacccagcgataaagcaactgaccggtcttgcaaaacacaaatcccatcctcgtcaggtaacaaacacagcagtgcgcctgctctccagtcagacaacacccactacggcctggctgcagggaaggacagcctaacttatccccagaatgtctctaaaccctaattcactgaaaatatcattttacctcatacaagagagaaccaactcccaaaattgtcccagatttttgctctctctcaaaaaaattaatatatgtaattttaaagatgtttaaaggaacataattgtttcttcctttttccttgtacatattctctactaataccaaatccctgtaaaaaatgattttccaaaaggtccagaaatggataaaataaactgctcaaaatagctacattttgaaaaatatctgtgtataacccactgagaaacagaacaaagcggtacttaccatagcttcaacatcagcccaggttgtattttctggatccgaaaccagaaagctttgagtttcatttttaaaagtcacatttagagtaacctgtggttccatgctgtctggctggagctgagaggacaggtagatgaaaggaagaggaagggattaaaaacccacccggaggcttcagctctgatatataagttagacttggaagatcatagtgaataagacagacaatgtccccatgatgacattactatctagtaatgtgttttctacaaatctcactgttacacaggatttttccttctcaaaaataaagacactaatgctcaagatactgctataaagatctgcacttatgttatagctaccacttatatagaacttctatgttagagagaaaagccaagttgggcacacacctgtagtcccagttactcagaagttgatgcaggatggtaatggaagtccaagagttctaggtcagcctaggaaacaatgagatcctatctttaggattaaagaggtgggctgtggggagggtaaacggctgttgaacgagtttaaattttatccacatcaacaaaaacccccttcacatgttttaggtctctaagatttttcactgcctatttcagtgcttggatagttgagcatctgtagcgtaatccagcaaggtggattaacacagacaagggctctgccttggggagtacaaatagacggaatttccaattttaggtaaggaggtcaagaatagcctgggttacagaatgaacactaagtctccagaaaataagcaagcaaacaaaccaacaccaaaacaaagcagcaacaacaacaacaatctaccagaacctcttacaatcacttatggggaattttaaaggtatataaaagtaaagaaaggaacttgctgagtccttttggacctatcagctagcttccacaatatccaactgggagctaatttagttatccagtattccttcctttcagttgtgtgtggggggctgcaaatggaatacagatgtctagacgatagggaatcactctaccactgagctacacccttgtctcatgacaatgtctctcttgacaaaatattcatcctttcattcgtaaatatttatgagaaaaaaaatgtaaaacccaccattatcacacctaagaagctggtaattctttaatcacttatctattattaaagtcggtttgactttaatgaaggactttgcttactgatgatctgtgactttaggggaaaaggtagtttaagttgtttaacgctacaagtaaactcactggcattaaaaaaaaaaaggtcacctcttaaaatattcagcacatttttaaatctgcatctagaaagggccagattctgctccacacacaagaggcaaacaagattaagtcctagacttttccaatgtcacaggaagggaggccatggggcgggaagactcagggttccagacacagttccaccacagactagtcatagagctgtgagaaacactatctctgagcttcaactgtttaatctataaaaacaatactattttgatgaccttaacagtgttaccaaaggaatttaataaaattatggcctaggagattgggaataaggccgaaccagtcaattatgtgcatagctgtggggttcatttctagcaccacaaagtgtataaattcttatcaacagaaacaattctttatttcactaagatagcttctagtttattatttactaatttttgaaggagacatactctcactccgcagcccatgctggcctggcaattgctatagatttgcctgcttctgccttcagagtgttgtactatggatacaactgtcattttaagagcctgtagggctggagagatggctcagcctccccccccccccgacccccccaaagaacccagttcaattcccagcacccgtgcagcagcttccaactgtctgtaattccaattccaggggaatctaacaccctcctacagacatacaaaaacaccaacggtttcaaaataaataattgaaacaaaagaaccttgtattcttaattctgactattttatatactcaattattcattttttcccatcacttgtctttatctagaattgacttcgatgccaagctaatgctaatctctagcacccaccctgctgacaaccagcatgcatttacctgaaatgcaattcttccttcttaggagctgtaaaatttaggcagacgctggctcatcaactccccagcaactccccagcacgttcaagttggttggtttgtttgttttttctttaaaccagaaaaacaaagtgaccaaaatgtaaaaattgtgaaacacactttccaacttcaagaaatactcttccactcttttctgtctggaaggaaactattcttccccgttctgaaattacacaagtgggaattagtttccatactttggagcaaccagctgttctgcccatgggagaaaacaggaagtaggcggttctagtttagctggccaatatacaggtcttcataaagggcttacgtgtgaaaattctttcagccagagcaatcatcttgaacttgtgaaaatatcaaaagtacagttaaccacatctatacctgaaggtttacctccagcagtcaggtagctgggcctaagcctgcactttcctaaatggcactgtaaactcatacctattgactcacgttcatgtggctaagtcagcttttcctcacgtgattatttttcaaccccgacaaataattttaataaagccaatttgggaatctgaacttcattttctataccagaagctggcacaagcaacctgagttttaaaatgtgtcatctgaaaggtgggtgtttgacataacgggaaaaacgatgcctttctaatttggaaggtcctagctcaagatatcttccttcaatagagccttaaaaataggaaagggacagaatgaggaagatgtatgtcctttcttgtcgcagacttaatcccagtcttccagtaatggtttcccggaactccatgtccccaggacagtgagtgtcaccaccatcgaagccctctttatgttctgggggggatcgagaccttttcttagcagaaactggcccttctaagccatgaactgtctccctcaggcagtatccaccccccactatcgatgacaacccaagcgactccctcatctggtcactgaaaagactggctgcccctgaacacggaaagtcactcctctttgcaagattttccccttgaacttccccgagcactctaagaacggcgtgcccctacttctaggtaacagtggtagcttccttaccagctttccgcccacggggggcgcttgccagtggccagtgcaaggaccgttcgcggccagctcgcctgctatccctgcggggtgaatctaacatggcggacagagaccgggcctagtcccatgtttcccggagttttccacaagatgattggctctttctatctgcccctcaaaataacctctctaccgattggtcagtgctgcgttggcaagggagggacagaagctctctgaaccgcataacaataacaaacacccaggccgaggggcggaactagcgcgcagaagtcagctggttggatttccctttcccaagccgattggccaccctctgcttttcccaggtcactgacattggcggactagttacccgagaatcgcggggctggacgggaattgtagtcttcctggaacccacagctccttttagtctattttctgtgcacaaaacacgaacacagaacgctgcgattcatagcagctaagacgcataactgcgaggaggtctccgctgtaccgactgggttcctgtggtactcgtgcctgcttccggtgtgagaagctcttttcccgtaagactacactttccaagagatgctgtggagaaggcctttcgttccgcaatgcatgctggaattggtagttcttcttacacaagtctcttatttaccgaaactggagacttccatggcaggaaggctgagggagggatgagacctcgttttgcaactgctttgggcactaccttgcgctcatattccggcctcagggagcgattcccaccctttgtacagaactactgtgacgtaataagcaggcgtagatgcgaaggggctgcctaagagaaacctcgaaattctttctcttccgtctctttctagtgacgacatacaggaaaaaaaaagactaggtagccaatcgcaaacccagaaacagtttcagcaccccccccccccaactcgctcctcccttcccttccgctgacgtgtctggatcttgtgttccgaaaggctagcgctaggcgccaagcggccggtttccttggcgacggagagcgcgggaattttagatagattgtaattgcggctgcgcggccgctgcccgtgcagccagaggatccagcacctctcttggggcttctccgtcctcggcgcttggaagtacggatcttttttctcggagaaaaggtgagacagccctgaggaacagaaagggtaccccggaatactcatatgaaaggcaggaagctgctggtggagacgggtgtttactgattaggaaagtacctggggcggaaccaaagggtcccagacgttttcaaacaggactcttgggaagggtgcagtttgtgcattcccgggggcagctgtgaggaagagggcaaaggatctacgagggggagttctggctgtaatcgtatcttgaaggttgtatacggatgcgggctaaaggatgagaggaaaggcgggcagaagtgtggcagggaagaggggggaaaaacggagtttgtggagggaaactcctgaagaactagacccgagtacatttcacagaaggttctagaagggaagtacataagggaatggcaatagtaatgaatgctgttggcagagaagacgtgtttaaagagagccttaacagggaaacatccagaagaggtagggtggagacgctttagcagtttttaagtgttccttttggcgacttttaaaataatatgtgtgcttcttttttgtttggttggttagcgtttatgttggtggtttggtttggtttggttttggcttttgtgtagccttggctgtcctggaactagctctatagaccaggctggcctcgaattcacagagatccacctgcctctgcctcctgaatgctgggtagttgattagttttgagacagagtctagtctcatttatattagctctggctggcttggagctgtgtataatagaacaggctggtcttaaacactcctccacctgcccctgtctctggggaggagggggtcaaagatatccactaccattctcagctagttttagagtttgtgagacagggccttctgtaattgggttgtgtagctctaggtgaccttgaactctatcctcctgcctgtacttcctgaatgctgaaagtacaggttgaaacaaccatatctgatcttttggcctccccaaactagcccaaaaagactgctgaacttctgagtccaagccatcctcctccttcaacttctccagtccctgaaactataggtatgacaccactggttttgattctaagcaagaaaaagaacaccagactctggggaaagttcatatatatatcacttctgtccagtcactccattttagcttttttttttttccttgaagaaaggaagtgacccaaggaaggctttcatatcaaagagtagagaatttagattgctagctacaaagagcaactgctaagaattttatttatctgttgatttattggtgtttgtttgttttgttttgagacagggtttttctatatagccctggctgttctggaactcactctgtagtccaggctgtcctggaactcagagatctgcctgcctttgactctcagtgctgtgatcaagaatatgtgccaccactgcctggagaaatttttattttttaaagattcatttttcattatctttaattatgtgtatgtgtgtgcagaggttctgacctggatgtagcgttccagacatctgacatgggtgctgggaagaggcacatatttttaaccactgaaccatctctccagaccctgagttttttgtttcttaagatttatttatttattttatgtgagtacattgttgctgccttcagatacaccagaagagggcatctaagctcattacagatggctgtaaaccatcttggttgctgagatttgaactcaggacctcaggaagaacagtcagtgctcttaaccgctgagtcatctctccagcccccgggttgggtttgttttttgtttttgtttttgttttttttaatgtactatatgtaagtacactgtagttgtcttcagacaccccagaagagggcatcagatctcattatggatggttgtgagccatcatgtggttgctgggatttgaactcgggacctgtggaagagtagtcagtgctcttaaccgctgaaccatctctccagtccggttttggagtttttaaaagaattttttttaaacagttccattcattttatatatgtgagtacattatcactgtcttcagacatgctagaaaagggcattggatcccattacagatggttgtgagccaccgtgtggatgctgggaattgaacctttggaagagcagtgagtttacttaactgctgagccatcttattagtcccttgtttttgttttttagtgaagttttttcatcaactgttggtataattctaaagcactccaaatttaaatttttcttatttagaaatgacaagcctggtgcagtagcttaaacacctgtactcagtaggctgaggcagggcgattgcttcaagttggaggctaatctgggctgcataattatttccagatgtgtgtgggcttcagcgtgagaactcctccaaaaagcatggatgggggtgacttaccttcagtaattccagcactaagtgggtggaggcaggaggatcagaggtttaagactagccttgagtacataaggtacaaagccagtgtgggttacatgacatcttgtctcaaaaagggaaagaaagttggcaaggtaagctactgtatttaaaagccctttaatgtagtttaattgcatgtgtttttaaatttgtgttaaaagttcactggaactggaagaaatggatttatctgccgtccaaattcaagaagtacaaaatgtccttcatgctatgcagaaaatcttagagtgtccgatctggtaagtcaacagaagagtttactcagctggaattcttcatgtggttactgttcatgcaaatgagtagcagaggcttaagatagtagagaaaaacactctgtattaaaaggactttgtatttttcatccctgaagagttttaaaaatacagaaaggtggtcttcactctgccatccctcctccctgtccaggcaaagcctgacttgatgtgttcttcctcatggcaggattctggctttttctccaggggtgggacagcctgatctcttagaatgactctcataaatagcatcagaataacaatggaatgcttggggtttgtgagggcctctgtctacctttgacactagggtggaaactggtcctgtaaatttacatgagagtgcccctgtcctcagcttttagcaagtccagtgtgggatgaggttttaaatttctctttctataaaattaattgaggcctgaccttttggtctattcaggcctttccactttcctgctttttgtttttgtttttggttgggggttatactagatttggttagaccaactcaatctcaaactcaccatcttgcccaggctggctttgaactcagatcctcctgccaaggattctaggcatacactaccatacctggctaaaagagtgagttttgaccagtgtttatctgtgtaagtataactcttacctccaagataggaaatgtttccattaccttagaaaattctctggtgttctcagtgagttcttacttttcaggcctactaggacctttggaaatgaggctttagtgtgtgattttgtgatttttagaattttgtgcactagggctcagaatgtagctagtataatggcttagctagcacaccgggagccctcggttcagtttccatcactgtataagttgggcctagtgaccaacatctataatcccatcagaagagtgagacttaggagtggatatcaggtcatctttgactgtgagactagcctggagtacagatgaccctgattctttttgcttggaagtagagaaacttggtgaatagctttaggctccaagttcagttttcagccccaaagatagatgataaagaaatggatactcggggaaaatgaatcctctggcataaggaatgttaaaaatcctaagcaagggctggagaatgctcttccagaggatttgagttcaattcccagcacccacatggcagcttacaactgtctgtaacttcaagatctgacatcctcacacagacatacatgcatcagatcccattacagatggtggtgagccaccatgtggttgctgggaattgaactcaggatctctgggagagcagttagtgctcttaatctctgagcatactccctccgccttttaaatttttttcaagacagtcttcctgtgtagttctgactgacctagaactcaccatgtataccaagctggccttgaactcacagatatcctcctgtctctgcctccaaagtgctagaattaataacatgtactgtcatatcctacttaaatttgaaattagttcttaaaaactttttaaaatatttatttatttattatatgtaagtacactaactgtcttcagacacaccagaagagggcgtcagatctcattacagatgggtgtgagccactgtgtggttgctgggatttgaactcaggaccttcagaagaacagacccttaaccaagagtcagtgctcttaacctctgagccatctctccagcccctgaaattagttcttaatactttattttagtgctgggggttaacttggggactcgtggttgctatgttgttgctgtgttgttttgtttttgtttttttctgtacagggtttcagtatgtaaccctagctgtcctggcactcactgtgtagaccagactgacctcaaactcactgagatctgtctgctttttcctgggattaaaggcatgtgccactgtgcccagcttttaaatattctttagtaatatggtattagagtacagcatttagaagtagggggctggagagatagatgtcttggtgggaaaacttttaccatgagagcatgaggaccaaagtttggatccccagcaccccctaaatgctagactagcaatgacagctctaggttcaagtgaaaggcccgtctcaatgcttagggtggaaaggaaggagggcatcagcctggagcctccacaagtgtgcacacacaccacatgtcaaaacatagctttttagttaatcagttaggtgcttgtttgtttaagggggttgtgttttgtggcttttgtttttgtttagcttcgatggataaatgcaagtaaatttgcctctgtgcttcacggggttgttattttgttcagagtcaagttaataaggtttaggtagatgtgtgtgcttccagagacaagatttcaaaagtgctagccactctacagcattgcagctgaataaaaacaagtcctaatgagatttacaaccaagtctatgaaatatcaaagccacagaggcagaaataacactgcgagagaaagatgggctgtgagaagcctaagtttactgaggataattataaacagtgatcaaaaagtcttcagtaacgtgccatttgggtccatttattctacattcccgtgggactcagtcataaaagtgtaatgtactttctcattctggcaaattaaaccatcagttaaaaattcaggctgggtggtggtggcgcacgcctttaatcccagcacttgggaggcagaggcagttggatttctgagtggctcagtgtgccgactgctcttccgaaggtcccgtgttcaaatcccagcaaccacatggtggctcacaaccatctgtaacgaaatctgatgccctcttctggagtatctgaagacagctacagtgtacttacatataataaataaataaattttaaaaaaaattcagatacatacaaactaaagatgcaagggagaaagttactgctaaattttcagttgttcaatgtccctggcttcttcgtgcacttcttgttctccttgagacagggtctcaaaggtctcagtcctcctatctcagcctcgaaatgctagaattatgggtgtgcatttgcaagctttaggcttgctttttgttttgagatggggtctcactgtgtaaaccaggctagcctctacttctcagaggcccactcctctgcctcccagtgttgggattaaaggtatatgccaccataccaggtttgcttttaataatttaataatagttgtttttaaagcttaaggtcatttatatagaatgctctatagtgggatgttcaacctacgtgtgtgtctgtgtgtctgtgtgtgtgtgtgtgtgtgtgtgtgtgtgtgtgtgtttgatttgttttgttttccagttcctgggattgaactgagggcctcttcatggtcggctgcgttacacgtacagtcccaacctacctgggtgaattttagttatgtgaagcttcttcctctgtatgttaataggaaacgaatcctataggcacactctactgctgagttacacgtgcagcccatgcagttagttcttaatgataactgattagaactaaaaactgttacttggagcttttatcgctgctattgggagacagatccaaggagatttctgaattggaggtcagcctggtttatgtagcaaatttctggacagccagggctacataaagatcctgtctaaaaccaaaataaaaataaatacatatctacctacctacctagaaaaaaataaaacaaaagttattccttggggtgggtgcaggataaggcgctcagtcctcagatctcctgcactgagattccttctgtccctcaattatgagtggcagctttgtttttattctcaaggtggggtcttgtgatgttcagagtggtctccaagtcccatgttcatgtcgtcttcctatctcggcctcccaagtatctggaactgccaatatgcactactatacctgactctgtggcaggcccttgtggtgtttgctagtccttgatgtgtgtgtatccatgtgggggaagttgttttgttttgtcttgctttttgcttgtttgtttgtcccccccaccccctccccacacatacacaggctttctctctgtgtagccctagctgtcttggaactggccctgtagacatgattgaccttgaactcacagatctacctgcttctgcctgttttgtttgttggtgttaaaagcctaggtcaggactggctggccggctctttttacaaaaattaaatgtgactgtaatattttttaagtgctgaaatgggtacctagtagttctggttttttttttccccccaaatccaaatctaaatgctgttcccagtgactcatcctgttaaaactcaaaagtacagatacgcagtaggctgaaaatactgtgtggcacgaaaagtgtttaaaacatttgaattttgtagtaaacatttactcttatcagaagctagaagagaaacattttaatttttttttccattttcattcctattcatctccaagctcttcctacaacagtcactacctttttacatatgggagttttcatctgttcagagttggtgtttacagtgtgtttatatagcttggatcataattaccatactgaaatataattatttcagaattgagtcagtggtgagaatgaaagccatctggtatcatgactcaatccaatttctcttttactaagaacttcctttggtgtctagcctgtctcagaagcagtaacagagcagtctcctctgtggacattggattctcacagtgaccccagaagactgccaagggggactaagttcaggtagacagcttggctcgaggttgttctgctcctgtagacagagctggtagtaggagccagccttcaggcttagtcaggtgtggtcgttgccctctgcaccgtcaggacccctctgaccacaagtcctacattactaagcccctttgggcgggcttttccctcccagcctttcccgtgatcctgttctacatgtaacaaaaggactgtgtttctctcacactagcaagtcatctctttagtgtcttacatggccgttaccgctagaactcagtgtctgtatcgcacacagaataaagtaaagacaatagatgagtttcctgcctgcctgggctcccagctacctctgtcctctactgcaggcctccatgatgccctctcagagtggctggcatgcgctaccaccaggcacagtcctgctcagcttcacttctccgctgtgctgtctctgctcgtctccagtgattgcagtttgtcccttatgactcagctgtcctctgccgtcacttccttgtttgtgtattttttgtgccgttctatatagacctgctcatgtgcactgcgctgtgtccttttgtcctatttagtttttccttctagcacatttcttccttctagatgataagtttgtgcagctcattttcctattttatttgtgcaaatgcttgaacttgtcctactcagttttaaaaagtcaagtcaatcccaatccatgccaacacagcgctgtgaggtgggctgtcaagatggctcagcaggtaaaggcacttaccacctgacagcctgcgtttgatccttaggacgcacagattgttctctggcttccacatgtgcaccgtggcaagtgcacacactcacacatcgcccagtacatacacagtacaaaagtacattcttttaagtactgtgaggcaatcaaaaatatatacactaggcttcacataaccatggctagggtacatacactccaagatctctaaagggtgtcttgtaacctcagataatactgaaccctgcatacactatggtgttttcccctccccctctctcaatgcatacatacctttgatgaacttttaccttttcatttaaaggagcattttatgcccttgctgtggtatgtctaaattgccagcttgatatggtggcatatacctagaataccaggatttcagaactgagtcatgagggtctgtgagttcaaagccagcctgagttacatagtgacacagaatctgtggggtggggtggagtggggtgactggcatcattgcttgttagctctggggccatagtaagtcgaatttaatgttactcgaacacagacacttttatagcctagcacccgatttcgtggcaaacttctactgatctgttagcagttatgagtacagcctggatacactggactaaagcagagctaggctgggtttagtacccagtaacacataaaggtgtttaacactgcacaaagggatgatgattcagattctggggggatggagtaatactgactaaaaatcttctacatttaaaaactcatggatgtgccagtgggatggctcactggccaatgcacctaaggcacaagcctggtgaccttagttggtaacactcatagccaattaaaaggcaagcaagtaaaaacttacaatgggctggagaggtaacttagtggttaaaagcacttgctgctctttcagaggacgcaggttcagtttctagcaccttcatcaggttgctcacaacagcctgtagtttcagggaatctgacaccctcttctggctcccaaggacattgcataaatgtggtgcccactatacccacaggcacaagtcctcacaaaagtcagtctttttcttttcttttcttttttaaattataactgagggaaagcttgctataaagcaaacctttcgggggactggagtgatgactcaacagttaagagcactgaatgctcttccaaaaggtcctgagttcaaatcccagcaactacatggtagctcacaagcatccgtaacaagatctgatgccctcttctggtgtgtctgaagacagctacaatgtacttacatacgataaaataaatacatctttaaaaaagcaaacctttctgtctttttttttttatgggttttgtgtgtgtgtgtctgtccatatcaaggtatgtcacatgtgtttaggttcctagatagcccaggaaaatgtatcaggtcctctagaatatagctcctgacagttgtgagctacatgatgtgagtgctggggactggtcaggtcctctgcaggactagcaagtgctcttgactgctgagccatctcccatcttttcagccactggtttgactggggatggagggttctggagggtggccttgaactttcagtatgtccaggatgacccaaattcattctccttcttctatttctcaagttctggaattgtgggactacactaccacactaaggacaatttgtgtgtgtgtgtgtgtgtgtgtgtgtgtgtgtgtgtgtgtttgtggagtttagttaagattcaggatatgcgttggaaatgatgcctgacagtgaaaataaccaatgtgagagaaatatcagttgtcaagccagggccttgaacttggttgggaggtgctctgctgttgagcctcattcccaacctagagctaatcttatagatgctggcagtaatccagagcagtgaggagaccggtatttctgtctgctttctgaatgcttgatgaaaggatcttttgttttgtttcctttgagacggggtctcattgtggaaccctgacaggtcttgaactctcagaatctatctgcttcctttctgcctctccaggggtggaggcaccagcacacccacaggatcaaattttctcctctgatctttgttcctagcaaggcagacctttgatactgaattattctaactttctttttttttttttttttttttttttggtttttcaagacagggtttctctgtagtcttggctgtcctggaactcactttgtagaccaggctggcctcgaactcagaaatccacctgtctctgcctcccaagtactaggattaaaggcgtgcgccaccactgcccggcatgaattattctaaaatagtggttctgttggggttcgccaaaagacccttactcacaaagaccacaaagaccgccaccatcgctgcaacccacataaggatttttattgatcctacatgttggggacttccctcccagcacgcaggccagaggagagacccagaacaaagaaagaacacactttttatacctttgtaaggagcagatttgagcaacaggattctcattggtgtagcaagtaaccctttcaggcattggttggtttgtatagtgactaagtaaccctttggcctagtgactcactttgcttgccccatggtgggttattatgatttggtcagcaaagcagtaatacattctgaacttatggatcagctattaacgccacagctgttaatgttctcgcaacaaggtcagggtggtttgtggtctttttcagaatgcaatatggggcgggaggggggcaggagaattgctaatcttattatggttatttctctgaggacagctaatattgttttggcagcttgtaggctaattcattttgactgctaaaactatgtttttacatttgtttagtcaggcagcttccttatctggctctgcacttggtctgctggtacagtttggaaagtccttttcgaagagggaaggtactgggtggtcttgaattcattttgaatattacagttatcaaccttcctaatgctttggcctttaatacaattcctaatgttggggatgaccctcaaccataaaattatttttgttgctaccttgtgattacaatttttctactgttgtgagttgtaaatatctgcgttatctgtgttttccaacggtctaaggtttattaaacccctaaggggtcacgacccacaggttgtgaaccactgtcttaagcctatatccaggctcaggtatagcaacttaaagctgaacctctttagccaaaaccaagtgtttgtttgtgtataaacaactactaagccacacttattctttctttctagtttggaactgatcaaagaacctgtttccacaaagtgtgaccacatattttgcaagtaagtgaatggttttgtagatccattagtagcttttgtacgtgttcttcactgcacagcatttgtttcttcagttagatgacaagaaaactagccttgtttcctcagggagcacctaggaattcctcatgtatattggctgtagccatcgttcttggtaaagttgtaacatagcttatctgtgtataagaagtcacatagccgccaggcgtggtagtgcacgcctttaatcccagcactcgggaggcagaggcaggcggatttctgagttcaaggccagcctggtctacaaagtgagttccaggacagccagagctacacagagaaaccctgtctcgaaaaaccaaaaaaaaaaaaatcacatagccatgttgtacagaggttctgttgggttttggtgtccaagggtgaatgtaggctgaaagcagttgtgaaatgagcagctctgtttcagccatcaccccttcttgtctccgttcactcctaagtgaccttccgctcttcctgagcaggaggtgcagtgtttgtgagttttgtggtgctgatgaaaatagggatctgaacgatatatatttattttatttctatatctgaacaatatatatttattcattcatatcaatgactccagtcacacgtagccctccgtatctagagattatgtgttggctgaatgaatcacccatgggctgaaaatgtcctggaaatcaggaaacaaattgcatctacatggaacatccacaaaccttttctccttttcattgttccctaaagtatataaagtcatagccacgtatcatttaatttacaaataaatttctatttacgtgtgtatctttgcttatgtgaatgtatgcatgtatgtgttggatctccaggagctggcgttacaggtagttgtaagctgtccagtgtggatgctgggaagcaagctcaggtcctctgccagagcagcaagtccttgtaaccactgagccatctttccagccctggatcatttatattttattacattacctattctaagtaaactgtatctttttttttttttaagatttatttattattttatgtaagtacactgtagctgtcttcagacacaccagaagagggagtcagatcttgttacggatggttgtgagccaccatgtggttgctgggatttgaactctggaccttcggaagagcagtcgggtgctcttacccactgagccatctcaccagcccaaactgtatctttttatgtaaggaacttgagtatccaaagattttggtatccatgagacctatctcgcccattctgagggaagactgttaagaatcttgctcttttttttgttgttcaaacagtttccgatgttatagttctagcagtctatgaagttctaaatgactcttagggctagcctgcaactgttgacatcttagggctagcctgcaactgttgacatcttagggctagcctgcaactgttgacagagatgcttcacaggggtgctttgttatgctttcctttttttttttttcttttggttttttgaggcatctcaactgtgtgtccctgagtagatttgagctcggtatgtagaccagatgggctctgaacttcctgtggtcctgcttctgcttcccaaatactgatggtacaggtgtgagccacagcatctagcctttgaatgaaggtatctaaatcagtcgtgatagcatacaccttgtcttagttactgttgctgtgataaagcactgtaaccaagagagattacagaaggaaacagttaactggggcttagagttccagatgagtccatcacctcatccctcagtcaggccgggatcacagcaggggcctggcagggggtgtgactggcatggtgctagaacgttagagctcacatcctgacccaggaagcaagaataatggaaatagtaatttttgttattgttatttaacaactttctggccgtctggcttctacatgttaaactatatattgtgtaggaacagtttcttttttctattttagttttcatcatgtgcactcatgtgggtcgtgtcagagcatgtgtagatgagtgtagatgcccatggaggccagaggaaggtgttggattccctggagtaggagttccaagcatttttgagctatctgtgggtgctgagaactgaactcgggtcctcaataacagcaatccaagcccttaactgctgagccatatttctagtcctcttaatggcattttgggacatgatgggaacattctaagatagggctaatttgaggtaatagtctactgggttctgtcttgttcgtggttctttaccccctctgctgttttcttcccctcccctctctctgtgttgtcccctctgcaattccaccgtccctgttgccttgatatttctaccttgcctctctggcccagagcactggagccagccagctgtgaactgaaattgtaagcgaaaacgtttactccaaagagtgagagttacagtctccacgtgcctgtgttgttccatatttaccttaccttagttcaggctgacacattgctcagtaccacatctggctgtagctgttttactggatagtgcaactcttaaagcttactcctcaaggagtttatgggtcagtagcaacagcatcctgtaagagcttgctattctcttagccctatcctacactactgaataaagcatttaaaaataaggaatttaaaaagagggaaatatatgttaaaagacttggccatacactacatttgtctcctagttcactattaacactaacttttcaattcctttcatcttccttggttgtcattaatgttggtatctgctttttattccctaccctgtcatgtgcattaaaatagcaaggattttcctttgctttagcacttactgtatctggagaggtaccagttatgagttagtcgtgtgcctgagtcacatcgttaattatcaccactgaatctctaccgcttgtccatgagccattcgagttcctttttgtgtgtggagtgacttttgggttgaggaaatgacccagttggcaaagtatgcaccatacaaaactaaggtctttatgtgcccaggacccaaagctaagcgtggctgtgtgtgcctggaatcccagggctggggaaggagagataggagggtccctgggcttgctgactagttattacagccaaatcaacaagccccgggtgcagtcagagagcctgtctcaaaaaataaggtggagaatgattggattaagagccctggctatcactgagtgtggtggcctgcactttaatctcagcacttgggaggccaaagcaggtggatctcagagtttgaggtcaacctggtctactaagtgagtccggaatagccagggctacacagaaaaaccttgtctcaaagaaaaaaaaccaaccaaacaaaaaaagagtcctagccatcctgggactcattctctagatcagcctggctttgaattcaaagaacctttacaagtactaaccacattatcttttcttttatctcagtgtctgtctgtctctctctcccttccttccttcctccctcccttccttccctcacccccttctctctctcttaacagagtttctttgtgtagagccttggctgtcctagaacttactttgtcgaccgagctggccttgaactcagagaaatccacctgcccctgcctcccaaatgctgggattaaaggcttgtgcactatgccagagtagaattatattattttaattactgtagatttgtagtgagatacagagtttttgtttacttggtccaaaaaaacaaacctggggtttatgtatactaggcaagcactttacatacatacacacatacacaacacacacacactcacacacacacacacacacacacacacacacgcatgtttgtatatgtatgtgtgtgtatatatatatatatatatgtatgtatgtatgtatgtatctggcacttggtgctgagcctttaaactaatacaaccattttatattaactacttaagcatttatatctgattatacagcatgaaataattatgaatatatcattaaatatgctgcattaatttttttagtgttttacttgatcatagcagtaagtcatatgcaggtaagtgcaattttcataggtcatttcttatatcatttgatttttctgcttatgcagcatctaaaaataattactgaaaaatcattggttgtaatttacctgccattactctttaaatgactcttaaaggcattcgtggctgttgccttttgagtgttctttctacaaaagaaaaaaaaagtaacttaaattggttttctttctttctctctttctaatttatagattttgtatgctgaaacttcttaaccagaagaaagggccttcacaatgtcctttgtgtaagaatgagataaccaaaaggtacataatttgtataatcatgggaggttggaagcaacatggcaggaaaaggtagaaattaatatgtaaataatatttctataaaaccattcaccaatagaaaaatatactaatgtgtttggggactaggggtgcttactaagtaggcacaaggcctctgacttcacttgacagtacctcataaatcaggcatcttgcctgacgtgcctgagcaggtaaggttgctgtcaagctgaagacctgagtttggttcccaagacccatgatggaaggtgagaactgcctgtcctctagcctccaagcatgaactgtggcatacacgcactctttctctaatcaatcaattaattgttttttttttattattatttaagaataagagctggagagttgactcagaggttaagggtgtttgtagtttatgactgtctatgaagttatttccttggaagtttttatgagacatctgctgtcagcaagtcttaccaccttggtgccttgttctcccacccacatgctagtcagcccccatcctacttagctctcaactccagtgcgctcaggtgcgatggccatagataacacactcagtctttcagatggagctgcacttaggtcagccgcacatcgcctaccacggttagttctgttagggcacggttagttctgttatctttcagtcagtcctgttttgccagtgtttagatcatagtaggctgtcagatatttttaaaagaaaaattaattatattctacctaagcctaagtctctcttcagattttggtgtctgttttcaaaatgacaaatttactatttgatggaagtctgagaagaagtgctggcagtaagggttgagttgggatgttaagtatcaatcgtaagttctttctgctgttgatttatatctactctgaattcagggtagaattttgtggcagggacgggttaagacaaggtctctctttggattggaaattaccatgactaacctcaaactagagatcctcctgcttctgctgagatcgcaggagtgtgctactctgctgggttttttggtttgtttggaacagtgtcatgtagtccagattggtcttgtctattcttctatctctgtctccttcctacatactggggtcacaggcagacacagccatgctacgctcgggactattctgttaggggcttttaccaaagtattttaaaaatctgtatagtcaaaaagagaatgaaaacatacagacacccaaaatcaaagccaagtaaatatactcatgaagtttattctcatgtcactgattcagtgattataatgtgacgtctctggtaggactgggtttgtactgtgctggggatcaaatgactagttctctggggttgtgctttctgctgcatctacagtcggaaagctacaatccatgtgtttatgtgtctttgttttagtgtgcttaaaattaataatcacttatatatgcttctcaaaaaaaaaaatctgatttcaggagcctacagggaagcacaaggtttagtcagcttgctgaagagctgctgagaataatggctgcttttgagcttgacacgggaatgcagcgtaagtgtcgtgcagcctgaggcagtgctccaggggctggtggaaacctgagcgcatttggagctattgtatgagactggtctggttaaattatgctttacttattgcacttatttattgggaggcccggagcacaggctgggacagatgtgtctatttgtatggaacccagaggtcatctccagggattgttcctcagtttttgagacaaggtttctcagggattgagctgatagagttagtgttggtgctagcggcctttactcactggccctactttttacatttttataactagtaattgtatgtgtttgtgtatgagatgtgagtgcacacatgcatgcgctagggcacacatttgggtataaaaggacaattttggggttgatttttttttttcttccacctttacatggttttaaacctgaaaattgtgaggaaaaagaccaaatccatgattgtctaattagagctagctttatcccaatactagataggacagtggacactggccaggtacatacctgggcctcccagaggatggcattgaattctgttagtcaggtactcatacagacagaacacacaggctatgtacttcccaccttctcccaatctgggagggggaggggcaagcattcattctgatgtacttcctgcctgcctatcaagcttgtcctgtgtagttgggacagccaatcttacagctcccagtattccaggaggttctctgtcctcgggcaggtggggcttacaggttaactttagccctcacccatcatttatgatcaagctcaggtcctcacgccagggcaagcacttgtacctgctgggctagcttgtcagcctgcggttttaaattactcctattagtcttgcattttatatgtcaatcttgcttgtttttgtttgtttatttttgagacagttcctggctatcctagaactctctgtagacaagactggccttgaactcagaggtctgcctgcctctacttcctaagtgctaggattaaaaggtatgtgccactaccaccttgcctagcatgtatatctcaatgtttctgaaatagggagcattttagagaattgtggtaaatttgttagtaagcaagtttattagtttttaggtatttcagaggtaataaaaataacttaagagtctttgaatttctaaacaggacttttaaaacagttataggtagtcagagctggagagacagctcaacatttcagaatgtgtaactactcttcttaacagaggacccaggttcatctctcatcagccagagcaggtggcttacaactttagggctgcaatgccttctgacttctgcaggcacctgcacacatgtactccacataaactcatgctcacatacacatagttaaaatttaaacgtaggcaagcatgatggcagacaccttgaatcgagcactcagaaggacaggtggatcttggagttcaaagctatcaaattccagactaaagaaggctatacagaacctacctttaaaaaaaaaaaaaagcccaagaatattaaatatacccataatgcattatttttgtttgcttgttttttgagacagagtttctctgtgtaggtctggctgtcctcgaactcagagaccctcctgcttctgcctcttctgctgacgccaccaccactaggctttttttcctattattcttatacagcaaacacaatattctttttggatatttagtgaagattaatgtctttttctaactaaaacatgcccctttttgttttacagttacaaatggttttagtttttcaaaaaagagaaataattcttgtgagcgtttgaatgaggaggcgtcgatcatccagagcgtgggctaccggaaccgtgtcagaaggcttccccaggtcgaacctggaaatgccaccttggtaaagctgctttccacgtttttttctgccgtctctttattgagtcttagtgagttagtgagtgtgtggatctatataagaacttagtagagagaggatggtgattgtacatttagtggctggacaagtgttctaataagtaagaattaaattcagaaagtcaggggatctggtgtgatcaacaggcgctttacaggccctttgcctgccttacaactccatctgctctgatgcaggtccgaaatgggcacagtgtccctgatcttttgtaagcaaattgtttgcaaattgcttcaacttaaccagtgtaagaataaagaaaatacaatgacttgctctgctccagtggatgatggagatcatggaaatacaccttctaagtattcttagaatgctgggattttatggctggcaatcctttttaaaaatgcttttatttaaatattttagatttttttatcattaattatgtatgtggtgggggttgtgcatgtgactatagatgctttgtagtctagaagaggctatcagagcccctctacctaaagttacatgtagctatgagctgttcaatgttgctactagaaacctctgcaggaacaattcatgctcttagcctctaagctgtcttgacgcggttcatggctttcagtcagcatgtaatgcagtccacgtgcttacatatactaatgcactgtgacattttcaagtgagattgttcatagttctttccctctgttcccgcccttgctacctctgtgcctcctttgtagcctccccttcagattcctcctcttatcatttatccttctcaaaaatacattttatgttgctggccttctagtgattataattagttttggaaaaataaatctgaaaaaatatttcacaaagtaaaccgtaggcattctttactgtttgacagaaggacagcctaggtgtccagctgtctaaccttggaatcgtgagatcagtgaagaaaaacaggcagacccaacctcgaaagaaatctgtctacattgaactaggtaaggggctcaggttttattaagttggaaatgatacttgctagattgtttggcttagagttttctcatagatgtgtatgtgttgcatggagttttggtaagtgaagatgaaataattttatgggttctatcatgaattatagattttgtaaaagttaaaactttacatcttgaagaatcttactttataaaaggaacaaaaggaaaaatgtctggttatgggtttaagtgaattttgggaaaaacttagtcataatagaaaaaaaaatgtttggttgccatagaatttagaaggatctgggataaattctacaagctctgtgttcaatctcaagctggccaaaaagactgagagctcagacaggcttctctatcttagcacatttgtcatcccagcatctaagaggctaaagtaggagaatcctcagtgagtttgaggtcaaccagggatacacagagaaccctagcccaaaatcatcgtcatcaccatcattgccaccaccactaccaccatcaccatcatcataatagtaaataatcaaattgggaagaatggtggtgttttgagttccagactaccatctgtctccatcaacagcagatctataaaaatatcccagagactggggagatatcttagttggtgaggtacttgtcacctaaattcaatccctacaatctacagggtggaaggagggaaatcagctccaacaagctgttctctgacatctacactgcacatgcatgcacatacaagtaattatggattactaggagtagtgcaaacgttatcggctaatattcaggagcacttgattagaatataggtgctattgtagtttttttataccttatctaaaatgtcagtcctgaggtgatgagaaaattaacttacaaagaagttaagaatttggacataggaagctggctttggggcctgtgctttcggccacttctctgtattgccacatgtgtctgtacctgctacatagtgggtattaattataaatataataaatatttctggatgaactattatatgttttacaaaaagcagggtttttttggtttgttttgggttgtttgttttggttttgtttgagccttaataatcttgactgatttttgggttttattttctttgtttttttctagactctgattcttctgaagagacagtaactaagccaggtgattgcaggtgagtcaaagagagcctttgtctgtgaagctattgtcatatctaattagtattgaggagcctagatttagatcatagtattagaaaaaaccttaaggaccatttagttttatctactttattttctgggaaatctttttttgtttgtttgttggatactttttttgtttgtttgttgggtttttttattatttatttactttatgtatatgagtacacttctctgtcttcagacacaccagtacatcccattacagatggttatgagccaccatgtggttgctgggaattgaactcaggacctctggaagagcagtcagtcttcttaaccactgagccatctctccagccccgaatacttttttaatgccaaacgagttttagataacagtggaagtcagcatgcacttgtttctgccagatcgttgttctctgagtttctcatatatggtaataattacttattttggggtggggtctgtctatagagccctggctgtccaggaactcactatgtagacctctaagtctcagaaatcgtctgctgcttttcaagtcaccaaaggcatccaccactatgcctgacccaaacatcttttatttagtttagtttatgtatatgagtacactgtagctgttcaaatggttgtgagcctttcatgtggttgttggaaattgaatttaggacctctgctcgctctgctcggccccgcttgctcagtccttgcacacttcagcccaaaatttgtttattattatacataattacactgtagttatcttcagatgcacaagaagcggaggtctgatctcattagaggtggttgtgagccaccatgtgtttgctgggatcaaacccaggtcctctgggaaattaacccatgttcttaaccctgaaccatttcttcattactccaaggtgttggaccatccactgagtgtgcttataggttgttgctctaaaggcccccacaacctcgaaggaaactgtctctccctcagaatctatcagttgtccatagctccttagttaggggtgtggctcatgagcccctcccctctctctgctagaatgttgataggcttgatcatgtacagatgttgtgtaaaccaaaattgctatgagctcatgtacagtgcctctgtcatgtccaatagacactgttttgctctggtctttccaacttacggttcttagaatcttttttttttttttttaatgtggtgtgaacctcttttttttaaggtttatttatttattatatgtaagtacactgtagctgtcttcagacaccccagaagagattcagttatcattacagatgattgtgagccaccatgtggttgctgggatttgaactcagggccttcagaagagcagtcggtgctcttaaccactgagccatctctccagccctcttaagagtcttttaaccccttctttatcaatggtctgtgagcatgcttgcaagagtatgtgagtgtgtgtgtgtctgtgtctgtgtgtgtgagtgtctgtgtgtgtgtttgcatatctagaaagcaacattctacactactctgaccttagtgactgtccttggagaacagatgtcagaaggtgagtcagtcagctcagttgttccagccctacctagagacacgaacataattgatcttgcacatttgactgagcatagaatttcttattaggggttgtcttttcccctttagtgtgagagaccaggaattgttacagaccgcccctcaagaagctggagatgaaggcaagctgcactctgcagaagagggtaagtcaggccttcctgacataatgacactaaggggcagtggagtgatgccgttccattattcccatcatctgaaggccatttgccaaatttatttatcatttatcattcacaacatctttttaaagaattaaaatgtcgggggctggagagatggctcagtggttaagagcactgactccatttccagagatcctgagttcaattcccagcaaccacatggtggttcatgactgtctgtaatggggttcaatgccctcttccagtgtttcatacataaaataaataaatcatttttttaaggaattataatgccattattttttcttcagctgccattgtgagatagtgagtagtactagactggggtggttatagtaatatcttgtgtaactaaagctgccaatgattttttttttaagagttctatgtaacccagagcaatttaaccatacttttgtttaagccttccaagctggaactaatctgcttttatttcaatcttaagagactatgggggctggtgagatggctcagaggttaagagcaccgactgctcttccgaaggtcctaagttcaaatcccacaaccacatggtggctcacaaccatccataatgaaatctgacatcctcttctggagtgactgaagacagttacagtgtactcacatataattaataaataaatcttaaagaaagaaagaaagagactagggaaataagatatgtgctctaattcctgtgtttgagaaaatatcttaatctgcacaataggattgtatgagctagatcttcagtatatttggtagtttatgattttagctcctctaaagaagccactggaaaccagttagtggtgatggaagcctttaatcccagcactttggaggcataggcaggtgaatctctgtgagttcaaagctagcctgggctcatagatttctcagacagacagggctacacagagaaaccctacctccaacaaacaaagaaataaaaaacgccagtggactggggctggagaactggcaaagcagtgaagagaacttgttcctcttgcagaagacctgggtttgattcccaggacccacactgggtagtttgtaagcatccaaaactcgagttccaggagatctgcagccctcttttctcttctttgcgcaccaggcgtgcctgtggtgcacatacttggatgtaagccaaaacacatagacccttatttttttttttaagaacatctaaaatttaaaaggtaaataaataaggttagtggattggtttttactccccagttgtatctggtatgtagtttctcgtgataattccattttaaagaaccttcttattttgtgtatttcagctgcttgtgagttttctgagggcataagaaacattgaacatcatcaatgcagtgatgatttaaaccctactgagaatcatgcaactgaaaggcatccagaaaaatgtcagagtatttctatttcaaatgtgtgtgtggagccatgtggcacagatgctcatgccagctcattacagcctgagaccagcagtttattgctcattgaagacagaatgaatgcagaaaaggctgaattctgtaataaaagcaaacagcctggcatagcagtgagccagcagagcagatgggctgcaagtaaaggaacatgtaacgacaggcaggttcccagcactggggaaaaggtaggtccaaacgctgactcccttagtgatagagagaagtggactcacccgcaaagtctgtgccctgagaattctggagctaccaccgatgttccttggataacactaaatagcagcgttcagaaagttaatgagtggttttccagaactggtgaaatgttaacttctgacagcgcatctgccaggaggcacgagtcaaatgctgaagcagctgttgtgttggaagtttcaaacgaagtggatgggggttttagttcttcaaggaaaacagacttagtaacccccgacccccatcatactttaatgtgtaaaagtggaagagacttctccaaaccagtagaggataatatcagtgataaaatatttgggaaatcctatcagagaaagggaagccgccctcacctgaaccatgtgactgaaattataggcacatttattacagaaccacagataacacaagagcagcccttcacaaataaattaaaacgtaagagaagtacatcccttcaacctgaggacttcatcaagaaagcagattcagcaggtgttcaaaggactcctgacaacataaatcagggaactgacctaatggagccaaatgagcaagcagtgagtactaccagtaactgtcaggagaacaaaatagcaggtagtaatctccagaaagagaaaagcgctcatccaactgaatcattgagaaaggaacctgcttccacagcaggagccaaatctataagcaacagtgtaagtgatttggaggtagaattaaacgtccacagttcaaaagcacctaagaaaaataggctgaggaggaagtcttctatcaggtgtgctcttccacttgaaccaatcagtagaaatccaagcccacctacttgtgctgagcttcaaatcgatagttgtggtagcagtgaagaaacaaagaaaaaccattccaaccaacagccagccgggcaccttagagagcctcaactcatcgaagacactgaacctgcagcggatgccaagaagaacgagccaaatgaacacataaggaagagacgtgccagcgatgctttcccagaagagaaattaatgaacaaagctggtttattaactagctgttcaagtcctagaaaatctcaagggcctgtcaatcccagccctcagagaacaggaacagagcaacttgaaacacgccaaatgtctgacagtgccaaagaactcggggatcgggtcctaggaggagagcccagtggcaaaaccactgaccgatctgaggagagcaccagcgtatccttggtatctgacactgactacgacactcagaacagtgtctcagtcctggacgctcacactgtcagatatgcaagaacaggatccgctcagtgtatgactcagtttgtagcaagcgaaaaccccaaggaactcgtccatggctctaacaatgctgggagtggcacagagggtctcaagccccccttgagacacgcgcttaacctcagtcaggagaaagtagaaatggaagacagtgaacttgatactcagtatttgcagaatacatttcaagtttcaaagcgtcagtcatttgctttattttcaaaacctagaagtccccaaaaggactgtgctcactctgtgccctcaaaggaactgagtccaaaggtgacagctaaaggtaaacaaaaagaacgtcagggacaggaagaatttgaaatcagtcacgtacaagcagttgcggccacagtgggcttacctgtgccctgtcaagaaggtaagctagctgctgatacaatgtgtgatagaggttgtaggctttgtccatcatctcattacagaagcggggagaatggactcagcgccacaggtaaatcaggaatttcacaaaactcacattttaaacaatcagtttctcccatcaggtcatctataaaaactgacaataggaaacctctgacagagggacgatttgagagacatacatcatcaactgagatggcggtgggaaatgagaacattcttcagagtacagtgcacacagttagcctgaataacagaggaaatgcttgtcaagaagccggctcgggcagtattcatgaagtatgttccactggtgactccttcccaggacaactaggtagaaacagagggcctaaggtgaacactgtgcctccattagatagtatgcagcctggtgtctgtcagcaaagtgttcctgtaagtgataagtatcttgaaataaaaaagcaggagggtgaggctgtctgtgcagacttctctccatgtctattctcagaccatcttgagcaatctatgagtggtaaggtttttcaggtttgctctgagacacctgatgacctgctggatgatgttgaaatacagggacatactagctttggtgaaggtgacataatggagagatctgctgtctttaacggaagcatcctgagaagggagtccagtaggagccctagtcctgtaacccatgcatcgaagtctcagagtctccacagagcgtctaggaaattagaatcgtcagaagagagcgactccactgaggatgaagatcttccctgcttccaacacttactgagcagaataagcaacacacctgagcttaccagatgcagcagtgctgtgacacagcgtatgccagagaaagcggaggggacccaagcaccatggaagggtagcagcagtgactgcaataatgaggtgatcatgatagaggcatctcaggagcatcagtttagtgaggatccaagatgctctggcagcatgttctcttcacagcacagtgctgcccaagggtcaactgcaaatgcaaactcccaggattccaattttattccaccttccaaacagaggagtcaccagtgtgggaatgaggaagctttcctaagtgacaaggaattgatttcagataacgaggaaatggcaacttgcctagaagaggataatgaccaagaagaggatagtataatcccagattcaggtagttttgttggtttatttgccccagtctacagaagtgggctgaacatacacagtcaaatctccttcttggggctagagagatttcgggtggttaagagtaggtactttgggggttggggaaaggctggagagatggctcagctgttaagagcactggctgctcttccagaggatgtaggttcaaatcctagcatccatgtggcagctcacatttttttggtcacttcaattccaggggaacccattaccctcacacttatacatgcaggtaaaacacaaatgcacattaaaaaaataaagtggtgctctatctaagaccaagttgaattcccagcacccatttcaggtggctccccccggtgtctcctgcattagtgtataagtagcccacacagacatacacatgattaaaaataaaatattttaatgctgtcatgcagccagaatgcctgggggcatgagcttgagtaacctaattttcagtagacttgattctactttttattgcagaatttttctgatttgtttgggctttggttttggttttggttttagacagtttgtctatgtagctctgactagcctggaacagagatctgccagcctctgcctcccaaaatctgggattaaatacattcattacctcacccagcctattgtgggagttctgaaaggaaatccagtgtcccaaatgtagccaattatgtgacatgagggagaagtagaagctatacaaggggaggaacaggcactgaggctgcagggttcgcggtccagttttacatctgagtctctgattgtgttgtcattttatgtgaagaggcatccggatacgagagtgaaacaaacctttctgaagactgctcgcagagtgatattttaaccactcaggtaagaagcaggcacgcgtttgtgatgtcctctggatagtgtaaacctacgtgctcatacatggtcctttgtttccttaagggacacttctaaagcatctgggtggaactcactaccttttaactgtagaaccccagccagatctaaaaatcctacttgccttatagcaaaattatatgaaagcactattgtatcaaagggatatgtttattctctgaaccaaactgaagcctacaggattctttccactagaggccatcttacctttcactgtattatttcttttaatttttgtcttttattatctagttgcttgttagtatctttctacttggaaacgaatggccagggtattcattcctgcacctggtaactcccacagatgacgtgagtgctcctgcactcgaggcaggacaggctcttgggaaaaacatcattctcacagccagatcctaggtttatcgcctaactttctttttgattaaaaagaaaaaaaattcctaaacttgcatttcaaaccttagatttgtctaggtatttctttcctgtgtttatctttcactagctgggcaacttctgagggttccccatcctgtattcctctacagagtcctaggcagagtgtacagcaagtctggagcaagtattggtcagactctctgtgcctgaccatgtgatctcagttaattggcttattttctctgaattaaaatagcgatacttttttttggttttgttttttttttttttttttttttttttttttggttttgttttttgagacagggtttctctgtgtagccctggctgtcctggaactcactttgtagaccaggctggcctcgaactcagaaatccgaatcagcctgcctctgcctcccgagcactgggattaaaggcatgcgctgccacgcccggcttcttttttttaacatacatatttgtatgtatgtatgtggatatgccaccagggtaaatgtgtggaggtcaggtgacacagtctgtgcggcagtgctgaggatcaaatcaggtcctcctgtggtggcaagtgagctgactcactggtcccgtggtgtggtttgaatcatcttgctatagcttctgtttctcttaaagcataaatgtgcttttagctgcagcatacgagtgacttttcttccccttcttttttttttttaaagattttattttattatatgtaagtacactatagctgtcttcagacgctccagaagataatcagatggttgtgagccaccatgtggttgctgggatttgaactcaggacctctggaggaacagtcagtgctcttaactgctaagccatctctccagctgtcttcttttttttttttttttttttttttttaagatttatttattgattatatgtaagtacactgtagctgtcttcagacactccagaagagggagtcagatctcgttacggatggttgtgagccaccatgtggttgctgggatttgaactcctgaccttcggaagagcagtcgggtgctcttacccactgagccatctcaccagtccccccgtcttctcttcttaaaaagtacaaaactaaatgaaactgggaattcttagtattactaaggtcactttgttgtcaccaaagacagcatcccctgttggttccagcaccccagtggcagaggcaggtggatctctgagttccgggccaggctggtttacatggtgaatgccaggccagccaggcctacaaagtgacaccttgtcttaacaaaataagacaaaaattgattaaaagacttaaatcttctcatggtcctttctggatttatttggggctctgtcaatatgtctgtcacctaattctgtcccttagctgcttgttttttaagtttcagctttttattccatctgtcttagccatactgtattaaatctgacattcaatacactactgtgttgtttcttgggtctctgatcctattcccagaaagatgctcattatttgatcaggattcattgttttaagtgtttttatatcaagtatctattcaagacaggtagctttgatgttgagttgcacggacaagcaaaatgattgcaatggactttccctatgttcatatagaactgaagggtaagagatgatacagagtgcctcatgtggaatcactgatatactttgtgatgctcatggtgtgtgtatagtatatgtgtagtgtgggtgtgtgtgcagtgaaggtgcaagattgtctcctcccacccactatgtaggacctaaggattaacctcatgtcattaggcttggtggcaagtaccttttcacactgaaccatcttgccaaccctcctacctcccccccccccattttgtaactcaaagatttaattcatttgtccattttcatattaaacactggctgtgaagttcctctgtgatgggcagtggtacgggacttagggttgcataccttgtacgcccatgaccttggcattcccagtgtgagggaagcttagacaggggaatctcaactttgaagctagccgaggatacatagaccgctcttcaaaacaaaaagaacacaaaatcaacaaggattcctcctcccatcagggaagttgtgtgttcccctgaatgtagtgatgctttggcagcctgagccacgtaatgaggcacactgctgtcctgatagacaggtattgctgggctttgaaagattagaaaagattaccaaatgggaaaagaggggatgtgggaactgaggcaaagatacagatggcctgaatgcatagggaccgccactgagcagtctagtgtctctagaaagctgggctgatgggaaatgctgggcgtcaataacagataggatcaagctgtcctcagactttggaatggtttatctaggaatctgaactttgacttgagggcagtaatgacgaagttctttagcgctgaaaaatactagcttattaactgagctgtgttacgccatttgaggcccttttggaaaaaggattcttgatgtaaagagataaacgtggtaacctgtctggctttgtcctccctggtgcatttgagcacctatacctatagtagaattgtcttaagttttacattccttcctgtaggaaaagccactgcagtagtggtccgattacttttctttctgattttctggtatgtttactggccatgtggaagttagatggcatagctgtgagtgttattaattcagcttttaaagaattggtctgatatctgtgtggggccttggctaggatttgatcagtgatgtcagtactcacgggtaccacgtggtggcattggtggcactgcagatgttggcagcattacagtctcagtagcagtgggaacctttgtaaagctcgaaattacgttttgtttatttggttttttcatcataaagttctcctgggaactatgaatttatcatagctgtaggaagaatatggcttgattttagtggaaagcaaagtcactttcaaggtcaaaagacagagaaggtgaaacagattttgttcccctccagcagctgaaaacctagcatcggcatttcttctaaaagtgatgaagagacatacatattgggaaattctttatttgtccacatcctttgcttgtcaaataccttagacttgctagattgtctgtgacaggatctcactgtgtagtcttggctatcctggaactcactatatagaccaggatggcctcaactcaactcaactactgctattaaagctattatgcttagctgaaattactctttttttttgtttgttttgttgttgttgttgttgtttgtttgttttgttttctgctttcaagacaaggtttctctgtgtaacaactctggctattctggaactcactttgtagaccactctgcaatctggccttgaactcacaaagatctacctgcctctacctcccaagtactgggattaaaggtagctagattacgtcttaaggtggatcagtaaacagtatgaacctatgggaaagaagagttcattttcttgaattgaaaacagtaatttgggctggagaggtggctcagcggttaagataactgactgctcttccaaaagccctgagttcaaatccctgcaaccacatggtggctcacagccatctgtaatggcatctgatgcccttttctggtgtgtctgaaagtcagttacagtgcactcacacacgttaaataaataaataaataaataaataaatcttttataaaaaagaaaagaaaaagaaaacagcaacttgttataggctttctagaacatcgtaggaaattattcaacactgaatccatgtaaaaactaaatttacttggatctaagcacagcgatgtatcttttcactcagctacaaatacatttttaaattttaaaaataataagaaataaataaatggggctggagaaggggctcagtggttaacagaccactcagttcagaggacctggattcagctccagctgatggcttcaatgcccttccgtgacctctgagagcatcgggcacgcacatggagataaatcattcataaacctgaacttaaaaaaaattttttaactaggcattttgtagactaattaaatgtcttatctcacagtagcgagtctttagaacacagtttatatagtttgtgaacagattcttgtgaatttaagcttaaagtactgtaattaccccagtctgtcccccatctttaaaagaaaatgaggagctacagtgaagcagatctatctggaagagctcgagggtgcactctcctccaacatcattttcaaacaattgcaaggtcattaaccacatgagtatggttggattaaagggtattcagccagaactcataattccatattaggtgatctcagctcccatgctaaaattaattgctgtgacatattcttacttcgtggcacatctctcagagtatataactttcttggtgttcttgtttggttttgcagcagcgggcgaccatgaagtataacctgataaagctgcagcaggaaatggctcacctggaagctgtgctggagcagcgtgggaaccagccttctggccactccccttccctcctagcggacccttgtgccctggaagacctgccagatctggaaccaaacatgtcaggagcaggtgtgtagtgctgaacaaatgccagtgttacaagcaaacttcttccctccctcgaccctctgtttccttcgaagagtgaggactgagttccaacattgtgtgatctttgctcagtgcaggtttactgagttgctccacgagtaacttgggaaccttagacctagtccctgctcacgagagctgtgccactgagagggacccaagggaatcttaattcatgttcttctctgggtgtttagaaggagatgctatggaccccataggaaatagaaatagttcttgcacttcgttgttagagagtagttataggtagccccatcatttcagaaagccatgtgaaaataagacccattcagatgaaatccttacagtgatagatcacaaagtgaagatctgcttcctgggttttctgatttataagacgagatctttggtttcaggagcttcaccttatgttttcaagtagaaagtgggctttggtggtcatgttggtaatcccagcagttggggtgtggaggcagagggatcaggagtaagggaagttttcatttagagaatcctggtgtgcggcaggccacccacaggaggagttggtgcttaggaacagatgagggcagtgagccttctcggagtttcttcactgaagtcctacatgacttgctgctcaagttcctcctgcaacccttcctgtacagtcctctggaccctgaggccctcctttgactattagggactcaagtctgttcatcattcagtcaagtgaccttggtctccacacgtgccttgtcatatttccatgctcagaaagaaacagtagctcatgcaagggaagctgcttgtaaagctctctccttgaatactttctttgtaagcgcatcttcatttagttcatcaccagataatgaagcccagagtcccatcccctatacagtaatctctgggtactgtcactgtcattactgtgaaaatagacaggactttcagtgctcttacacaagataagacttgttagtgtctggctttgaatatctgcctaaacctactacctcatatttggcatacacaatagagggttggttgaaggtttgtgttgttttgtttttagctcccactgaatgtctcccgataaagtgttcctttgtggctcatttctaaaatacttgactgtcatgagcaactccagagttgagcctttcttaccttaggctgatgtattaagagaaactcaatttcttttcccttttaaaagaaaggtctgacagcacacacctttaatcacggcactcagagaggcaggtgcaagaggatctctatgagttaaggccaccctggtctacatagcaagctctaggacaggactatatagagataccctatctccataaacaaaaagatttttttaatatatatagacttaagcactagggttaataaggattacagaaaggtacaactgctgtgtgggcctgacagttacctgcaaccccagcctaagaaggcagagacagggacccccagatcaagctggctcgggagacttgccaaacagcaaactggggttgagtgagagacccaacctcaatgagtaaagtaaaatagccatggagagggccagagagatggctcagcagttaagagcatttgctgttcttccagaggaccgagattcaattcccaacactcacatggcagctcacaactgactgtaactcctattccagaagatctgacactctcacacagatatacatgcaggcaaaacaccaatgcacatgaaataaaaataaattaaaaagagccatagagaatcatttttttatatcaatatctggcctccaaacactaatttacatgtgtgttcacacatgtcacatacaatatgctgtgcacatctgagcaggtactttaatcactgagccgtctccccagcccatggtcttaaagatgatgaaatgcccttccctggggtcttaacatcaatgcccagctcttctgcataggttttcctgtttgtctaaggtttatcccacaaccttcagaaatatttgggcagaaatttgtacacacacattatacctctaaggattttcttctatcgtgtcatattccctgtcattcagtgagcaaatattaacacttatgagatcatggctcattgtggtaaaagtaattttcagatacatctgagcttttctagctggtagcatatttattcctaggaatacttgttcaatttttctaggatcctcccctttgaattctgaatgagttgggaatagttggaataaacatcttatgtaacctgtgtctctctgtgtgtgtgtgtgtgtgtgtgtgtgtgtgtgtgtgtgtgagtgtctgtgtctgtgtgtgtgtgtgtaagagaaagagattgagagagatttgttttctcttttttaagatttatttatttcaaatgaaaaaaaatatttcatttatttatttcagtgacattttgtcactgtcttcagacaccagaagatcccattacagatggttgtgagccaccatgtggttgcttggaattgaactcaggacctctggaagagcagtcagtgctcttaaccgctgagccatttctccagccccttgttttctcataatagcaggattctgctgtgtgatcctaactgacctggaacttcatgtctctttaatggataaaagatatttaatttaaatatacatatttaaatttttaaatagttttgttgtctgcatgtgtacttgtgagcacctggtgtccacagaggccagaagagggcattggcgctccctggaacgaaagttacaaggctgtaagacactacatgaacatcatacggttctaggaaccaagtgcaagtcctctgtaagagcaacaagtcctcttaacctctgagtcttcttttttggactgtttttgatgcttaaatattctactatacatgattgctccacactttgaattgcaatgccttcttttatttacgtgtttatttggacaaattctctctagactgtgctaagactccctctggagaccaggctgacctccaactccacactcacacacccttgtttgtttgtttgtttgtttgtttgtttgtttgtttgttttaagagatttatttattatgtatacagcatatatgcctgcaggccagaagagggcaccagatcccattacagatagttgtaagctaccatgtggttgctgggaattgaactctggacccctggaggagcagacagtactcttataacctctgagcgatctctccagcctgctagtttgtttttgagatagggtctcacagtatagccttttctgtcctggaactcacagagatttctctttctgtgcctaccaaatactaagattaaaggtatacactgtcatacctagatttcaatgactatttaatgaatagaagatacttacttttcaattaattgtttttgatgtttaactatttcttctgctgtgcatagtagcatttgcctctttagttcccagcccttgggaggcataggcaagtggatctctgtgaggtccatgccagcctggtctacagagtgagttcatgtgttcctttttaagccatttctcaaagggaatagcacctgctagagccttaaccttgagtctgatatgattttccctttcctgtgcctttcattattatttcctattgtcctagatttcttatccagtaccatgaggtaggtgcatgcctgtgtgcgtgttcccagtaattgaaagtatgaggcaaatgtcatctcatctgactcttccctgcgccacccacccaccacctccgcccccaccttctccttccactaaagctccagcagacctggtgccatcctgatgagcttggtgcttccagtacttttgctttcctggtggcagagattttggcataggtcagtttgcttccaagataagaatacattatatatttttgttttcttatcattatttagtactagctggtgctatcctttgtctgctgaactagtcatatcagtaaaattctgtctaatatctttgtttaaataccagctttgggacttggggcgtacttcagttggtagggtgcctggctaacagtgaagtgaaggagttggtatctggtacctagaatcagatgtgatcacacacagctgggatcctgcagcagtggcggccggagatcaggagttcagtatcatccttggctgtgcgttctaccactgccatccgtgctggcacaggctggtaaaactctgagaagatgacagtcctgttacacagaaaaagagaagatgagtttgattgtcatagattgctgcttttaaaaaaaatcaatatcctcacctgaattaagaccatcagaacaaatgagtaaaatagatttttctcattccatttaaagcaattttaacttcaaagaacattaatgagaatcctgtaagccaaaatttgaagagcgcttgtgatgacaaattccaactacaacatctggagggtcccaccagtggagatgacgagtcagggatgggaaggtaagagacgtccgtctgtggcatccgagtgacatctttgttacactgaactcctgtcaactttcctcctatccctgagctgtggccatgactcagtcagtcatgtgatttctatgcaaacatggggccctgagttcagatcccttgaacccatctaaaagttatctgtaactttgagctggggttcctggggcagggactgagacaggcagatcctgcgtgcagtgagcttagattcagtgagagatgggcatatagccatatagaatcccaacgggtagacttcctctagcctccaagtgcaaccacaacgggcacctacagccatattttaaaaaaaaaaaaaatgcaagaagcagtaacacaagcctataatggcaactctggggatacaaagacagaagctctttatctttagttctgttggccagcctgtttatccaaattggttagcttgaaagacaccctgcctcgaaaataaggtagagatgaatcaagttggattctcagtgttggattgcgccttcttcctgctcccttatgcaggtaatgtttctcctgtcctgcctgggtttgttttttgttgttttgtttaggggttatgttggttggttggttggttggttggttggttggagacagggtcaccctagatggtgtggaactttctgtagaccaacctggcctcaaacttggagtagtccttcttccaccttcagaatactagatgtacacaattacagacccttagtgaccctaggtcacgttcctttgtcgatttggatataggctttgttgtgtatgtacaggcctaagctacaacccgaaaaaagggaacttagatctaactttgtctttgaggttagaatgtaatgtaactgaactaaaacagaagcctgctacctgatggtagtctccgggcagaccttgccctgattgaattttttacctccctagaaaaagtgtgtctcttaatttactctgggaaatattcaaaatatcattccaggatatatatttaaatcaccattgctaaaatctatacaaaaaaatctatattaaaaaaaaaaaaagactgtcacgttaaaattctgagttcaggaattgggggaatgtaccatctcagctggcttttattttcagaactacttaacacctatcaggacagacagacatcttcagcactccaagcaacgaaagaactcttgttttctcaattgctattgtgtctgtatatccctttgggaatggtgacaggttgtcggtaatctaacaatgctctttcccttgccttgcacttaacagaggacatctcaaggctatggtactagcattgtgattgtgaccaaataaataaataaataaagtcagcttccttgggcactgaagctgtgtttagtagtaagcatctcattggcatactgtcatgaacactccaaacactcgaggaactacttactacacacatatattattatctttaagggatgtgatagtggggatccgaagcaggccttcccatgtgctaggcaagtgctttagctctgagatatgtgcttacccctaagagttgacttttgattttgttgtttttaatttatttgtgtatgtatttggagacaggatctcagatagcccaggctggctttgaacttaccatgtagccaagggggtctttggccttttccttgggaggtagactctgagtcatgtgctactattcctgacttttattttattttgtgtatgtgagtggtttgctcaaatgtatgtctgtatcatgtgcatcctggagctggaatgtttattggacagctgtgaactaccatgtgtttgctaggacttaacccaggtcctctccaagaaggaaaaaaatgtgctgtaaagtattaagccatttctccagcccagcctcttgtttttggacatcttaagggcagggaataaaagtgatactctaaattcttccaaaattaggtagaaataaagtatagagatgtcaacatggctcagttttctatctccataagaggcctcacatgcatttggactcaaggggaatatggaatctaaattaggaatagtgggtatttggcaaaaagaaaaaaaatgctgacattcttttcaacagctccaagatcagcctcaggcctcagggcttcagaccagctctgaggggctgtcatgtgtcagcagcagcatgttaggcagcatgaatccaagggtttttttgctggtcatcccctatttctctgacagtcagatgttctagtcatacgttggctgctgagggggcgtgatcaggcctttcttttgtttttgttttttggttggttggttggttggttggttttggtttttcgagacagggtttctctgtatagccctggctgtcctggaactcactctatagaccaggctggctttgaactcagaaatccacctgcctctgcctctgcctctgcctctgcctctgcctctgcctctgcctctgcctctgcctctgcctctgcctctgcctccagagtgctgggattaaaggcgtgcgccaccactgcctggctgatcaggcctttctgagctggtagtgatggttttcctctttcatccctctccccaggccttccccttttaaatctccgttggcaggcagtaggggctctgcacatggctgctctaggcatcttcaaaagagaaactccccctctcaggaggagctcctccagcctgctggatcagaggcgtcatctgagccacacaattcaacagggcagtcttgcctgccaaggcgagagctaggtaatactccatcttttttaatggaaagactttttgtttcactgtctgctgttgtagtaggtcttcaaatgcactggcttgtggatgtttgttatcctaaggtaagtgcacctttgaaaaataactcgagttgcagtctgagtagcaagtctgaccacggtgggttagcaataattgactatggtagactctgtcatcgacatgtttggcttcatctgttagaatcttaagacccagaataaagttaggagtctgtcctttgtcacatcctaaagtgagctatctttaataaatataaatgactgtcttttatgcttcataaatcacataaaatgatatattttattaattgtaaatcagtttttgttagtaaagaaaggctttaattactcatcaaaatgcatgatcataaaaacactatttggcatcagatgcagtgtctggctgcgttcttacctcgcttacttttttgtttaagatgtacttacttacttttatgctgtgtatatgggaattttgcccacgtgtgtctgtgcactgcatgtgtacctggcgcctgttgaggccagaggcgggtgttttgatcagtgacgttttcctaaatctactgttcttaacatgcttagttagcacctgttaagtgaaaaatgtaatgattttatttatgattttaaccttctgttccttcctcatgaaaatcttgtatattgactgcccccaaattggacaatacagtaaataagagtatttaaaatcacctcttctcctgtccagttatgagtaataaaatattgctattttggctggtcatggtggcccatgcctgttagtgccagtacctgattggcagaggcaggaggatcactgtgagtttgaggccagcctggtctacacagtgagctccagggcacataatgagaccctctaccaaaataatagtaataacaatactaattcctgtttctttagatattttactcagttttatttttttaaatatagttctaaaatataatacagcgggacaggtctgtggtctcagtagctgatgtaggaggattgcctcacctacagttcaaggccactgtcatcagtgacactgcagaccctatttcaactaatcaattcaaatttaaaaatggttttaaacttgttatgtagcccaggtaagccttgaacttgtgattctcctgcttcagccttgagtagctggggttataggcccatgccaccaggcctgactacagactatatttctgaactggcaagatagcttatcagataagagcacttgtcaccaaatctgataacagggtagaaggagagagccaaccctttacatataatgccgtattattccttttagatttatttatttcgtgtatgtgggtgcactgtccctgtcttcagacacaccagaagagggcatcggatccccattacagatggttgtgagccaccatgaggttgctgggaattaaactcgggacctttggaagagcagatggtgctcttaaccactgagccacctctccagcctatattattctttagagaagttatggtaccatgctttcactactgtattttcttcttcttaacacaacttaatgggtctttttcttcacagaaactagaaacttcagttcaacattttctgccacttaagttgagtttgtcttccttgcagaaggaaccccatacctgggatctggaatcagccttttctctagtagagaccccgaatctgagtcccctaaagagccagcccacattggcaccacaccagcttcaacctctgcactgaaaataccccaaggtcaagttgctttccggagtgcagctgctgctggtgctgataaagcagtggtaggaattgtgagcaagataaagccggaattgacatcttcagaagaaagagcggatagagacatatccatggtggtgtcaggcttgacccccaaagaagtagtgagtgtgtcctctgtacctctctaactgtggcttgactttggctgccagataattagtataagtagtggcaatggataacctgtaggaagaaagttatttgaagaaatacttggtgaatactaggcaccttgtgaggtatgatagagattttgaatgtattggaatttccttttttttttttccaaacaaaacaaacaaaaaacaataactgagtaactaggtagagcagctctcttcagtaggcattgtcttccccctcagttcacatcaagtaaacttgtctgcatttctccagggcttgtctttatcttggctgggaacagcctgtctgtcctttctgccctgcaatacttaccccctcgcttactagggcttgggcacctcgggcccttgtgcacctccagagatggaaattgttttatactcactataaacattaagcccactgaacccatttttctctttaagctgcttatagattttaacaattctggggaatttatttctcctatagttaactgttacggtaatatataataacatgtcagaccatcgattggatttaatagtagatgccatttattacacactgagaggcaatattaagcaataaactcttacttaatagagccttcataggcgtggctccattccccatcctaacagctctccaggtagtgtgactcagcatagattctcgatggccccacgtgttccgccattgaaaaggcaaggcaagctttgctgccctcacagatgcagtatatccatacaagatgataacttgatgttgtcacttcacagtcccatgctccagcagcagttcctctggaaaatcttacacgtacttgtttgaatagctcctggtggacttccttgcacacagagaattccccttcattgaaatctttttgtttctttgtttggttggtttggtttggttttttggtttttcgagacagggattctctgtgtagccctggctgtcctggaactcactctgtagaccaggctggcctcgaactcagaaatccgcctgcctctgcctccagagtgctgggattaaaggtgtgcgccaccactgcccgctcattgaaatcttttattaccttaatcctttgtttttgagttcagctctttagagatagctagagtagtctaatcattttcgccttgggcaattctgagctgcagattaaactataagtgcttgggtacatgttttctttaaacaagcaaagaagaaaactttgagctctattcagacttgctgaagtgtgttaaatttatgatgaaagccactgactatattacacatgattaattctgaagcccatattaagatgatcttttcagcagttgcctgtctaactgaaccctgttttaaagctgggatttcagcaattaaccagttcagaattgctaatgacactggcagagggcaacagcaaaagttggaggagggtagcattggcttcgccagcctgctgttcttcagtgctcagtggcagtgtggagtgaggcagcacgggctggcttccattgcagtactaaggggcgcataaatcttggcgtgggtggggaaggctaggaaatgaagcttcttggtaagcaagcttatttaccaaacagtagctaccagttatttccactgtgcccataatagatatggttaatttcttttactgcctattgatttttatttgcttgatagataatagctaagggactctagatttcttttggaaagaatgagtctcttccaatatttttccttaagagagaattgatattttttgtactgaatctacaaatacctttgcttgagtgctttgtaactatcagagttgaatcttgactttaagctatgtattatctacaacagaactttctatataaggctggttacaactcagtttgagatgtagacttataaatttattagagtatagtaggctgtcattctgtaaagaaactcaagagaatcaggctatatgatctttggttataattccatggcttcttgtactatatagaactacattagaaagtttctctgacttatacatggttttgggggttttgtttgtttgaaggcgaggcattgtttacttgtgtgagacaagatctcactatgtagtcctggctggactagaactcagtatgtagactaggatggccttgaactcatggatctgcctgcctctgactctcaagtaccatgcctgactgatttacacatattgtcaatttttttagacttcaggcatgttttatgtttaaaagccaggatggggtaagcctgccaacctgggttcaatccccaaaatgcaaatgaaaatggaaggagagaagctattctacaatcctgtcctttgacgcctacacagacacgctgaagaacaagcacacacaatcaacatttaaacagttttaagagatgtgccttttatgagaatggagactcaaaatcagagtaattattactttaagctgtgtagcagaattaacagcataattcagtgtttgatttttgtttcagatgaccgtgcaaaagtttgctgaaaaataccgcctcactttaactgacgcaattactgaggagactacacatgtaattataaaaacaggtacactacaaacttttacaggctacgctgtatttacatcataagctatatgaagagctatgtcaatcaagttaagcatccctaacccaaaagttcaaaatcctcaactatttgaatgtagacagcatcggaaacggagaactccacttctcgtgggatagttcataggcaggatgtgggcatgggcagcacgtgtgtaccgttgccttcaggtgtgcagatgaagctgaggggaagggtgccacttaattgacatgcagaaggccctggatccgcagttctcacctgtgggtcctgaccctttggtgaggttgaacaaccctttcatggaggtcacctaagaacgtgtgaaaatgcaggtgcttatattatgattcataacggtagcaagattacagttatgaagaacagttatggttggggggactcaacacaatgtgaagaactatattaaaaggttgcagcattaggaagttgaggaccactgctctaggtactatctctagcaccataagtaagaaatgaccctcagattggccgtggagactcacacctgtgatctcaacgttcaggagactgaagcaggaaatcataagtttaaggccagcctaggctgtgaagcaagactttgtctcaaaaaataaatgaagcaacagcaacaaaatttggatttgtgctatgcatggaagatgtctcaatatatatgcaattttgctaaaaaaaaaatacttttgggcctagcattccagagtccttagcctatctttgtttaagcaagccatggatgaagtttcctgatagtcattcattgctttataaaggtggccattttgtttgacctactaatttgggttaaaatttggggagtggccaggcaaagtgctgaaccacttcctgtctacctgcttggagttcagtgcatatagaacagaccaaatcatggaagagcaagtgaggcagagaagaagtaagtcttctctcgaactctggagactagctagctacatgtggcctctggcttgagtgtggctgagtaagtcctctaaccttaatgtggaaaggggaaagagtgagccactcacttgtgtgctttctcctcgtttagtcttaattgtgcttgtataagatagctctgggagctttcactgactgtgtaaagtctgagtgaacagcagacattgcaggctgcttccctgcattaacacagcctgataacgtggagcaggtgaagcctttgaatattgtggagtgatagtctaggtgatatccgctgtgctgagcgcagtgcttttcatagtggcaactaatgagctcagagagcattgaaggacagatggagaaaagaactcagtgtagttccagggctcgagcaatggctcagtggacccaggtttgaccctcagcacccacatggcagctcacagccatctataactcttgtgctgggggatccagggtgcctgcgactttaggcaccaggcctgcatgagacatgtagacatacatgcaagcaaaacatacataaagtaaatataaaacaattgatttttattaaaagtgatgtttgacaaagtaaaggaatgagactgaaggggccaagatatccatctttaagcagctgaaaaattattgtcaggcttcagaaatttaaaaacaagccactattcctggggatgtaggaagtataaattatggctacactctaaaacctggctaacagactctgttttctggtgtactcgtgccccatctggggtatttctccccacagggctctaggcttttccaaggggcccaaggctctttgactctttgccttaagaaagctaaaatctaggtcccttcttcagtggatcgtaccagggggcagtgctcattacaataggtgccaggacaagctgtggcaagctaagtactattgaagaggggaatgtcgttgaattttcatacattttaagcagcaagtttggatgaaaggtgataaaggctgaaaagggagctttaaaatacaaattaaacctaaagtaactctttaaactcaaaagcaatacaacatttgttgcttgtgaactaaaatcggcttttatagcatttaaacaaaaagcttccaaaaaaatatgagtaattctgtgaggcaaaatggccacttctacttgcagatggcctgctgtgcttgggattcagttgaatacttttctcctgtttaaatggtttttttctgtttgcttagttcttcaaaggggcctttgaaacactaggcaataaacagattcttcagccactgcttattgaaatacaaaaaagggatagctataacaagacttttcctgaacctctcaggaatacagggggtaagggtcccctgggagaaattgcctgggtgaacttctttcacgtcggcatttctgatttaggatctttttttcaaatgttggacttcagcactattttcttctctcacatattgctgtctggtaaaatagatctcagtccatatcagtcagcactacagcatgggtaatcaacgggatcgaactcttcagctaaccttggcatctcaaagctgagccagtgatcctctggtcttaacatggcgtctgcttcttccaaacttgtaaaccccacacctggttgtctgtcatcagaggtgaatcaccattccagactgatctcgagctagggctggggctccagctcttcaggggcagcgcctcttattcgctcttcctcagcctttgggtgtttttcatttttgcagatgcggagtttgtgtgtgagcggacactgaaatattttctgggcattgcaggaggaaagtggatagttagctattcatgtgagtacaatattggggggtgggggcgtgtctctgctgctccctctagcacctcagagctgcattttacacctaacattaacacgtgaggtttctgctgatgccaagtctgagcaccaaagggtctctagtggtatcacaaaactagctttgtctctaggtgcgtgtcgctttgttcagatccactggcattgctgagaaagtgatttctttcataaccagtagggcctgatcttctctgagcagagctagcatatgaacaaggattcatttaatagtcggtgggaacccatgcacagcagcacttttataatgtttacactaggtagcagctgtctccagagggaggtctctgccacgagccttgtgaatcgctgagcttcccacctccacagaagggacgtgttgttctgttctctgtgacttaccttctctgtattctcttcaggggtggtccggtctatccaagaaagaagacttctgaatgtggtgggtacctgatacgaactgatctgggacacctcgcatgggtcaggtggggtgtcaggcggaggagggtgtgggtctgctttcttcctcaacaagggagtgatgcagaacaggccaggaaatgtcatattctcaggcattctaggttttaaaggaaagtcttttcttcggagaaagaattttacagattaaaaattcggaggaacaaataatgaaccacctccagaaacagatggggtgatgcacctctgtgaccctggcatgtagcaagagcctgtctttgggttgattggtttggtttgttttgttgttgtttgtttgtttgtttgtttgttttgatacaaagtttctctgtgtagccctggctgtcctggaactcactctgtagaccaggctggcctcgaaatcagaaatccacctgcctcagcttcccgtactgggattacagcttgcacctggtttaagagcctgccttcctctctctctctctctctctctctctctctctctctctctctctctctctcccttccttccttccttccttccttccttccttccttccttccttcctttctttctatcagaaacagggtccacagtaatataaatgataattattatcattgttactgttattatttgagtttcatgtatctcagaatggcttagaactcctgctcctcctgtatctgtctcccgagtgctgggattgtaagattataggtaggttccaccctgctaagcttctcctgactcctttgtacacctttgtaggaaacttgctattcaccattgttaaagactttgggtagggatgtggcttggtttatgcttgtctttgaggccctgggtttgagctgtagtacctcacaaatgtgtgttacaaaagcttgttatttaggccctgaggcagtgggagctgcagtgggagaaggtcattaatcctgaaactatatgggttcaaagccaacataagctgcttgagaccctgtctcagaaaataatgaatatgctaatatgctaatatatctgtttataagttagtttccttcctagaaacgctgctttttctaatactaagaagagtgtgaggtacatctggtaagcacgtaggaggaagaataagtttagaacagccgagagctgatgacaagagatcacacaaaacaaactcagtggaatctgtttaaaactgtattatgcactatcctgattttaatttcacataaggaccatttattgggagcctgctaagtgtcagttatgaggaataacagtaaacaagaatggccaattccctgttctggaaatgatgtatggagagataaacaataaacaagaggccaagcgaagtcttttgttatttgtgacctaaataacaagaaagaattgtctttgaaaaatatagagaatggttcttataggtaacaacagaaagcataaagatttggatgtaggagtgagtttggcttactaaagaaaaatctagctgggcagtggtggtgcacgcctttaatcccagcacttgggaggcagaggcaggcagatttctgagttcgaggccagcctggtctacaaagtgagttccaggacagccaggactatacagagaaaccctgtctcaaaaaaaacatcgtagttgaagacggggaattagtttagggagggaccagaggtgagatgaggggaaggagtcagccaaaggccaaggcagttcagattttgtgttaaccacagtcataatttcagttttatttttaggataatctggagcatggatatagtctctattttggggttcgtttgagtttttagtgtggggaaggtgtgtgacttgacacgtgtggaggtcagaggacaacttgtaagcaccagatgttggttctcttctaccgcgtggaggctggcatcaaagtcagcaaagatcaaacttgctgtcaaatttggcagcaagagctttgcccactgaatgcggtacctctaccctgtgcttggttcctgctcctcaaacacttacagccttagtttcagtcccagtggctttcaagcattcttcctgaaaacttccacctcccaaaatagttactatgaaaaaaaaaatctgagtttctttagaatagggtgtatgggtgtgtgcgtgcacgtgcgcgcatcagagacaactttgtagaccctcctacctttatatggctctgtggtggactctggttatcaggcttcatggcgggcacctttacctactgagccatcccaccagccccatcttatcattgtgacctctctaactgtaaatctctcaacagaactctgaaaaaccctaatttcttcagatgacaaaatacagttgatttaagtgaccaagaatcctccagttatcctctcacaatgttagcagtttaatgtaaatgctaagtgaatgttttgagaagatacaaatgttagaaattaaaatgcatttttaaaaagtcaagtccctaatcccagcactcgggaggcagaggcaggtgaatttctgagtttgaggccagcctggtctacaaagtgagttccagggctgtacagagaaaccctgtctcaaaaacaaaacaaaaaaaaaacaaaaacaaaaaaaatcaagtcccagtgggatgaaagccaactggtaatttcaacaaagattctctttggggatgttgggatagcttagacgaaggtaccagctgccctgaccattggaatgcagacctcaggacccacgtggagatgaagagagccaacctcagcaaattgttctcttaacttctacatgtgcgccacacaataaataaataaaatggttgctgtaataaattgactttagcagctgagatcccagttgtcttagtcagggtttctattcctgcacaaacatcatgaccaagaagcagttggggaggaaaggatttattcagcttacacttccacattgctgttcattaccgaggaagtcaggactggaactcaagcaggtcagaaagcaggagctgatgcagaggccatggagggatgttccttactggcttgcttcccctgccttgctcagcctgctctcttatagagccaagactaccagcccatagatggtcccacccacaaggggcctttcccccttgatcactaattgagaaaatgccttacagttgtatctcatggaggcatttccccaactgaagctcctgtctctgtgataactccagctgggtcaagttgacacaaaacctgccagtacaccggtcattacctctagttcacaaagtaatttccttacttttggtcaaaacttgtgattctgaatacctaaagtagatttgctggctttacttcagatgaacgttggcgctcgcgctctctctctctctcattatttgaatgatctttttgtgtatgtatacatgggtgttttgcctgcatgcatgtctgtgtgaagatgatggattccctggaactggacacagctcacagacagttacaagctgccatgtgggtgctgggaattgaacctgggtcctctggaagagcactcagtagtagttaagtgcacttgctaatctgtcaaggaaccagggttttattccagcagcctcatgggttctcacagctaatttttaactccaggtccaagacatatatatatatggtacatataacatacatttaggcaaaatactcatacataaaataaaaagaatgaatgtttaaaatatattttctaagatagggtcttacctgggtttggtggcatgtctctttaatctcagctcttgggagaaggcagagtcaggcagatttctgcatcccaggccagccaggctccacggtcttgtctccaaaaaataacaaagacaaggtttcattatgtaatgctggctggcctggacatgagtgtagtgccttaatgcttcgtggctgggccgtcacccaccccagtaatcacagaggtttgtgtttggtttcagcatgaatttgaagtcaaaggagatgttgtgactggaagaaatcaccaaggtccaaggcgatccagagaatcccgggaaaaggtaaagtccctctttatgtgacagaaccccagcctaaggctctgcagccagctgctatggtgaggttagtctttacctggtaggcacttggcatgattgctatcagaccactggctgggcagtggagacaggttattgttttgttttgtttcctagcccaagaaggcaaatggagtacttgtgtgccccataagaaagagaacattaggctgagggtgcagttgtagtttgggttccagtctgaggtttagatcctagctgatggtgacagagcttggacctcagagatgggaagccttttgtgtttcctgcaccacggtgtcttttctctaagcatcacatgagtgctggatgagcagtgtgtgcacagaaagtggtttatagtccacagttttacaacactgtgatatgtgtgcattacctctatttcacatgagaaaattgagggcgggtagcttaagttccccatcatcacataactagggagcggtagaagggggagagcctgtacacctgcactccaagtctaaattcacaagtgtcttggctttagaaagttgtagacagcttcacaggagcaaaacagattctccctgcaactttgcaagtaagagcaggacactcgatgactttccccagcgtgttatagcagatggtgcagccggaactccatcttcctcgcaggaagaagtcttcccaagatttcgcacctgcctggcaggcctgagccagctgccgtctcggttactggataagtgcttgtgttcccaggctgcttttctttttcaagtgtgcaccagcaggtgtttcagaacagtcccacacggagggagcaccttctgttccttcatagaaacttgagaggagaccagtagaggttgtttttctaaggagaactgctctggacaggatcacaaatcaagcctggagttctgagccctgggatcagcccatcctctctctgagcctatcagatccctgttccagatgccaagaacagctgttcaccctgcttccacttctccttgtttctatgagccgaccctttgttcctatgtacctgggagtgcacaattagcagtgggtcccttctccctcaagatcccttaggatttctctcacattcaaaatagcactgatggaaattgcttgggcgaagtagtgacattcagaagatactaaaatgtcactacagtattttcacaaagaaatctatttgtagaggtgagcttcagatttcttatctcaccactagacactgtcatcagtaagcgtcaacctggatatgaagagccttctcaaggcagcgtttggctgcctgagggaacttgtcgcatttctgagcattaggtcctgtcagcacgttggggatctgttttattcgtacagattgggagaacagcagaggttcctgaactgccgttcccaacaataactgatttgcccgctgctcctttctcctgcctgcagtgtaggatgaagccacttccaatggagctatctgtgtgcttttagccccttgatcttctctctcagcctctgtgcctaggtgatttttagacctagacaaattttgtgttagtgtcattaaagggtagaaagatggtcaaaaaaaaaaagggtcactcaaatgatatatgaaagtcctaggtctgatggcactcctgtgatactaacactcaaggctaaagcaggaagaatgatagcttgaaagcctttcaagaattcatgcccatgtacacataagaatttatttttctttctttcttccttttttttgttttttctttcgttctttttgaattcatactaacacagttgttactagacacattgaagctgttctaagtttcatcaaaaaaaaagagttcaaagcagatattgtgtttcctgcattcaggagttggaggcaggtgtatagttttttcaatatggtacagtggcacatgcttgccctgtgccagccttagcatctgtgaagtcctgcctctaaataaaccagctccttaacaggtggtggtagtggtgcacacctttaatcccaccactcgggaaggaaacaggctcacagacctctgctagttataggatagccaaggctacacgaagaaaccctgtctgggggagggtcggagtacggtggggtggggtggaagtgcaatgaggaagacagcccctcatccccactgtacatggtgccacacaccgttaatcccagtatgacagacagacagatggatctctacattccaagtccacctttgtgtacataaagagttccaggctaccaggaccatagtgagatcttttctcaaaaaataaaaataactgaaaatttagaagttcaggcttgggcatagtagtacacacctttaatctcagtactcagatgacagagtttggatctctgagttggagaacagtgagggctactatacataccgagaaaccctttcttgaaaaaaaatttttttgactcaagagatggctcagtggttagtagcactgacttctcttccagaggacccaggttcaaatcctagcccccacatggcagctcataactttctataactcgaagatctgatactctcacataaagacgttcatgcaggcaaaacacaatacacataacataaaggtaaataataaattaaggcaggggccgggcggtggtggcgcacacctttaatccccgcagaggcagaggcaggtggatttctcagttcaagaccagcctggtctacaaagtgagttgtagctatagccaggactacacagagaaaccctgtctcaaaaaaaaaaaaatcaaaattaattaattaaaataaattaatcaagggagagtacagagatggctcagcaattgagagcaccgacaagtcttgtagaggtcctgagttcaatccccagcacccacatagtgactcacaaccctctatattgggatctgatgccctttcttctgatgtgcacaaagatagcacaccatatacataaaattaataaaaatattttttttaaagaaaagggaagttaagaagtacagtttctcgctcacaccgtatttcagatgttcaacaaccacatgtgacttgtagcctccagccttaggagaccagacacaggacatttccaggatcacagaaagttcttcaggcagcactgaggagcactgtaattacatttttcccttaggagggtgcatgctctgtgtgtaaagcgagcatgttcacatagcaggcgctctgctggcggggttcacatttacttctgacgtaacaagcctgagtgggcctctcacttcagccagagagctctgcatttcttgctgttaaacataaaggaccggggggattgtgtgttcgttgtctctacttttgttttcctcatctctgaccagagtcaccagcatgagcctgggccggactaataacaaggtgggaagtgaatgactacagaggccagagatatgactcagaggccttggcacctggaaatctgactactcctggcctccactggcacttgacatatatgacatacatgcttttttttttaatgactctagaatgtagattgattgaatgcaaatttcaataaaatataaaatcagttcagaatcttgaactgattgtctctgggaaagaggacaaactgtcaagtgatagtctcttccattgtgcatggagagtgtctgtatttcttataaaaacccacactctggtggtgctattcccagcatttgttagatggaagcagaagggtcagggattcaaggccagcctacattgcattataagttttgaggccacttggcctatgtaagatcttgtctcacaaaaaggggagactggaggggtagctcattggttagtgcttgctgctcattcagaagacctgattttgattcccagcatccacattgaccaattcacaactgccagtaacctcagctccagaagatgtggtgcattcttcattcttccagcctccttagacacctgcataccacgtgctttatcttctcttttcttgttctctctctctgtctcacacacacacacttaaaaattataactggggggctggtgagatggctcagtgggtaagagcacccgactgctcttccaaaggtcaggagttcaaatcccagcaaccacatggtggctcacaaccacccgatcacgagatctgactccctcttctggggtgtctgaaataaatagtaaaaataaataaatagtaaataaataaataaataaatcttaaaaaaaaattataactgtttctctccaccccatcacttactctcctctctttgcagctcttcaagggcctacaggtctattgttgtgagcccttcaccaacatgcccaaaggtaaggccctgggagtctgcagcgtattacagatagcattgacctacatggaagttcctcgggtggattaaatggtccagtggaagactgctgtggttctgggcttatgtatcaaaggcccttgtccttgtatagatttggttagttcctttcaaagggaaggtccctcatcttttttctctgcttcccttcacctcctggggctggagttgtatgacttaggagagggaagcctaggagcagtggttctcatatttatttcctcatgctttggtgaccttccctcccaaccataaaattatttcgctgctacttcataactgattttgctagtgttatgagtcataatgtaaatatccaatatgcaggatatttgatgtaggaaaaccccccctccaagaggtcgtgacccacaggttgagaaccactgcattggtgtctggccacagcaaggggccctagcagtgtcactttgtttccttctgtactggttactgattgcagttttagaaggtctcaagtgtcactcaatgttttatgtgtttagactttaatataatgaaagccagggacgctagtgagtatcctgcgggaggggttaagttagtagcctcggttcaggcagcgcctccacagttcccgggaatgagcagatgttccttcaagaacagtaggaggatgctttgagcatctccaaagaagcctagaaggttgctcagtcagtgctgctgatgctgaggcccaacttcctatgagattcatcccctagatgtgtggatcctggctcacatgtgatctttcctaatgacacgctggatctctggccagggtgacctgtatctttttcccactggataaaatatcttccagtctttgacatttagagtaattaccatgaagaaaggtgctctcaagggccatgattgtcagttcccaacagcaaactaggatgtagcggcaaaggaaaaagactgggtttttcacatagtgtctaacaatttagcaaatttttggaaattcagtcctctttttcaacatgtttcatttggaagaccatgaggccttccttatctaccacatggcttcatggagactaataaccaaaagtaggcagcagctacatcagcggcagattgacttagaagtcatactgattttagggtttttctatccttaaattaaaaaaaaaaaaaaaaaaaaaaaaaacagctcactgaggttcgcttcaggggaggctgtagagggcactgggagtagatgtgggtcgctattgtgattttacatctgtgctgtgcagatgagctggagaggatgctgcagctgtgtggggcttccgtggtgaaggagcttccatcgctcacccatgacacagtgagtatcacagtggggccttaaggagaggaaaacactctccttccattaaacaagtcccccaaagtagcccaaagggctttctctacccttgacactgtagcagaagactgtctgtgagtaaaagcttagaaactgtaagcattgaatgtatcgagggaggtcttttccttctagcccttttaaccacgtaaaagtggacatgactttcccagaagccctgctttggcactaaatgctttttcctttctgggtatgcagggtgctcatctagttgtgatcgtgcagccaagcgcctggacagaagacagcaactgcccaggtaaagtttctccatgtactgtacacttacatcatgtgaggtcctgttggatgggtttgattccctactagttagttatctggttattacctgactgatataattctcagctgctttttttgtttggggtttttgtttgtttgttttttttttttcctttttttaaatttttttttaatttattatttattatatcttaagtacactgtagctgacttcagacacaccagaagagggcatcagatctcattacaggtggttgtgagccaccatgtggttgctgggatttgaactcaggaccttcagaagagcagtcagtgctcttaaccgctgagccatctctccagcccctgtttggggttttttgtttggttggttgttttgttggttttggtttggtttgattttaagacaaggtcatgtcttagaacgcagagatccaccagcctctgcttcctgagtactgggattgaaagtgttgtcaccatgagtggcctgtttgttgtcttgggttttggttggcctgctatgtaatgcatcctggtctcaaatatttggtgatctttctgcctcagccttgaaagtgctgagattataggggtgccccaactgcactcaatgtttttatagggtttgttttgttgattgattgttttgaggttttggtttttctgagacagggtttctctgtgtagccctgactgtcctggaactcactttgtagaccaggctggcctcaaactgattcatctgcctcttccccctgattgctgggatcaaaggcgtgtgctaccactacccagctttcagcctatttttaatgtttgcatgaatgaacaactaaaatgtctattaaaagatctttatgagccgggcgtggtggcgcatgcctttaatcccagcactcgggaggcagaggcaggtggatttctgagttcgaggccagcctggtctacaaagtgagttccaggacagtcagagaaaccctgtctcaaaaaaaaaaaaaaaaaaaaaaaaaaagatctttatgatggggctggagaaatggctcagtggtcaagagcactggctgctcttcaggggtcctgggttcaattcccagcaaccacatggtggctcacaactgtcttataactccaagatctgacactcatacagacatacatgcaggcaaaacaccaatgcatgtaaaataaaaataagtaaatttaaaagaggaggcaggctggagagatgggtccatggttaatagcattagccgctcttccagaggaccggggtttaatttccagctactatatagcaactcacaactgtctgtaattctagttccagggatccaatgccctgaaacagacatacatacagacaaaacactgatgtacataaaatgggtaaataaatttttttaaaaaaggaaagaaaaagaaaatcttcagtatgtgtgtacatgcctgtttgtttacttttaagtgtatatttgtagaagttaaaagtactgtatgagaccagatgtgctggtacacactgttaacctcagcatttgggagaatagttggatctctgccagcttaagtaccgtctgctctacaggtcaagttcaaggtctaccagagctataaagtaatacacgcttggatgtgtgtacatacatgtacatttacacacaagtgatcgtgtttatgatattttgtcttttcacttaagatattcctccacaccatctgctctctcgtggcttttcctaaaacaggttgaagttcgtattatttcagtctgggcttttaccacgctcactcctttggcttttgaataaggtcctaatgtgttgtttctgagtacctgcttagccctaagaacttatatactcagatcttagaatggtatggttggagtctcgtctagaaggatgacttacaccagtctctgcttgtttctgtctgcagatattgggcagctgtgcaaggcacgtcttgtgatgtgggactgggtgttggacagtctatccagctaccggtgtcgggatctggatgcctacctggtacagaatatcacctgtgacagtagtgagccacaagactccaatgattaatttaagaaatggtcttccatgcccggggagcacctctcagtctttggtgcttccacaccctacttactaagtatttttcatgcatccgcctggaaaaaccagcttctacctatgtgagggtgggtgccttaaaggttttctaaccaagtccccctttgaagtctgtcttgaacacaaaaagttttcacctgagaaagctttatcccaccaattgagcaagatgctaatctgttgcatatcgttcttggagagacagtagagtggcttggctgatctgagctgggcatggtggtacttgcctataatcacagcatttggtggaaagagatgggcatgtcgtgagttgtatatgactgaagaacaaatagctagtggtcctgatttgttccttataaaattgcatgttcataaaggccaagagtcaagtccttcaaggagatggcttgagatctgtggtttgacttaaaatcagtgctcctcaaggctccaggtttagtagccagcaccaaacaacacccagaatagggtttgtgcaggacactgaggaaattcagagccagattatgtatttgatgtgaatgtgaggtttttcaagtgccagtgtcaaggagagccttctaattccccatagcttatgagcagtgtatctgttgtagcagctctaagtaacccattcttctttaaatacacggactctgatatgaatatttcatgtctgtacaatgatggattccaccaggaaaggagttgttgctttctttgaagtaatttcttcccttttgctccctgttgctgaggcatactacttcataaataattttgcttgctgaaggaagagaacatatttttcatgaactcataatcttggactgtttatagatattggggggagtaggtcttctctggccccccccagtatgcaagggcaatggagacctgattatataaagtatgtttataaatgctgtgctgttaatactgcaaataaactaaatagcaaacattttgacaaagaatgactgattgggggcctggtgaaatggttcattggataaggtcctgctgccacaactgacagacagccagagttcaactaacccctgggatccacatggtagaaagagagccgactcctgcaagatgtctctgacctccataaatacaccatggcctgtgtgctcatacacttgcatgtctaaggagcccacatgtttcaggtttcatgaaaccaagagcaaggtagcagcaggcctctgtccgccctgaggatgaacctgctttaaattctttcaagttagctgggcagtgatggcccacagctttaatcccagcactcaagagtcagaggcaggcagatctctgagttcaaagatatccagggctatacagagaaatcctgtcttgggagtagatttccttcaagttaggccagacagggtggtgcacacttttaatgccagcactgaggaggcaaaggcaggtggaagtctgtgagtatagagccaacctgtctacatagggagttctaggccagccaaagctacataatgagtccctgtctcatataagtaaataagtaaattcatattgtctgaattgttccttgtgatttggaactgagacctctgtccttgttgatcgttggcgagtgggttccacctctactgcctctcgtcttccaagctggttttctccactgcatctacgtccggctgctttgtctccctaaccctttgaaggcacttctattgtagggacttaagcaattaggttgcactcactggatggttcatggtgttctcctgtctcaaggcccatcgtggcagttacagatcccctcacagtggggtctggattagtgttgggttaaactgagacaactgtcaagggatgacagggtcttatgtacccctggctagtctggaacctcctacactgagaggctgacctcagacacagattcacctgcctctgcctcctgaacactaagattacagcagtgtgctgccaccgacctgtacatcctatcttaatccttttgctattcagagaatagaatctccttcaagacaaagatgaaatcatcacacatcagtaatgacaggatgaatggggtaggtagaaaaacgaagcaaagcgtactcactctattctatctcagtcttcatcacttaatttgaaaaatggaaataaatttcttatttatgaggtttttccatagctgtcaaatgactgaagaaagctggcctgccttctggctcatccttcattccacttacatcagtcatgaccccaggaaagaaagcaatttaggtttagagctttacaaaaaggcttccttcactggccatggtgggcagtcaacaaaggcaacctgcctggccagcttctcatcatggccctcactcctactcattcaatctcccagcttgtttgtttcttcaactatcaaaaaatactggttcagatttggaggtggaagttgaaaggtggaagctgggtgatccattcctggtaagactgggccacgtgagaccctatctcaaaacaaggatctggagagatggctcagtagctgagagtagctgagatcttgtgctcttgcataggatctggttcccagcgttggtcagttctaaccccagttcctgggaatgcaatgtggatgcactgcacacatgtggtgcacatgaactcacaggtaggccacacacttgggaggcagaggcaagcctggtctacaaattgcaaagtgagttccaggatagccagggctacacagagaaaccctgtctcagagagagagagagaggaggagaggagagaggaagaagaaatgctttctagggctggcgagatggctcagtgggtaagagcactgactgctcttccgaaggtcctgagttcaaatcccagcaaccacatagcggcttacaaccacctgtaatgagatctggtgcatctgaagacagctacagtgtacttatgtataataataaatctttaaaaaaaaaaaaaagaaaaatgctttccaattcagcttcatctgagcaggacctcccagacctgttactttggtaagaacttatcaaggaactgatgtgtctcattgttagtggttatcttagtttgggttttgttgctgtgaagagacaccattcccacaacaactcttacagaggaaaacactgaattggggctggcttacagtttcagagattcagtctatgatgatggaagcctggcagtgtgcagccagacaaggcacctagaggagctgagagttttacaccctgatccgaaggcagcagatggggactgtcctgggaattgggcggagcttgatcataggagacctcgaagcccacccctacagtgatacatttcctccaactaggccatatcttctaataagtgccactccccgagagccaaacattcgagtcttatttccaggaaccagtcatggtttgtgcaacttgctgttgttcataaacacagataaaaccaggcatcaagaacatccctgccttcgtgggatcctgggtaaaagcagatttaactgaaataaacttaaaagtcatgtaattgtctcagtctttgcacatgtacaccccatctgattggagctctgtgtgcctttcctagaagtccacttctggccctgccctctgatgtttgacctagtttaaggttctatctgaaaaaaaagaaaaaaaaaaaagttgtgatgatggtgtgaatcttgcacctttgacctctgattccctcccaccctgcaatctaacccctctctgggcaaagccacactttcaaactggttcctagattgcctgtttatctcattctgcaaagaagctggaaggggaagaggattatcaggcaggcaggctggcaggcaagcgtagggagggggctcagagaagagctctggctgattatctccctcctaaaaaatgtaaccagaatccacaaagtatcggcacaaaaaatcatgcaggagaaaaagaaaggcatcagtgttgggacggttggagcggaaggagccaggatgcccagaatgtagcctgtgaaggctgctgggaactgataaggacagcctgggagacaatcagcaccagaaagggcagagtgagagggactgcagatgtgcccaaggaaacccggacagagggaggcagctgagggaggcagctgctcgacaaatgtggggctcactcacagatggcttaagctgactgaaattgaggcctctgcatcctgcttcagagatgcctggctcctgcaaacagcctaaaaatctgctaaaacaagagaacagcatcgtcatgtggaaggtttttgttttgttttgttttgtttaatagtccaaatcaggaatattttttgtaaatttatttatttatattatgtaagtatactgtagctgtcttcagacaccccagaagagggcatcagatcttgttatggatggttgtgagccaccatgtggttgctaggacttgaactcaggacctctggaagagcaatcagtgctcttaactgctgagccatctctctaaccccggcatgtggaaggttaaacagaactggaaatggtttctacaaatgtcacgccttgaggaatctaagctagtcctctgcaaggtagtgagtgcacgcctattatcagagactgaggcacaatcagctatgcttcagctgagagtgaggtatgtagctcacacttccggagacagaggcagaaggctcactatctcatgcctgtttgagctacaggagatcctgtctcaaaaaaaaacaagaaactgagctggtgaaatgactcagcaggtgaacacgtttgtctccaagccagatcacctgagttcaatccccaaacccacagcctggaaggagatgggacacctgactcaaacaggttgtcttcggccaggcagtggtggcgcatgcctttatttctgagttcgaggccagcctggtctacagagtgagtccaggacagccagggctacacagagaaactctgtctccaaaaaaaaaaaaaaaaaaaagttgccttctgattactggagccctaaggcccacttgtgtgcatatacagacacaaaacaagtagaaacaactgattctggaacaatatcttaagtgttacagagtccctagcttggctgatgggtgtataacctttgaatgcctggttttagagaccaaaagcatatgacacgcaccttagtagcatggtttcaaagcatgtcccctagatggaggccttggagtggagcgacgcccttctagattcgtagacctgccctacacccactgaacctgcaactggcagatagagcccacccagtgacctggaaagctaaagcagactcaagtctaagaaccgtaagtgagatagggggagcaagatcctgtaaaatgttcctgtacctccttttgtctccaagaaaggtaaatctttgagcccgaaaagaataaacaaggttggggggcttgtaagaggttcttatctccaaggttgcagcagttgccttgagttaactccacaatggccctttaaaaattaaacaaagccaaggacaaagattatattagcaacctaggaacagaagggccagactagttaaaaaaaaaaaaaaaaaaaaaaaaaacagctagatgtttagggtttttattaatatttaaatcgcagcagtgaaaccacagctgcagcctttgactccagccagagatatgcaaatgtggctttcaaaagccgggcaatttcacacagccctcaaggtaacaagaacaaataaaacaaatgattttgtaatttatctctattgactgatggagtgcaaggcccgacagcccagagagtcagcaaccacttactctctgaggggagcagagaaaggctgcctggagggagaatgcaaacagccccatagtagactggtgacagagaagacccaagcagaacagggggcttctgggaagaagagatgactaaagttatatgggaaatttcagagagccagccttgggttctgtgaaccatttgatcctgccagctcctgggagcaacagccataagcatccattactattgtttgccacacgccacagtgccatgcatccttccctactgacaaaatgaagttttgagaggcccagtcacttgccctaggtcacactaaggaaaaaaagtgacaaagctcagattcaaaggtgtgtcaggctaaacagcccatacattttccagtgcatttctctggggataaacaggcagtgaacaataagattagtgatcaaagccagatgtggtggcccatgcctttaatcccagcactcaagaagcagaagcagacctcatagaggatctctgtgagttcaaggccagcctggtctacagagggagttccaggacagccaaggctgcacagaaaaaccctgtctcaaactaacaaaactagcgattgaggcgatcctatagttgtgaaagcaggtgacaggtccttctggccttcaggttgcttaccatccagaggagacaagccatagaagcgttctagttcaggggttctttggaaatgatgtggtgggcccaggacttataagagagaaatctcagcttaggatttaggcaccattcagtcaagtaaagaagccaaggggctggcgagatggctcagcggttaagagcactgactgatcttccagaggtcctgagttcaaatcccagcaacctcatggtggctcacaaccatgcatgagatctaataccctcttctggggtgtctgaagatagctacagtgtacttacatataataaataaataaagagtttctggaagggcccagtgaaatccctcaggctatggaattagagcctgaagcactaatgtagaggagacatgacagaaatgtctttggccatttccccgttttctgaatacttacatcttaaagccaactctttaatgtgtcatccagtgatccttttcagatgcctggctcagtatctgcaggaactcatagactttactcaagctatattgaatactgatctactacctctgcaaggcccaagtcttattccacccatccttcaccaagcctttcccctgatttcccagacaagaaccactccccagttatagtacccatcctgggactggagagatggctccgtggttaagagcactgtctgctcttccagaggactcaggttcagttcccagcactcacctggcagctcccaactgtttgtaacttcggttctaagaaaagagatctgatgttctctttttggcctctactaaatccatatggtgaaactaatatatatgcaagcaaaacacccatacaataattaaaaaaaaaaaaaaaaaaagcttagaatacccactctgcttcgtttgtatttgactttgtttcttatatagccctacccggcctggtactcacttctgtagagcaggttggcctcaaattgaattcagagatccaccttcccctgcctcctacatgctggaattgaaagcatgagccaccacacccagccgttggtttaatgtaattaaactttatcattcttttttttttttaaagatttatttatttattatatgtaagtacactagtggtagctgtcttcagacacaccagaagagggagtcatatctttttagggatggttgtgagccaccatgtggttgctgggacttgaactcaggaccttcggtagagcagtcagtgctcttaaccactgagccatctcaccagccccaaactttatcattcttaataccctgtatgtgtgtgtgtatgagtgggaattacaggcagtcgtgagctatttagccatcggtgttgggaactgtacttgagtcttctacaggagcagtaaccttagtcaccactgagcccatctctccagcccagtttgtgtcatttgctttttgttttgttctgggtttggtgacaggatttcatctaacccaggctgatgtcaaacccactgagaccaagagtgcctcctgcctctacctccaaagtaccagacagtaacgttttcttctgtcagcggccatgtgtacgtctacctcctgtcttcccttcgcttagaaggtgcttatgctctcggatgggttggttagtgatttgtttctttgttttcatagttattattacacagtttgccctggaagctgccttgttaagcatccaatgaatatttactaaatgacttacgtggaacccatgaactcaagtgtgtatcctgccgttagccttacctttcagaacatcggaaagcaagccacctactgcccctcaacaggccgattccctcctagccatttactcgacaatccgaggcatctacacaactgactccctttctgggacttctttgattctcctttgcccatcataagcaagcctacccttttgtcatcagtcagaacggtggcacctacccatcggcctgccctgctcaccagagagcctgctgctgccctgacccgtggaaataattacaacattcctaggaatgcctttgcaagttcaaagcactagccctgccattatctctcctcactagggcaacagttgcttcatagataaggcagaagaaatccaggcgcttgtcaaaggtcactttatgagtcggtggcagaactggacccagccagctcaggactgtccctattcattagggcacagatagaataccttcattaagttgtctggcccgtgtctggggaagggagctttggatggaatctggaggctggtgaaggtcaaggaaagtttgcaactaaagacttttccctcagtggaatccctgctactaccacgagttaattccagaactgcttttggcagggaaaaggcatgtgttcctgtgtgtgcatgtgggctgggcatgtggaggccacaggtcaatttcaggtggcctttctcagaagccaaacatcttggcttgttgtttctggtttggtttggttaggttgagacagggcctcactccttggctggctggcctggaatccatcatgcagaccaggttggcctcgaaatgacacagatctgcctgcctctgcctcacaagtgctgggattaaaggcgtgtatcaccgtacctgatagacacctctttttgtgacagggtctctcacttgggtctttagacttgccagtaagccccacgattcctctttgtaccaacagacacacacacacacacacacacacacacacacacacacacggctttttcatgactactgggggttaactcaggtccacaagtttgcaggtaagtccttccttcatcaactgagtcatctcctcagcccctccctctctttaaatccttcccaaggtcctggaggaagaaaggagctgggtaagcaggtatcttgccatttcccttgaaaattgcataggacaaaatgactgtatcagcaagtgacactccaaggacagctagggggtcctcccaactccttgtctcgagggctctagaataaaatagactatggactaagttagaaatattgccttggcaaggcttgcccctggcacctggtgaggagagggtttcctggaactaaggattttcaggggctgtctttgagtctcctaaggcttctaaaactgctggtgagatcattccagacaggtagaggatcagaaaaccacaaaaccaagatctgtgcaggaaccaactctggctcctcaccgaaagcttaaaaatcaaaaggaattgtgtaacccatacatggagcactctcccaccaaaggcctaaagagctttaagggttttctccaacacaaggctccacaactcctccattgtgctgaggagtcaacgctattccacaaaggctccagtccccaggcagggggataaagtgcctaagaacagaaaggtggttgttataccaccttgggaatgtactaaatgccacggaattgtacgccttacaaagagaagttgtttgtactatgaatttcatgtacattctaaataaaacaaaattccacattaaggggcagggagacctgagcccccagtcctgaggctttgaaagggtcagggctccttgcagggagtggcaatgccagacaatgtgagggctaggctgggcctctcccacccccgcccccgcctcctcctccaccagatgggaactgggactcagggagaaaggtccaactgggccacgcagggctacagccgaaaagagtcacccagtgaatgcgcgggccacagccgtcggctcatttgcatcataagcgattggctttccctgctcgtccctcattaggagacaatggacagttgtttgctggcgcagcagatcatttaccaagggaaagaggggacaagtgactgataggctgtggtgttgggggcgcgcagcaacccaccacccctgcgttccatcagccacgggaacttttgtttgcactctgagagtggacctgccaacgccaaccgatcccctcctttggcagaggtgctgagaggatgtgagacttgcatgcagtcaaacagctagaggctggggcttccggtaccaggagcagagtccagattcttgttccgggctcagcccacttcagccctgcggtctcttccctctttcctctttctcacctggggttctagctctccgtctcctgttctggtctttggtgtccggtgtgctcgttcctttgtgtgtctcctatctcatctcctcaccctaccttacctctaacccttgcaagggtagatttggcaggagtgacgtggacatttgtgatgtagaaactagtctgtgttttttggggacaggtgaggacagaacacgtcgcgtcaaggtgtcttgtttgtttgtttgttttgttgttttgttttgttgctgttttctctcctccaatttgagatcctcaaactgagtgagtgccgggttacaggcttgcactaccaaacctggcttggaacctactataaacccgacatgaagacagccatgttttatttcttatcatctttcaaggtagagcccagctcagagaggttgagtaacttgggcaggaatacccagctggccagtgatagttgggtttttgttgttctttgtttgtttttgtttttgttttgttttgttttgttttgttttgttttgttttgttttgttttgttttgagacagggtgtctctatatagccctggctgtcttgaaactcactggtcctgggaactcactctgtagaccaggctgacctggaactcagaaatccacctgcctctgcctcccacatgctgggattaaaggcgtgcactaccactgccctgttgagtgatagttatttaattcaaaaaagcctagaccggtatggtggcatacacttttaattctggcacttgggaggcagaggccatccaaactctaagttcgaggccagcctggtcttcattgagtttcagaacaaccagagctacacaaagaggccctgtcttaacaaacaaaaaagcaaaagaaaacccctctgttctttctttagacatcccctcacagagtctaacaccgagtggtaagaggctcactccatgcccagcctcacagaaggcagccgcccaccgacagctctgttctccagtgatagcccccttgaggacctacactgactcccacctttctctgggccccctttgcaggatggtggaacagcacagatgcaaggcttttacccccccccccgggggtgacggggaggtggtgatccagacagagcaacctggcaaaccagaccatgggggtctccctcctgctaacaccttccctactcccatctgcccctccctttggtggatcaaagctgccaggttttgaatctgcttcattatgctctgggggggaagggagagtcagggtgacggggtgtctatgtgcatgaacataaggcctccgggttcatcctgacactgaatgaaaaactcgccaattattcgtccaatctcattaatatgcagacagacatctgttatttaggagtcaacagcagaggcattttcttgtgggggaggggtacttatgtacatctctctcgtctctggctactgtgggatagctgcttgggactcaccctagcctagcccccagaatctggggcaccctgtctctctgacttcattgtagccttgaggaagggaagtgggagttggctaaagatggagggcaacctggagctcagctgaaaggaggggggcagaggggaaccaaaattatagaggaaacctctagaacaaagagctgagctcttcttggggaagagggtggagcagagagagcggcagtaggacagcctgccagggtcctgacgtccactgggaaattagagacatgacaacttgccctcctcttcaggccactggacaaatctgagtggatctgagcaggttgctctggcaacgtgggtccttagagacttcagagagctgggcacgatagcatatgcctgtaatcccagtactgttatggttgaggcaggaggattacaagttcaaggccagtctgagttatatactaagaccctgactgaaaaacaaaaagttgggcattgtgtcccaagcctgtacccctcaaagcagccattttctttcttttcttttcttttcttttcttttcttttcttttcttttcttttaatgacaagtcagttttacttaaatcaggactgtccaacaagaacattgttagccattcatgatctgaatttggtgtatgaattaaattatggtgtacattaaaagccacgagacatgttttgtaataaataaggcagtagaattacgcattagtagccttcttttttgttttgttttgtttttgtttgtttgttttgtttttcaagacagggtttctccatataaccctggctgtcctggaactcactttgtagaccaggctggcctcgaactcagaaatctgcctgcctctgcctcccgagtg

SEQ ID NO: 8 - DNA, 87192 bp, Mus musculus
cactcgggaggcagaggcaggcagatttctgagttcgaggccagcctggtctacaaagtgagttccaggacagccagggttatatggagaaaccctgtcttgaaaaacaaaacaaacaaacaaaaacaaaacaaaacaaaaaagaaggctactaatgcgtaattctactgccttatttattacaaaacatgtctcgtggcttttaatgtacaccataatttaattcatacaccaaattcagatcatgaatggctaacaatgttcttgttggacagtcctgatttaagtaaaactgacttgtcattaaaagaaaagaaaagaaaagaaaagaaaagaaaagaaaagaaaagaaagaaaatggctgctttgaggggtacaggcttgggacacaatgcccaactttttgtttttcagtcagggtcttagtatataactcagactggccttgaacttgtaatcctcctgcctcaaccataacagtactgggattacaggcatatgctatcgtgcccagctctctgaagtctctaaggacccacgttgccagagcaacctgctcagatccactcagatttgtccagtggcctgaagaggagggcaagttgtcatgtctctaatttcccagtggacgtcaggaccctggcaggctgtcctactgccgctctctctgctccaccctcttccccaagaagagctcagctctttgttctagaggtttcctctataattttggttcccctctgcccccctcctttcagctgagctccaggttgccctccatctttagccaactcccacttcccttcctcaaggctacaatgaagtcagagagacagggtgccccagattctgggggctaggctagggtgagtcccaagcagctatcccacagtagccagagacgagagagatgtacataagtacccctcccccacaagaaaatgcctctgctgttgactcctaaataacagatgtctgtctgcatattaatgagattggacgaataattggcgagtttttcattcagtgtcaggatgaacccggaggccttatgttcatgcacatagacaccccgtcaccctgactctcccttcccccccagagcataatgaagcagattcaaaacctggcagctttgatccaccaaagggaggggcagatgggagtagggaaggtgttagcaggagggagacccccatggtctggtttgccaggttgctctgtctggatcaccacctccccgtcacccccgggggggggggtaaaagccttgcatctgtgctgttccaccatcctgcaaagggggcccagagaaaggtgggagtcagtgtaggtcctcaagggggctatcactggagaacagagctgtcggtgggcggctgccttctgtgaggctgggcatggagtgagcctcttaccactcggtgttagactctgtgaggggatgtctaaagaaagaacagaggggttttcttttgcttttttgtttgttaagacagggcctctttgtgtagctctggttgttctgaaactcaatgaagaccaggctggcctcgaacttagagtttggatggcctctgcctcccaagtgccagaattaaaagtgtatgccaccataccggtctaggcttttttgaattaaataactatcactcaacagggcagtggtagtgcacgcctttaatcccagcatgtgggaggcagaggcaggtggatttctgagttccaggtcagcctggtctacagagtgagttcccaggaccagtgagtttcaagacagccagggctatatagagacaccctgtctcaaaacaaaacaaaacaaaacaaaacaaaacaaaacaaaacaaaacaaaacaaaaacaaaaacaaacaaagaacaacaaaaacccaactatcactggccagctgggtattcctgcccaagttactcaacctctctgagctgggctctaccttgaaagatgataagaaataaaacatggctgtcttcatgtcgggtttatagtaggttccaagccaggtttggtagtgcaagcctgtaacccggcactcactcagtttgaggatctcaaattggaggagagaaaacagcaacaaaacaaaacaacaaaacaaacaaacaaacaagacaccttgacgcgacgtgttctgtcctcacctgtccccaaaaaacacagactagtttctacatcacaaatgtccacgtcactcctgccaaatctacccttgcaagggttagaggtaaggtagggtgaggagatgagataggagacacacaaaggaacgagcacaccggacaccaaagaccagaacaggagacggagagctagaaccccaggtgagaaagaggaaagagggaagagaccgcagggctgaagtgggctgagcccggaacaagaatctggactctgctcctggtaccggaagccccagcctctagctgtttgactgcatgcaagtctcacatcctctcagcacctctgccaaaggaggggatcggttggcgttggcaggtccactctcagagtgcaaacaaaagttcccgtggctgatggaacgcaggggtggtgggttgctgcgcgcccccaacaccacagcctatcagtcacttgtcccctctttcccttggtaaatgatctgctgcgccagcaaacaactgtccattgtctcctaatgagggacgagcagggaaagccaatcgcttatgatgcaaatgagccgacggctgtggcccgcgcattcactgggtgactcttttcggctgtagccctgcgtggcccagttggacctttctccctgagtcccagttcccatctggtggaggaggaggcgggggcgggggtgggagaggcccagcctagccctcacattgtctggcattgccactccctgcaaggagccctgaccctttcaaagcctcaggactgggggctcaggtctccctgccccttaatgtggaattttgttttatttagaatgtacatgaaattcatagtacaaacaacttctctttgtaaggcgtacaattccgtggcatttagtacattcccaaggtggtataacaaccacctttctgttcttaggcactttatccccctgcctggggactggagcctttgtggaatagcgttgactcctcagcacaatggaggagttgtggagccttgtgttggagaaaacccttaaagctctttaggcctttggtgggagagtgctccatgtatgggttacacaattccttttgatttttaagctttcggtgaggagccagagttggttcctgcacagatcttggttttgtggttttctgatcctctacctgtctggaatgatctcaccagcagttttagaagccttaggagactcaaagacagcccctgaaaatccttagttccaggaaaccctctcctcaccaggtgccaggggcaagccttgccaaggcaatatttctaacttagtccatagtctattttattctagagccctcgagacaaggagttgggaggaccccctagctgtccttggagtgtcacttgctgatacagtcattttgtcctatgcaattttcaagggaaatggcaagatacctgcttacccagctcctttcttcctccaggaccttgggaaggatttaaagagagggaggggctgaggagatgactcagttgatgaaggaaggacttacctgcaaacttgtggacctgagttaacccccagtagtcatgaaaaagccgtgtgtgtgtgtgtgtgtgtgtgtgtgtgtgtgtgtgtgtctgttggtacaaagaggaatcgtggggcttactggcaagtctaaagacccaagtgagagaccctgtcacaaaaagaggtgtctatcaggtacggtgatacacgcctttaatcccagcacttgtgaggcagaggcaggcagatctgtgtcatttcgaggccaacctggtctgcatgatggattccaggccagccagccaaggagtgaggccctgtctcaacctaaccaaaccaaaccagaaacaacaagccaagatgtttggcttctgagaaaggccacctgaaattgacctgtggcctccacatgcccagcccacatgcacacacaggaacacatgccttttccctgccaaaagcagttctggaattaactcgtggtagtagcagggattccactgagggaaaagtctttagttgcaaactttccttgaccttcaccagcctccagattccatccaaagctcccttccccagacacgggccagacaacttaatgaaggtattctatctgtgccctaatgaatagggacagtcctgagctggctgggtccagttctgccaccgactcataaagtgacctttgacaagcgcctggatttcttctgccttatctatgaagcaactgttgccctagtgaggagagataatggcagggctagtgctttgaacttgcaaaggcattcctaggaatgttgtaattatttccacgggtcagggcagcagcaggctctctggtgagcagggcaggccgatgggtaggtgccaccgttctgactgatgacaaaagggtaggcttgcttatgatgggcaaaggagaatcaaagaagtcccagaaagggagtcagttgtgtagatgcctcggattgtcgagtaaatggctaggagggaatcggcctgttgaggggcagtaggtggcttgctttccgatgttctgaaaggtaaggctaacggcaggatacacacttgagttcatgggttccacgtaagtcatttagtaaatattcattggatgcttaacaaggcagcttccagggcaaactgtgtaataataactatgaaaacaaagaaacaaatcactaaccaacccatccgagagcataagcaccttctaagcgaagggaagacaggaggtagacgtacacatggccgctgacagaagaaaacgttactgtctggtactttggaggtagaggcaggaggcactcttggtctcagtgggtttgacatcagcctgggttagatgaaatcctgtcaccaaacccagaacaaaacaaaaagcaaatgacacaaactgggctggagagatgggctcagtggtgactaaggttactgctcctgtagaagactcaagtacagttcccaacaccgatggctaaatagctcacgactgcctgtaattcccactcatacacacacacatacagggtattaagaatgataaagtttggggctggtgagatggctcagtggttaagagcactgactgctctaccgaaggtcctgagttcaagtcccagcaaccacatggtggctcacaaccatccctaaaaagatatgactccctcttctggtgtgtctgaagacagctaccactagtgtacttacatataataaataaataaatctttaaaaaaaaaaaagaatgataaagtttaattacattaaaccaacggctgggtgtggtggctcatgctttcaattccagcatgtaggaggcaggggaaggtggatctctgaattcaatttgaggccaacctgctctacagaagtgagtaccaggccgggtagggctatataagaaacaaagtcaaatacaaacgaagcagagtgggtattctaagctttttttttttttttttttaattattgtatgggtgttttgcttgcatatatattagtttcaccatatggatttagtagaggccaaaaagagaacatcagatctcttttcttagaaccgaagttacaaacagttgggagctgccaggtgagtgctgggaactgaacctgagtcctctggaagagcagacagtgctcttaaccacggagccatctctccagtcccaggatgggtactataactggggagtggttcttgtctgggaaatcaggggaaaggcttggtgaaggatgggtggaataagacttgggccttgcagaggtagtagatcagtattcaatatagcttgagtaaagtctatgagttcctgcagatactgagccaggcatctgaaaaggatcactggatgacacattaaagagttggctttaagatgtaagtattcagaaaacggggaaatggccaaagacatttctgtcatgtctcctctacattagtgcttcaggctctaattccatagcctgagggatttcactgggcccttccagaaactctttatttatttattatatgtaagtacactgtagctatcttcagacaccccagaagagggtattagatctcatgcatggttgtgagccaccatgaggttgctgggatttgaactcaggacctctggaagatcagtcagtgctcttaaccgctgagccatctcgccagccccttggcttctttacttgactgaatggtgcctaaatcctaagctgagatttctctcttataagtcctgggcccaccacatcatttccaaagaacccctgaactagaacgcttctatggcttgtctcctctggatggtaagcaacctgaaggccagaaggacctgtcacctgctttcacaactataggatcgcctcaatcgctagttttgttagtttgagacagggtttttctgtgcagccttggctgtcctggaactccctctgtagaccaggctggccttgaactcacagagatcctctatgaggtctgcttctgcttcttgagtgctgggattaaaggcatgggccaccacatctggctttgatcactaatcttattgttcactgcctgtttatccccagagaaatgcactggaaaatgtatgggctgtttagcctgacacacctttgaatctgagctttgtcactttttttccttagtgtgacctagggcaagtgactgggcctctcaaaacttcattttgtcagtagggaaggatgcatggcactgtggcgtgtggcaaacaatagtaatggatgcttatggctgttgctcccaggagctggcaggatcaaatggttcacagaacccaaggctggctctctgaaatttcccatataactttagtcatctcttcttcccagaagccccctgttctgcttgggtcttctctgtcaccagtctactatggggctgtttgcattctccctccaggcagcctttctctgctcccctcagagagtaagtggttgctgactctctgggctgtcgggccttgcactccatcagtcaatagagataaattacaaaatcatttgttttatttgttcttgttaccttgagggctgtgtgaaattgcccggcttttgaaagccacatttgcatatctctggctggagtcaaaggctgcagctgtggtttcactgctgcgatttaaatattaataaaaaccctaaacatctagctgttttttttttttttttttttttttttaactagtctggcccttctgttcctaggttgctaatataatctttgtccttggctttgtttaatttttaaagggccattgtggagttaactcaaggcaactgctgcaaccttggagataagaacctcttacaagccccccaaccttgtttattcttttcgggctcaaagatttacctttcttggagacaaaaggaggtacaggaacattttacaggatcttgctccccctatctcacttacggttcttagacttgagtctgctttagctttccaggtcactgggtgggctctatctgccagttgcaggttcagtgggtgtagggcaggtctacgaatctagaagggcgtcgctccactccaaggcctccatctaggggacatgctttgaaaccatgctactaaggtgcgtgtcatatgcttttggtctctaaaaccaggcattcaaaggttatacacccatcagccaagctagggactctgtaacacttaagatattgttccagaatcagttgtttctacttgttttgtgtctgtatatgcacacaagtgggccttagggctccagtaatcagaaggcaacttttttttttttttttttttggagacagagtttctctgtgtagccctggctgtcctggactcactctgtagaccaggctggcctcgaactcagaaataaaggcatgcgccaccactgcctggccgaagacaacctgtttgagtcaggtgtcccatctccttccaggctgtgggtttggggattgaactcaggtgatctggcttggagacaaacgtgttcacctgctgagtcatttcaccagctcagtttcttgtttttttttgagacaggatctcctgtagctcaaacaggcatgagatagtgagccttctgcctctgtctccggaagtgtgagctacatacctcactctcagctgaagcatagctgattgtgcctcagtctctgataataggcgtgcactcactaccttgcagaggactagcttagattcctcaaggcgtgacatttgtagaaaccatttccagttctgtttaaccttccacatgccggggttagagagatggctcagcagttaagagcactgattgctcttccagaggtcctgagttcaagtcctagcaaccacatggtggctcacaaccatccataacaagatctgatgccctcttctggggtgtctgaagacagctacagtatacttacataatataaataaataaatttacaaaaaatattcctgatttggactattaaacaaaacaaaacaaaacaaaaaccttccacatgacgatgctgttctcttgttttagcagatttttaggctgtttgcaggagccaggcatctctgaagcaggatgcagaggcctcaatttcagtcagcttaagccatctgtgagtgagccccacatttgtcgagcagctgcctccctcagctgcctccctctgtccgggtttccttgggcacatctgcagtccctctcactctgccctttctggtgctgattgtctcccaggctgtccttatcagttcccagcagccttcacaggctacattctgggcatcctggctccttccgctccaaccgtcccaacactgatgcctttctttttctcctgcatgattttttgtgccgatactttgtggattctggttacattttttaggagggagataatcagccagagctcttctctgagccccctccctacgcttgcctgccagcctgcctgcctgataatcctcttccccttccagcttctttgcagaatgagataaacaggcaatctaggaaccagtttgaaagtgtggctttgcccagagaggggttagattgcagggtgggagggaatcagaggtcaaaggtgcaagattcacaccatcatcacaacttttttttttttcttttttttcagatagaaccttaaactaggtcaaacatcagagggcagggccagaagtggacttctaggaaaggcacacagagctccaatcagatggggtgtacatgtgcaaagactgagacaattacatgacttttaagtttatttcagttaaatctgcttttacccaggatcccacgaaggcagggatgttcttgatgcctggttttatctgtgtttatgaacaacagcaagttgcacaaaccatgactggttcctggaaataagactcgaatgtttggctctcggggagtggcacttattagaagatatggcctagttggaggaaatgtatcactgtaggggtgggcttcgaggtctcctatgatcaagctccgcccaattcccaggacagtccccatctgctgccttcggatcagggtgtaaaactctcagctcctctaggtgccttgtctggctgcacactgccaggcttccatcatcatagactgaatctctgaaactgtaagccagccccaattcagtgttttcctctgtaagagttgttgtgggaatggtgtctcttcacagcaacaaaacccaaactaagataaccactaacaatgagacacatcagttccttgataagttcttaccaaagtaacaggtctgggaggtcctgctcagatgaagctgaattggaaagcatttttcttttttttttttttaaagatttattattatacataagtacactgtagctgtcttcagatgcaccagatctcattacaggtggttgtaagccgctatgtggttgctgggatttgaactcaggaccttcggaagagcagtcagtgctcttacccactgagccatctcgccagccctagaaagcatttcttcttcctctctcctctcctcctctctctctctctctgagacagggtttctctgtgtagccctggctatcctggaactcactttgcaatttgtagaccaggcttgcctctgcctcccaagtgtgtggcctacctgtgagttcatgtgcaccacatgtgtgcagtgcatccacattgcattcccaggaactggggttagaactgaccaacgctgggaaccagatcctatgcaagagcacaagatctcagctactctcagctactgagccatctctccagatccttgttttgagatagggtctcacgtggcccagtcttaccaggaatggatcacccagcttccacctttcaacttccacctccaaatctgaaccagtattttttgatagttgaagaaacaaacaagctgggagattgaatgagtaggagtgagggccatgatgagaagctggccaggcaggttgcctttgttgactgcccaccatggccagtgaaggaagcctttttgtaaagctctaaacctaaattgctttctttcctggggtcatgactgatgtaagtggaatgaaggatgagccagaaggcaggccagctttcttcagtcatttgacagctatggaaaaacctcataaataagaaatttatttccatttttcaaattaagtgatgaagactgagatagaatagagtgagtacgctttgcttcgtttttctacctaccccattcatcctgtcattactgatgtgtgatgatttcatctttgtcttgaaggagattctattctctgaatagcaaaaggattaagataggatgtacaggtcggtggcagcacactgctgtaatcttagtgttcaggaggcagaggcaggtgaatctgtgtctgaggtcagcctctcagtgtaggaggttccagactagccaggggtacataagaccctgtcatcccttgacagttgtctcagtttaacccaacactaatccagaccccactgtgaggggatctgtaactgccacgatgggccttgagacaggagaacaccatgaaccatccagtgagtgcaacctaattgcttaagtccctacaatagaagtgccttcaaagggttagggagacaaagcagccggacgtagatgcagtggagaaaaccagcttggaagacgagaggcagtagaggtggaacccactcgccaacgatcaacaaggacagaggtctcagttccaaatcacaaggaacaattcagacaatatgaatttacttatttacttatatgagacagggactcattatgtagctttggctggcctagaactccctatgtagacaggttggctctatactcacagacttccacctgcctttgcctcctcagtgctggcattaaaagtgtgcaccaccctgtctggcctaacttgaaggaaatctactcccaagacaggatttctctgtatagccctggatatctttgaactcagagatctgcctgcctctgactcttgagtgctgggattaaagctgtgggccatcactgcccagctaacttgaaagaatttaaagcaggttcatcctcagggcggacagaggcctgctgctaccttgctcttggtttcatgaaacctgaaacatgtgggctccttagacatgcaagtgtatgagcacacaggccatggtgtatttatggaggtcagagacatcttgcaggagtcggctctctttctaccatgtggatcccaggggttagttgaactctggctgtctgtcagttgtggcagcaggaccttatccaatgaaccatttcaccaggcccccaatcagtcattctttgtcaaaatgtttgctatttagtttatttgcagtattaacagcacagcatttataaacatactttatataatcaggtctccattgcccttgcatactggggggggccagagaagacctactccccccaatatctataaacagtccaagattatgagttcatgaaaaatatgttctcttccttcagcaagcaaaattatttatgaagtagtatgcctcagcaacagggagcaaaagggaagaaattacttcaaagaaagcaacaactcctttcctggtggaatccatcattgtacagacatgaaatattcatatcagagtccgtgtatttaaagaagaatgggttacttagagctgctacaacagatacactgctcataagctatggggaattagaaggctctccttgacactggcacttgaaaaacctcacattcacatcaaatacataatctggctctgaatttcctcagtgtcctgcacaaaccctattctgggtgttgtttggtgctggctactaaacctggagccttgaggagcactgattttaagtcaaaccacagatctcaagccatctccttgaaggacttgactcttggcctttatgaacatgcaattttataaggaacaaatcaggaccactagctatttgttcttcagtcatatacaactcacgacatgcccatctctttccaccaaatgctgtgattataggcaagtaccaccatgcccagctcagatcagccaagccactctactgtctctccaagaacgatatgcaacagattagcatcttgctcaattggtgggataaagctttctcaggtgaaaactttttgtgttcaagacagacttcaaagggggacttggttagaaaacctttaaggcacccaccctcacataggtagaagctggtttttccaggcggatgcatgaaaaatacttagtaagtagggtgtggaagcaccaaagactgagaggtgctccccgggcatggaagaccatttcttaaattaatcattggagtcttgtggctcactactgtcacaggtgatattctgtaccaggtaggcatccagatcccgacaccggtagctggatagactgtccaacacccagtcccacatcacaagacgtgccttgcacagctgcccaatatctgcagacagaaacaagcagagactggtgtaagtcatccttctagacgagactccaaccataccattctaagatctgagtatataagttcttagggctaagcaggtactcagaaacaacacattaggaccttattcaaaagccaaaggagtgagcgtggtaaaagcccagactgaaataatacgaacttcaacctgttttaggaaaagccacgagagagcagatggtgtggaggaatatcttaagtgaaaagacaaaatatcataaacacgatcacttgtgtgtaaatgtacatgtatgtacacacatccaagcgtgtattactttatagctctggtagaccttgaacttgacctgtagagcagacggtacttaagctggcagagatccaactattctcccaaatgctgaggttaacagtgtgtaccagcacatctggtctcatacagtacttttaacttctacaaatatacacttaaaagtaaacaaacaggcatgtacacacatactgaagattttctttttctttccttttttaaaaaaatttatttacccattttatgtacatcagtgttttgtctgtatgtatgtctgtttcagggcattggatccctggaactagaattacagacagttgtgagttgctatatagtagctggaaattaaaccccggtcctctggaagagcggctaatgctattaaccatggacccatctctccagcctgcctcctcttttaaatttacttatttttattttacatgcattggtgttttgcctgcatgtatgtctgtatgagtgtcagatcttggagttataagacagttgtgagccaccatgtggttgctgggaattgaacccaggacccctgaagagcagccagtgctcttgaccactgagccatttctccagccccatcataaagatctttttttttttttttttttttttttttgagacagggtttctctgactgtcctggaactcactttgtagaccaggctggcctcgaactcagaaatccacctgcctctgcctcccgagtgctgggattaaaggcatgcgccaccacgcccggctcataaagatcttttaatagacattttagttgttcattcatgcaaacattaaaaataggctgaaagctgggtagtggtagcacacgcctttgatcccagcaatcagggggaagaggcagatgaatcagtttgaggccagcctggtctacaaagtgagttccaggacagtcagggctacacagagaaaccctgtctcagaaaaaccaaaacctcaaaacaatcaatcaacaaaacaaaccctataaaaacattgagtgcagttggggcacccctataatctcagcactttcaaggctgaggcagaaagatcaccaaatatttgagaccaggatgcattacatagcaggccaaccaaaacccaagacaacaaacaggccactcatggtgacaacactttcaatcccagtactcaggaagcagaggctggtggatctctgcgttctaagacatgaccttgtcttaaaatcaaaccaaaccaaaaccaacaaaacaaccaaccaaacaaaaaaccccaaacaggggctggagagatggctcagcggttaagagcactgactgctcttctgaaggtcctgagttcaaatcccagcaaccacatggtggctcacaaccacctgtaatgagatctgatgccctcttctggtgtgtctgaagtcagctacagtgtacttaagatataataaataataaattaaaaaaaaatttaaaaaaaggaaaaaaaaaaaacaaacaaacaaaaaccccaaacaaaaaaagcagctgagaattatatcagtcaggtaataaccagataactaactagtagggaatcaaacccatccaacaggacctcacatgatgtaagtgtacagtacatggagaaactttacctgggcagttgctgtcttctgtccaggcgcttggctgcacgatcacaactagatgagcaccctgcatacccagaaaggaaaaagcatttagtgccaaagcagggcttctgggaaagtcatgtccacttttacgtggttaaaagggctagaaggaaaagacctccctcgatacattcaatgcttacagtttctaagcttttactcacagacagtcttctgctacagtgtcaagggtagagaaagccctttgggctactttgggggacttgtttaatggaaggagagtgttttcctctccttaaggccccactgtgatactcactgtgtcatgggtgagcgatggaagctccttcaccacggaagccccacacagctgcagcatcctctccagctcatctgcacagcacagatgtaaaatcacaatagcgacccacatctactcccagtgccctctacagcctcccctgaagcgaacctcagtgagctgttttttttttttttttttttttttttaatttaaggatagaaaaaccctaaaatcagtatgacttctaagtcaatctgccgctgatgtagctgctgcctacttttggttattagtctccatgaagccatgtggtagataaggaaggcctcatggtcttccaaatgaaacatgttgaaaaagaggactgaatttccaaaaatttgctaaattgttagacactatgtgaaaaacccagtctttttcctttgccgctacatcctagtttgctgttgggaactgacaatcatggcccttgagagcacctttcttcatggtaattactctaaatgtcaaagactggaagatattttatccagtgggaaaaagatacaggtcaccctggccagagatccagcgtgtcattaggaaagatcacatgtgagccaggatccacacatctaggggatgaatctcataggaagttgggcctcagcatcagcagcactgactgagcaaccttctaggcttctttggagatgctcaaagcatcctcctactgttcttgaaggaacatctgctcattcccgggaactgtggaggcgctgcctgaaccgaggctactaacttaacccctcccgcaggatactcactagcgtccctggctttcattatattaaagtctaaacacataaaacattgagtgacacttgagaccttctaaaactgcaatcagtaaccagtacagaaggaaacaaagtgacactgctagggccccttgctgtggccagacaccaatgcagtggttctcaacctgtgggtcacgacctcttggagggggggttttcctacatcaaatatcctgcatattggatatttacattatgactcataacactagcaaaatcagttatgaagtagcagcgaaataattttatggttgggagggaaggtcaccaaagcatgaggaaataaatatgagaaccactgctcctaggcttccctctcctaagtcatacaactccagccccaggaggtgaagggaagcagagaaaaaagatgagggaccttccctttgaaaggaactaaccaaatctatacaaggacaagggcctttgatacataagcccagaaccacagcagtcttccactggaccatttaatccacccgaggaacttccatgtaggtcaatgctatctgtaatacgctgcagactcccagggccttacctttgggcatgttggtgaagggctcacaacaatagacctgtaggcccttgaagagctgcaaagagaggagagtaagtgatggggtggagagaaacagttataatttttttttaagatttatttatttatttatttactatttatttatttttactatttatttcagacaccccagaagagggagtcagatctcgtgatcgggtggttgtgagccaccatgtggttgctgggatttgaactcctgacctttggaagagcagtcgggtgctcttacccactgagccatctcaccagccccccagttataatttttaagtgtgtgtgtgtgagacagagagagagaacaagaaaagagaagataaagcacgtggtatgcaggtgtctaaggaggctggaagaatgaagaatgcaccacatcttctggagctgaggttactggcagttgtgaattggtcaatgtggatgctgggaatcaaaatcaggtcttctgaatgagcagcaagcactaaccaatgagctacccctccagtctcccctttttgtgagacaagatcttacataggccaagtggcctcaaaacttataatgcaatgtaggctggccttgaatccctgacccttctgcttccatctaacaaatgctgggaatagcaccaccagagtgtgggtttttataagaaatacagacactctccatgcacaatggaagagactatcacttgacagtttgtcctctttcccagagacaatcagttcaagattctgaactgattttatattttattgaaatttgcattcaatcaatctacattctagagtcattaaaaaaaaaagcatgtatgtcatatatgtcaagtgccagtggaggccaggagtagtcagatttccaggtgccaaggcctctgagtcatatctctggcctctgtagtcattcacttcccaccttgttattagtccggcccaggctcatgctggtgactctggtcagagatgaggaaaacaaaagtagagacaacgaacacacaatccccccggtcctttatgtttaacagcaagaaatgcagagctctctggctgaagtgagaggcccactcaggcttgttacgtcagaagtaaatgtgaaccccgccagcagagcgcctgctatgtgaacatgctcgctttacacacagagcatgcaccctcctaagggaaaaatgtaattacagtgctcctcagtgctgcctgaagaactttctgtgatcctggaaatgtcctgtgtctggtctcctaaggctggaggctacaagtcacatgtggttgttgaacatctgaaatacggtgtgagcgagaaactgtacttcttaacttcccttttctttaaaaaaaatatttttattaattttatgtatatggtgtgctatctttgtgcacatcagaagaaagggcatcagatcccaatatagagggttgtgagtcactatgtgggtgctggggattgaactcaggacctctacaagacttgtcggtgctctcaattgctgagccatctctgtactctcccttgattaatttattttaattaattaattttgatttttttttttttgagacagggtttctctgtgtagtcctggctatagctacaactcactttgtagaccaggctggtcttgaactgagaaatccacctgcctctgcctctgcggggattaaaggtgtgcgccaccaccgcccggcccctgccttaatttattatttacctttatgttatgtgtattgtgttttgcctgcatgaacgtctttatgtgagagtatcagatcttcgagttatagaaagttatgagctgccatgtgggggctaggatttgaacctgggtcctctggaagagaagtcagtgctactaaccactgagccatctcttgagtcaaaaaaattttttttcaagaaagggtttctcggtatgtatagtagccctcactgttctccaactcagagatccaaactctgtcatctgagtactgagattaaaggtgtgtactactatgcccaagcctgaacttctaaattttcagttatttttattttttgagaaaagatctcactatggtcctggtagcctggaactctttatgtacacaaaggtggacttggaatgtagagatccatctgtctgtctgtcatactgggattaacggtgtgtggcaccatgtacagtggggatgaggggctgtcttcctcattgcacttccaccccaccccaccgtactccgaccctcccccagacagggtttcttcgtgtagccttggctatcctataactagcagaggtctgtgagcctgtttccttcccgagtggtgggattaaaggtgtgcaccactaccaccacctgttaaggagctggtttatttagaggcaggacttcacagatgctaaggctggcacagggcaagcatgtgccactgtaccatattgaaaaaactatacacctgcctccaactcctgaatgcaggaaacacaatatctgctttgaactctttttttttgatgaaacttagaacagcttcaatgtgtctagtaacaactgtgttagtatgaattcaaaaagaacgaaagaaaaaacaaaaaaaaggaagaaagaaagaaaaataaattcttatgtgtacatgggcatgaattcttgaaaggctttcaagctatcattcttcctgctttagccttgagtgttagtatcacaggagtgccatcagacctaggactttcatatatcatttgagtgaccctttttttttttgaccatctttctaccctttaatgacactaacacaaaatttgtctaggtctaaaaatcacctaggcacagaggctgagagagaagatcaaggggctaaaagcacacagatagctccattggaagtggcttcatcctacactgcaggcaggagaaaggagcagcgggcaaatcagttattgttgggaacggcagttcaggaacctctgctgttctcccaatctgtacgaataaaacagatccccaacgtgctgacaggacctaatgctcagaaatgcgacaagttccctcaggcagccaaacgctgccttgagaaggctcttcatatccaggttgacgcttactgatgacagtgtctagtggtgagataagaaatctgaagctcacctctacaaatagatttctttgtgaaaatactgtagtgacattttagtatcttctgaatgtcactacttcgcccaagcaatttccatcagtgctattttgaatgtgagagaaatcctaagggatcttgagggagaagggacccactgctaattgtgcactcccaggtacataggaacaaagggtcggctcatagaaacaaggagaagtggaagcagggtgaacagctgttcttggcatctggaacagggatctgataggctcagagagaggatgggctgatcccagggctcagaactccaggcttgatttgtgatcctgtccagagcagttctccttagaaaaacaacctctactggtctcctctcaagtttctatgaaggaacagaaggtgctccctccgtgtgggactgttctgaaacacctgctggtgcacacttgaaaaagaaaagcagcctgggaacacaagcacttatccagtaaccgagacggcagctggctcaggcctgccaggcaggtgcgaaatcttgggaagacttcttcctgcgaggaagatggagttccggctgcaccatctgctataacacgctggggaaagtcatcgagtgtcctgctcttacttgcaaagttgcagggagaatctgttttgctcctgtgaagctgtctacaactttctaaagccaagacacttgtgaatttagacttggagtgcaggtgtacaggctctcccccttctaccgctccctagttatgtgatgatggggaacttaagctacccgccctcaattttctcatgtgaaatagaggtaatgcacacatatcacagtgttgtaaaactgtggactataaaccactttctgtgcacacactgctcatccagcactcatgtgatgcttagagaaaagacaccgtggtgcaggaaacacaaaaggcttcccatctctgaggtccaagctctgtcaccatcagctaggatctaaacctcagactggaacccaaactacaactgcaccctcagcctaatgttctctttcttatggggcacacaagtactccatttgccttcttgggctaggaaacaaaacaaaacaataacctgtctccactgcccagccagtggtctgatagcaatcatgccaagtgcctaccaggtaaagactaacctcaccatagcagctggctgcagagccttaggctggggttctgtcacataaagagggactttaccttttcccgggattctctggatcgccttggaccttggtgatttcttccagtcacaacatctcctttgacttcaaattcatgctgaaaccaaacacaaacctctgtgattactggggtgggtgacggcccagccacgaagcattaaggcactacactcatgtccaggccagccagcattacataatgaaaccttgtctttgttattttttggagacaagaccgtggagcctggctggcctgggatgcagaaatctgcctgactctgccttctcccaagagctgagattaaagagacatgccaccaaacccaggtaagaccctatcttagaaaatatattttaaacattcattctttttattttatgtatgagtattttgcctaaatgtatgttatatgtaccatatatatatatgtcttggacctggagttaaaaattagctgtgagaacccatgaggctgctggaataaaaccctggttccttgacagattagcaagtgcacttaactactactgagtgctcttccagaggacccaggttcaattcccagcacccacatggcagcttgtaactgtctgtgagctgtgtccagttccagggaatccatcatcttcacacagacatgcatgcaggcaaaacacccatgtatacatacacaaaaagatcattcaaataatgagagagagagagagcgcgagcgccaacgttcatctgaagtaaagccagcaaatctactttaggtattcagaatcacaagttttgaccaaaagtaaggaaattactttgtgaactagaggtaatgaccggtgtactggcaggttttgtgtcaacttgacccagctggagttatcacagagacaggagcttcagttggggaaatgcctccatgagatacaactgtaaggcattttctcaattagtgatcaagggggaaaggccccttgtgggtgggaccatctatgggctggtagtcttggctctataagagagcaggctgagcaaggcaggggaagcaagccagtaaggaacatccctccatggcctctgcatcagctcctgctttctgacctgcttgagttccagtcctgacttcctcggtaatgaacagcaatgtggaagtgtaagctgaataaatcctttcctccccaactgcttcttggtcatgatgtttgtgcaggaatagaaaccctgactaagacaactgggatctcagctgctaaagtcaatttattacagcaaccattttatttatttattgtgtggcgcacatgtagaagttaagagaacaatttgctgaggttggctctcttcatctccacgtgggtcctgaggtctgcattccaatggtcagggcagctggtaccttcgtctaagctatcccaacatccccaaagagaatctttgttgaaattaccagttggctttcatcccactgggacttgattttttttgtttttgttttttttttgttttgtttttgagacagggtttctctgtacagccctggaactcactttgtagaccaggctggcctcaaactcagaaattcacctgcctctgcctcccgagtgctgggattagggacttgactttttaaaaatgcattttaatttctaacatttgtatcttctcaaaacattcacttagcatttacattaaactgctaacattgtgagaggataactggaggattcttggtcacttaaatcaactgtattttgtcatctgaagaaattagggtttttcagagttctgttgagagatttacagttagagaggtcacaatgataagatggggctggtgggatggctcagtaggtaaaggtgcccgccatgaagcctgataaccagagtccaccacagagccatataaaggtaggagggtctacaaagttgtctctgatgcgcgcacgtgcacgcacacacccatacaccctattctaaagaaactcagattttttttttcatagtaactattttgggaggtggaagttttcaggaagaatgcttgaaagccactgggactgaaactaaggctgtaagtgtttgaggagcaggaaccaagcacagggtagaggtaccgcattcagtgggcaaagctcttgctgccaaatttgacagcaagtttgatctttgctgactttgatgccagcctccacgcggtagaagagaaccaacatctggtgcttacaagttgtcctctgacctccacacgtgtcaagtcacacaccttccccacactaaaaactcaaacgaaccccaaaatagagactatatccatgctccagattatcctaaaaataaaactgaaattatgactgtggttaacacaaaatctgaactgccttggcctttggctgactccttcccctcatctcacctctggtccctccctaaactaattccccgtcttcaactacgatgttttttttgagacagggtttctctgtatagtcctggctgtcctggaactcactttgtagaccaggctggcctcgaactcagaaatctgcctgcctctgcctcccaagtgctgggattaaaggcgtgcaccaccactgcccagctagatttttctttagtaagccaaactcactcctacatccaaatctttatgctttctgttgttacctataagaaccattctctatatttttcaaagacaattctttcttgttatttaggtcacaaataacaaaagacttcgcttggcctcttgtttattgtttatctctccatacatcatttccagaacagggaattggccattcttgtttactgttattcctcataactgacacttagcaggctcccaataaatggtccttatgtgaaattaaaatcaggatagtgcataatacagttttaaacagattccactgagtttgttttgtgtgatctcttgtcatcagctctcggctgttctaaacttattcttcctcctacgtgcttaccagatgtacctcacactcttcttagtattagaaaaagcagcgtttctaggaaggaaactaacttataaacagatatattagcatattagcatattcattattttctgagacagggtctcaagcagcttatgttggctttgaacccatatagtttcaggattaatgaccttctcccactgcagctcccactgcctcagggcctaaataacaagcttttgtaacacacatttgtgaggtactacagctcaaacccagggcctcaaagacaagcataaaccaagccacatccctacccaaagtctttaacaatggtgaatagcaagtttcctacaaaggtgtacaaaggagtcaggagaagcttagcagggtggaacctacctataatcttacaatcccagcactcgggagacagatacaggaggagcaggagttctaagccattctgagatacatgaaactcaaataataacagtaacaatgataataattatcatttatattactgtggaccctgtttctgatagaaagaaaggaaggaaggaaggaaggaaggaaggaaggaaggaaggaaggaagggagagagagagagagagagagagagagagagagagagagagagagagagaggaaggcaggctcttaaaccaggtgcaagctgtaatcccagtacgggaagctgaggcaggtggatttctgatttcgaggccagcctggtctacagagtgagttccaggacagccagggctacacagagaaactttgtatcaaaacaaacaaacaaacaaacaaacaacaacaaaacaaaccaaaccaatcaacccaaagacaggctcttgctacatgccagggtcacagaggtgcatcaccccatctgtttctggaggtggttcattatttgttcctccgaatttttaatctgtaaaattctttctccgaagaaaagactttcctttaaaacctagaatgcctgagaatatgacatttcctggcctgttctgcatcactcccttgttgaggaagaaagcagacccacaccctcctccgcctgacaccccacctgacccatgcgaggtgtcccagatcagttcgtatcaggtacccaccacattcagaagtcttctttcttggatagaccggaccacccctgaagagaatacagagaaggtaagtcacagagaacagaacaacacgtcccttctgtggaggtgggaagctcagcgattcacaaggctcgtggcagagacctccctctggagacagctgctacctagtgtaaacattataaaagtgctgctgtgcatgggttcccaccgactattaaatgaatccttgttcatatgctagctctgctcagagaagatcaggccctactggttatgaaagaaatcactttctcagcaatgccagtggatctgaacaaagcgacacgcacctagagacaaagctagttttgtgataccactagagaccctttggtgctcagacttggcatcagcagaaacctcacgtgttaatgttaggtgtaaaatgcagctctgaggtgctagagggagcagcagagacacgcccccaccccccaatattgtactcacatgaatagctaactatccactttcctcctgcaatgcccagaaaatatttcagtgtccgctcacacacaaactccgcatctgcaaaaatgaaaaacacccaaaggctgaggaagagcgaataagaggcgctgcccctgaagagctggagccccagccctagctcgagatcagtctggaatggtgattcacctctgatgacagacaaccaggtgtggggtttacaagtttggaagaagcagacgccatgttaagaccagaggatcactggctcagctttgagatgccaaggttagctgaagagttcgatcccgttgattacccatgctgtagtgctgactgatatggactgagatctattttaccagacagcaatatgtgagagaagaaaatagtgctgaagtccaacatttgaaaaaaagatcctaaatcagaaatgccgacgtgaaagaagttcacccaggcaatttctcccaggggacccttaccccctgtattcctgagaggttcaggaaaagtcttgttatagctatcccttttttgtatttcaataagcagtggctgaagaatctgtttattgcctagtgtttcaaaggcccctttgaagaactaagcaaacagaaaaaaaccatttaaacaggagaaaagtattcaactgaatcccaagcacagcaggccatctgcaagtagaagtggccattttgcctcacagaattactcatatttttttggaagctttttgtttaaatgctataaaagccgattttagttcacaagcaacaaatgttgtattgcttttgagtttaaagagttactttaggtttaatttgtattttaaagctcccttttcagcctttatcacctttcatccaaacttgctgcttaaaatgtatgaaaattcaacgacattcccctcttcaatagtacttagcttgccacagcttgtcctggcacctattgtaatgagcactgccccctggtacgatccactgaagaagggacctagattttagctttcttaaggcaaagagtcaaagagccttgggccccttggaaaagcctagagccctgtggggagaaataccccagatggggcacgagtacaccagaaaacagagtctgttagccaggttttagagtgtagccataatttatacttcctacatccccaggaatagtggcttgtttttaaatttctgaagcctgacaataatttttcagctgcttaaagatggatatcttggccccttcagtctcattcctttactttgtcaaacatcacttttaataaaaatcaattgttttatatttactttatgtatgttttgcttgcatgtatgtctacatgtctcatgcaggcctggtgcctaaagtcgcaggcaccctggatcccccagcacaagagttatagatggctgtgagctgccatgtgggtgctgagggtcaaacctgggtccactgagccattgctcgagccctggaactacactgagttcttttctccatctgtccttcaatgctctctgagctcattagttgccactatgaaaagcactgcgctcagcacagcggatatcacctagactatcactccacaatattcaaaggcttcacctgctccacgttatcaggctgtgttaatgcagggaagcagcctgcaatgtctgctgttcactcagactttacacagtcagtgaaagctcccagagctatcttatacaagcacaattaagactaaacgaggagaaagcacacaagtgagtggctcactctttcccctttccacattaaggttagaggacttactcagccacactcaagccagaggccacatgtagctagctagtctccagagttcgagagaagacttacttcttctctgcctcacttgctcttccatgatttggtctgttctatatgcactgaactccaagcaggtagacaggaagtggttcagcactttgcctggccactccccaaattttaacccaaattagtaggtcaaacaaaatggccacctttataaagcaatgaatgactatcaggaaacttcatccatggcttgcttaaacaaagataggctaaggactctggaatgctaggcccaaaagtattttttttttagcaaaattgcatatatattgagacatcttccatgcatagcacaaatccaaattttgttgctgttgcttcatttattttttgagacaaagtcttgcttcacagcctaggctggccttaaacttatgatttcctgcttcagtctcctgaacgttgagatcacaggtgtgagtctccacggccaatctgagggtcatttcttacttatggtgctagagatagtacctagagcagtggtcctcaacttcctaatgctgcaaccttttaatatagttcttcacattgtgttgagtccccccaaccataactgttcttcataactgtaatcttgctaccgttatgaatcataatataagcacctgcattttcacacgttcttaggtgacctccatgaaagggttgttcaacctcaccaaagggtcaggacccacaggtgagaactgcggatccagggccttctgcatgtcaattaagtggcacccttcccctcagcttcatctgcacacctgaaggcaacggtacacacgtgctgcccatgcccacatcctgcctatgaactatcccacgagaagtggagttctccgtttccgatgctgtctacattcaaatagttgaggattttgaacttttgggttagggatgcttaacttgattgacatagctcttcatatagcttatgatgtaaatacagcgtagcctgtaaaagtttgtagtgtacctgtttttataattacatgtgtagtctcctcagtaattgcgtcagttaaagtgaggcggtatttttcagcaaacttttgcacggtcatctgaaacaaaaatcaaacactgaattatgctgttaattctgctacacagcttaaagtaataattactctgattttgagtctccattctcataaaaggcacatctcttaaaactgtttaaatgttgattgtgtgtgcttgttcttcagcgtgtctgtgtaggcgtcaaaggacaggattgtagaatagcttctctccttccattttcatttgcattttggggattgaacccaggttggcaggcttaccccatcctggcttttaaacataaaacatgcctgaagtctaaaaaaattgacaatatgtgtaaatcagtcaggcatggtacttgagagtcagaggcaggcagatccatgagttcaaggccatcctagtctacatactgagttctagtccagccaggactacatagtgagatcttgtctcacacaagtaaacaatgcctcgccttcaaacaaacaaaacccccaaaaccatgtataagtcagagaaactttctaatgtagttctatatagtacaagaagccatggaattataaccaaagatcatatagcctgattctcttgagtttctttacagaatgacagcctactatactctaataaatttataagtctacatctcaaactgagttgtaaccagccttatatagaaagttctgttgtagataatacatagcttaaagtcaagattcaactctgatagttacaaagcactcaagcaaaggtatttgtagattcagtacaaaaaatatcaattctctcttaaggaaaaatattggaagagactcattctttccaaaagaaatctagagtcccttagctattatctatcaagcaaataaaaatcaataggcagtaaaagaaattaaccatatctattatgggcacagtggaaataactggtagctactgtttggtaaataagcttgcttaccaagaagcttcatttcctagccttccccacccacgccaagatttatgcgccccttagtactgcaatggaagccagcccgtgctgcctcactccacactgccactgagcactgaagaacagcaggctggcgaagccaatgctaccctcctccaacttttgctgttgccctctgccagtgtcattagcaattctgaactggttaattgctgaaatcccagctttaaaacagggttcagttagacaggcaactgctgaaaagatcatcttaatatgggcttcagaattaatcatgtgtaatatagtcagtggctttcatcataaatttaacacacttcagcaagtctgaatagagctcaaagttttcttctttgcttgtttaaagaaaacatgtacccaagcacttatagtttaatctgcagctcagaattgcccaaggcgaaaatgattagactactctagctatctctaaagagctgaactcaaaaacaaaggattaaggtaataaaagatttcaatgagcgggcagtggtggcgcacacctttaatcccagcactctggaggcagaggcaggcggatttctgagttcgaggccagcctggtctacagagtgagttccaggacagccagggctacacagagaatccctgtctcgaaaaaccaaaaaaccaaaccaaaccaaccaaacaaagaaacaaaaagatttcaatgaaggggaattctctgtgtgcaaggaagtccaccaggagctattcaaacaagtacgtgtaagattttccagaggaactgctgctggagcatgggactgtgaagtgacaacatcaagttatcatcttgtatggatatactgcatctgtgagggcagcaaagcttgccttgccttttcaatggcggaacacgtggggccatcgagaatctatgctgagtcacactacctggagagctgttaggatggggaatggagccacgcctatgaaggctctattaagtaagagtttattgcttaatattgcctctcagtgtgtaataaatggcatctactattaaatccaatcgatggtctgacatgttattatatattaccgtaacagttaactataggagaaataaattccccagaattgttaaaatctataagcagcttaaagagaaaaatgggttcagtgggcttaatgtttatagtgagtataaaacaatttccatctctggaggtgcacaagggcccgaggtgcccaagccctagtaagcgagggggtaagtattgcagggcagaaaggacagacaggctgttcccagccaagataaagacaagccctggagaaatgcagacaagtttacttgatgtgaactgagggggaagacaatgcctactgaagagagctgctctacctagttactcagttattgttttttgtttgttttgtttggaaaaaaaaaaaaggaaattccaatacattcaaaatctctatcatacctcacaaggtgcctagtattcaccaagtatttcttcaaataactttcttcctacaggttatccattgccactacttatactaattatctggcagccaaagtcaagccacagttagagaggtacagaggacacactcactacttctttgggggtcaagcctgacaccaccatggatatgtctctatccgctctttcttctgaagatgtcaattccggctttatcttgctcacaattcctaccactgctttatcagcaccagcagcagctgcactccggaaagcaacttgaccttggggtattttcagtgcagaggttgaagctggtgtggtgccaatgtgggctggctctttaggggactcagattcggggtctctactagagaaaaggctgattccagatcccaggtatggggttccttctgcaaggaagacaaactcaacttaagtggcagaaaatgttgaactgaagtttctagtttctgtgaagaaaaagacccattaagttgtgttaagaagaagaaaatacagtagtgaaagcatggtaccataacttctctaaagaataatataggctggagaggtggctcagtggttaagagcaccatctgctcttccaaaggtcccgagtttaattcccagcaacctcatggtggctcacaaccatctgtaatggggatccgatgccctcttctggtgtgtctgaagacagggacagtgcacccacatacacgaaataaataaatctaaaaggaataatacggcattatatgtaaagggttggctctctccttctaccctgttatcagatttggtgacaagtgctcttatctgataagctatcttgccagttcagaaatatagtctgtagtcaggcctggtggcatgggcctataaccccagctactcaaggctgaagcaggagaatcacaagttcaaggcttacctgggctacataacaagtttaaaaccatttttaaatttgaattgattagttgaaatagggtctgcagtgtcactgatgacagtggccttgaactgtaggtgaggcaatcctcctacatcagctactgagaccacagacctgtcccgctgtattatattttagaactatatttaaaaaaataaaactgagtaaaatatctaaagaaacaggaattagtattgttattactattattttggtagagggtctcattatgtgccctggagctcactgtgtagaccaggctggcctcaaactcacagtgatcctcctgcctctgccaatcaggtactggcactaacaggcatgggccaccatgaccagccaaaatagcaatattttattactcataactggacaggagaagaggtgattttaaatactcttatttactgtattgtccaatttgggggcagtcaatatacaagattttcatgaggaaggaacagaaggttaaaatcataaataaaatcattacatttttcacttaacaggtgctaactaagcatgttaagaacagtagatttaggaaaacgtcactgatcaaaacacccgcctctggcctcaacaggcgccaggtacacatgcagtgcacagacacacgtgggcaaaattcccatatacacagcataaaagtaagtaagtacatcttaaacaaaaaagtaagcgaggtaagaacgcagccagacactgcatctgatgccaaatagtgtttttatgatcatgcattttgatgagtaattaaagcctttctttactaacaaaaactgatttacaattaataaaatatatcattttatgtgatttatgaagcataaaagacagtcatttatatttattaaagatagctcactttaggatgtgacaaaggacagactcctaactttattctgggtcttaagattctaacagatgaagccaaacatgtcgatgacagagtctaccatagtcaattattgctaacccaccgtggtcagacttgctactcagactgcaactcgagttatttttcaaaggtgcacttaccttaggataacaaacatccacaagccagtgcatttgaagacctactacaacagcagacagtgaaacaaaaagtctttccattaaaaaagatggagtattacctagctctcgccttggcaggcaagactgccctgttgaattgtgtggctcagatgacgcctctgatccagcaggctggaggagctcctcctgagagggggagtttctcttttgaagatgcctagagcagccatgtgcagagcccctactgcctgccaacggagatttaaaaggggaaggcctggggagagggatgaaagaggaaaaccatcactaccagctcagaaaggcctgatcagccaggcagtggtggcgcacgcctttaatcccagcactctggaggcagaggcagaggcagaggcagaggcagaggcagaggcagaggcagaggcagaggcagaggcagaggcagaggcaggtggatttctgagttcaaagccagcctggtctatagagtgagttccaggacagccagggctatacagagaaaccctgtctcgaaaaaccaaaaccaaccaaccaaccaaccaaccaaaaaacaaaaacaaaagaaaggcctgatcacgccccctcagcagccaacgtatgactagaacatctgactgtcagagaaataggggatgaccagcaaaaaaacccttggattcatgctgcctaacatgctgctgctgacacatgacagcccctcagagctggtctgaagccctgaggcctgaggctgatcttggagctgttgaaaagaatgtcagcattttttttctttttgccaaatacccactattcctaatttagattccatattccccttgagtccaaatgcatgtgaggcctcttatggagatagaaaactgagccatgttgacatctctatactttatttctacctaattttggaagaatttagagtatcacttttattccctgcccttaagatgtccaaaaacaagaggctgggctggagaaatggcttaatactttacagcacatttttttccttcttggagaggacctgggttaagtcctagcaaacacatggtagttcacagctgtccaataaacattccagctccaggatgcacatgatacagacatacatttgagcaaaccactcacatacacaaaataaaataaaagtcaggaatagtagcacatgactcagagtctacctcccaaggaaaaggccaaagacccccttggctacatggtaagttcaaagccagcctgggctatctgagatcctgtctccaaatacatacacaaataaattaaaaacaacaaaatcaaaagtcaactcttaggggtaagcacatatctcagagctaaagcacttgcctagcacatgggaaggcctgcttcggatccccactatcacatcccttaaagataataatatatgtgtgtagtaagtagttcctcgagtgtttggagtgttcatgacagtatgccaatgagatgcttactactaaacacagcttcagtgcccaaggaagctgactttatttatttatttatttggtcacaatcacaatgctagtaccatagccttgagatgtcctctgttaagtgcaaggcaagggaaagagcattgttagattaccgacaacctgtcaccattcccaaagggatatacagacacaatagcaattgagaaaacaagagttctttcgttgcttggagtgctgaagatgtctgtctgtcctgataggtgttaagtagttctgaaaataaaagccagctgagatggtacattcccccaattcctgaactcagaattttaacgtgacagtctttttttttttttaatatagatttttttgtatagattttagcaatggtgatttaaatatatatcctggaatgatattttgaatatttcccagagtaaattaagagacacactttttctagggaggtaaaaaattcaatcagggcaaggtctgcccggagactaccatcaggtagcaggcttctgttttagttcagttacattacattctaacctcaaagacaaagttagatctaagttcccttttttcgggttgtagcttaggcctgtacatacacaacaaagcctatatccaaatcgacaaaggaacgtgacctagggtcactaagggtctgtaattgtgtacatctagtattctgaaggtggaagaaggactactccaagtttgaggccaggttggtctacagaaagttccacaccatctagggtgaccctgtctccaaccaaccaaccaaccaaccaaccaaccaacataacccctaaacaaaacaacaaaaaacaaacccaggcaggacaggagaaacattacctgcataagggagcaggaagaaggcgcaatccaacactgagaatccaacttgattcatctctaccttattttcgaggcagggtgtctttcaagctaaccaatttggataaacaggctggccaacagaactaaagataaagagcttctgtctttgtatccccagagttgccattataggcttgtgttactgcttcttgcattttttttttttttaaaatatggctgtaggtgcccgttgtggttgcacttggaggctagaggaagtctacccgttgggattctatatggctatatgcccatctctcactgaatctaagctcactgcacgcaggatctgcctgtctcagtccctgccccaggaaccccagctcaaagttacagataacttttagatgggttcaagggatctgaactcagggccccatgtttgcatagaaatcacatgactgactgagtcatggccacagctcagggataggaggaaagttgacaggagttcagtgtaacaaagatgtcactcggatgccacagacggacgtctcttaccttcccatccctgactcgtcatctccactggtgggaccctccagatgttgtagttggaatttgtcatcacaagcgctcttcaaattttggcttacaggattctcattaatgttctttgaagttaaaattgctttaaatggaatgagaaaaatctattttactcatttgttctgatggtcttaattcaggtgaggatattgattttttttaaaagcagcaatctatgacaatcaaactcatcttctctttttctgtgtaacaggactgtcatcttctcagagttttaccagcctgtgccagcacggatggcagtggtagaacgcacagccaaggatgatactgaactcctgatctccggccgccactgctgcaggatcccagctgtgtgtgatcacatctgattctaggtaccagataccaactccttcacttcactgttagccaggcaccctaccaactgaagtacgccccaagtcccaaagctggtatttaaacaaagatattagacagaattttactgatatgactagttcagcagacaaaggatagcaccagctagtactaaataatgataagaaaacaaaaatatataatgtattcttatcttggaagcaaactgacctatgccaaaatctctgccaccaggaaagcaaaagtactggaagcaccaagctcatcaggatggcaccaggtctgctggagctttagtggaaggagaaggtgggggcggaggtggtgggtgggtggcgcagggaagagtcagatgagatgacatttgcctcatactttcaattactgggaacacgcacacaggcatgcacctacctcatggtactggataagaaatctaggacaataggaaataataatgaaaggcacaggaaagggaaaatcatatcagactcaaggttaaggctctagcaggtgctattccctttgagaaatggcttaaaaaggaacacatgaactcactctgtagaccaggctggcatggacctcacagagatccacttgcctatgcctcccaagggctgggaactaaagaggcaaatgctactatgcacagcagaagaaatagttaaacatcaaaaacaattaattgaaaagtaagtatcttctattcattaaatagtcattgaaatctaggtatgacagtgtatacctttaatcttagtatttggtaggcacagaaagagaaatctctgtgagttccaggacagaaaaggctatactgtgagaccctatctcaaaaacaaactagcaggctggagagatcgctcagaggttataagagtactgtctgctcctccaggggtccagagttcaattcccagcaaccacatggtagcttacaactatctgtaatgggatctggtgccctcttctggcctgcaggcatatatgctgtatacataataaataaatctcttaaaacaaacaaacaaacaaacaaacaaacaaacaaacaaacaagggtgtgtgagtgtggagttggaggtcagcctggtctccagagggagtcttagcacagtctagagagaatttgtccaaataaacacgtaaataaaagaaggcattgcaattcaaagtgtggagcaatcatgtatagtagaatatttaagcatcaaaaacagtccaaaaaagaagactcagaggttaagaggacttgttgctcttacagaggacttgcacttggttcctagaaccgtatgatgttcatgtagtgtcttacagccttgtaactttcgttccagggagcgccaatgccctcttctggcctctgtggacaccaggtgctcacaagtacacatgcagacaacaaaactatttaaaaatttaaatatgtatatttaaattaaatatcttttatccattaaagagacatgaagttccaggtcagttaggatcacacagcagaatcctgctattatgagaaaacaaggggctggagaaatggctcagcggttaagagcactgactgctcttccagaggtcctgagttcaattccaagcaaccacatggtggctcacaaccatctgtaatgggatcttctggtgtctgaagacagtgacaaaatgtcactgaaataaataaatgaaatattttttttcatttgaaataaataaatcttaaaaaagagaaaacaaatctctctcaatctctttctcttacacacacacacacagacacagacactcacacacacacacacacacacacacacacacacacacacagagagacacaggttacataagatgtttattccaactattcccaactcattcagaattcaaaggggaggatcctagaaaaattgaacaagtattcctaggaataaatatgctaccagctagaaaagctcagatgtatctgaaaattacttttaccacaatgagccatgatctcataagtgttaatatttgctcactgaatgacagggaatatgacacgatagaagaaaatccttagaggtataatgtgtgtgtacaaatttctgcccaaatatttctgaaggttgtgggataaaccttagacaaacaggaaaacctatgcagaagagctgggcattgatgttaagaccccagggaagggcatttcatcatctttaagaccatgggctggggagacggctcagtgattaaagtacctgctcagatgtgcacagcatattgtatgtgacatgtgtgaacacacatgtaaattagtgtttggaggccagatattgatataaaaaaatgattctctatggctctttttaatttatttttatttcatgtgcattggtgttttgcctgcatgtatatctgtgtgagagtgtcagatcttctggaataggagttacagtcagttgtgagctgccatgtgagtgttgggaattgaatctcggtcctctggaagaacagcaaatgctcttaactgctgagccatctctctggccctctccatggctattttactttactcattgaggttgggtctctcactcaaccccagtttgctgtttggcaagtctcccgagccagcttgatctgggggtccctgtctctgccttcttaggctggggttgcaggtaactgtcaggcccacacagcagttgtacctttctgtaatccttattaaccctagtgcttaagtctatatatattaaaaaaatctttttgtttatggagatagggtatctctatatagtcctgtcctagagcttgctatgtagaccagggtggccttaactcatagagatcctcttgcacctgcctctctgagtgccgtgattaaaggtgtgtgctgtcagacctttcttttaaaagggaaaagaaattgagtttctcttaatacatcagcctaaggtaagaaaggctcaactctggagttgctcatgacagtcaagtattttagaaatgagccacaaaggaacactttatcgggagacattcagtgggagctaaaaacaaaacaacacaaaccttcaaccaaccctctattgtgtatgccaaatatgaggtagtaggtttaggcagatattcaaagccagacactaacaagtcttatcttgtgtaagagcactgaaagtcctgtctattttcacagtaatgacagtgacagtacccagagattactgtataggggatgggactctgggcttcattatctggtgatgaactaaatgaagatgcgcttacaaagaaagtattcaaggagagagctttacaagcagcttcccttgcatgagctactgtttctttctgagcatggaaatatgacaaggcacgtgtggagaccaaggtcacttgactgaatgatgaacagacttgagtccctaatagtcaaaggagggcctcagggtccagaggactgtacaggaagggttgcaggaggaacttgagcagcaagtcatgtaggacttcagtgaagaaactccgagaaggctcactgccctcatctgttcctaagcaccaactcctcctgtgggtggcctgccgcacaccaggattctctaaatgaaaacttcccttactcctgatccctctgcctccacaccccaactgctgggattaccaacatgaccaccaaagcccactttctacttgaaaacataaggtgaagctcctgaaaccaaagatctcgtcttataaatcagaaaacccaggaagcagatcttcactttgtgatctatcactgtaaggatttcatctgaatgggtcttattttcacatggctttctgaaatgatggggctacctataactactctctaacaacgaagtgcaagaactatttctatttcctatggggtccatagcatctccttctaaacacccagagaagaacatgaattaagattcccttgggtccctctcagtggcacagctctcgtgagcagggactaggtctaaggttcccaagttactcgtggagcaactcagtaaacctgcactgagcaaagatcacacaatgttggaactcagtcctcactcttcgaaggaaacagagggtcgagggagggaagaagtttgcttgtaacactggcatttgttcagcactacacacctgctcctgacatgtttggttccagatctggcaggtcttccagggcacaagggtccgctaggagggaaggggagtggccagaaggctggttcccacgctgctccagcacagcttccaggtgagccatttcctgctgcagctttatcaggttatacttcatggtcgcccgctgctgcaaaaccaaacaagaacaccaagaaagttatatactctgagagatgtgccacgaagtaagaatatgtcacagcaattaattttagcatgggagctgagatcacctaatatggaattatgagttctggctgaataccctttaatccaaccatactcatgtggttaatgaccttgcaattgtttgaaaatgatgttggaggagagtgcaccctcgagctcttccagatagatctgcttcactgtagctcctcattttcttttaaagatgggggacagactggggtaattacagtactttaagcttaaattcacaagaatctgttcacaaactatataaactgtgttctaaagactcgctactgtgagataagacatttaattagtctacaaaatgcctagttaaaaaattttttttaagttcaggtttatgaatgatttatctccatgtgcgtgcccgatgctctcagaggtcacggaagggcattgaagccatcagctggagctgaatccaggtcctctgaactgagtggtctgttaaccactgagccccttctccagccccatttatttatttcttattatttttaaaatttaaaaatgtatttgtagctgagtgaaaagatacatcgctgtgcttagatccaagtaaatttagtttttacatggattcagtgttgaataatttcctacgatgttctagaaagcctataacaagttgctgttttctttttcttttcttttttataaaagatttatttatttatttatttatttatttaacgtgtgtgagtgcactgtaactgactttcagacacaccagaaaagggcatcagatgccattacagatggctgtgagccaccatgtggttgcagggatttgaactcagggcttttggaagagcagtcagttatcttaaccgctgagccacctctccagcccaaattactgttttcaattcaagaaaatgaactcttctttcccataggttcatactgtttactgatccaccttaagacgtaatctagctacctttaatcccagtacttgggaggtagaggcaggtagatctttgtgagttcaaggccagattgcagagtggtctacaaagtgagttccagaatagccagagttgttacacagagaaaccttgtcttgaaagcagaaaacaaaacaaacaaacaacaacaacaacaacaaaacaaacaaaaaaaaagagtaatttcagctaagcataatagctttaatagcagtagttgagttgagttgaggccatcctggtctatatagtgagttccaggatagccaagactacacagtgagatcctgtcacagacaatctagcaagtctaaggtatttgacaagcaaaggatgtggacaaataaagaatttcccaatatgtatgtctcttcatcacttttagaagaaatgccgatgctaggttttcagctgctggaggggaacaaaatctgtttcaccttctctgtcttttgaccttgaaagtgactttgctttccactaaaatcaagccatattcttcctacagctatgataaattcatagttcccaggagaactttatgatgaaaaaaccaaataaacaaaacgtaatttcgagctttacaaaggttcccactgctactgagactgtaatgctgccaacatctgcagtgccaccaatgccaccacgtggtacccgtgagtactgacatcactgatcaaatcctagccaaggccccacacagatatcagaccaattctttaaaagctgaattaataacactcacagctatgccatctaacttccacatggccagtaaacataccagaaaatcagaaagaaaagtaatcggaccactactgcagtggcttttcctacaggaaggaatgtaaaacttaagacaattctactataggtataggtgctcaaatgcaccagggaggacaaagccagacaggttaccacgtttatctctttacatcaagaatcctttttccaaaagggcctcaaatggcgtaacacagctcagttaataagctagtatttttcagcgctaaagaacttcgtcattactgccctcaagtcaaagttcagattcctagataaaccattccaaagtctgaggacagcttgatcctatctgttattgacgcccagcatttcccatcagcccagctttctagagacactagactgctcagtggcggtccctatgcattcaggccatctgtatctttgcctcagttcccacatcccctcttttcccatttggtaatcttttctaatctttcaaagcccagcaatacctgtctatcaggacagcagtgtgcctcattacgtggctcaggctgccaaagcatcactacattcaggggaacacacaacttccctgatgggaggaggaatccttgttgattttgtgttctttttgttttgaagagcggtctatgtatcctcggctagcttcaaagttgagattcccctgtctaagcttccctcacactgggaatgccaaggtcatgggcgtacaaggtatgcaaccctaagtcccgtaccactgcccatcacagaggaacttcacagccagtgtttaatatgaaaatggacaaatgaattaaatctttgagttacaaaatgggggggggggaggtaggagggttggcaagatggttcagtgtgaaaaggtacttgccaccaagcctaatgacatgaggttaatccttaggtcctacatagtgggtgggaggagacaatcttgcaccttcactgcacacacacccacactacacatatactatacacacaccatgagcatcacaaagtatatcagtgattccacatgaggcactctgtatcatctcttacccttcagttctatatgaacatagggaaagtccattgcaatcattttgcttgtccgtgcaactcaacatcaaagctacctgtcttgaatagatacttgatataaaaacacttaaaacaatgaatcctgatcaaataatgagcatctttctgggaataggatcagagacccaagaaacaacacagtagtgtattgaatgtcagatttaatacagtatggctaagacagatggaataaaaagctgaaacttaaaaaacaagcagctaagggacagaattaggtgacagacatattgacagagccccaaataaatccagaaaggaccatgagaagatttaagtcttttaatcaatttttgtcttattttgttaagacaaggtgtcactttgtaggcctggctggcctggcattcaccatgtaaaccagcctggcccggaactcagagatccacctgcctctgccactggggtgctggaaccaacaggggatgctgtctttggtgacaacaaagtgaccttagtaatactaagaattcccagtttcatttagttttgtactttttaagaagagaagacggggggactggtgagatggctcagtgggtaagagcacccgactgctcttccgaaggtcaggagttcaaatcccagcaaccacatggtggctcacaaccatccgtaacgagatctgactccctcttctggagtgtctgaagacagctacagtgtacttacatataatcaataaataaatcttaaaaaaaaaaaaaaaaaaaaaaaaaagaagacagctggagagatggcttagcagttaagagcactgactgttcctccagaggtcctgagttcaaatcccagcaaccacatggtggctcacaaccatctgattatcttctggagcgtctgaagacagctatagtgtacttacatataataaaataaaatctttaaaaaaaaaaaagaaggggaagaaaagtcactcgtatgctgcagctaaaagcacatttatgctttaagagaaacagaagctatagcaagatgattcaaaccacaccacgggaccagtgagtcagctcacttgccaccacaggaggacctgatttgatcctcagcactgccgcacagactgtgtcacctgacctccacacatttaccctggtggcatatccacatacatacatacaaatatgtatgttaaaaaaaagaagccgggcgtggcagcgcatgcctttaatcccagtgctcgggaggcagaggcaggctgattcggatttctgagttcgaggccagcctggtctacaaagtgagttccaggacagccagggctacacagagaaaccctgtctcaaaaaacaaaaccaaaaaaaaaaaaaaaaaaaaaaaaaaaaaacaaaaccaaaaaaaagtatcgctattttaattcagagaaaataagccaattaactgagatcacatggtcaggcacagagagtctgaccaatacttgctccagacttgctgtacactctgcctaggactctgtagaggaatacaggatggggaaccctcagaagttgcccagctagtgaaagataaacacaggaaagaaatacctagacaaatctaaggtttgaaatgcaagtttaggaattttttttctttttaatcaaaaagaaagttaggcgataaacctaggatctggctgtgagaatgatgtttttcccaagagcctgtcctgcctcgagtgcaggagcactcacgtcatctgtgggagttaccaggtgcaggaatgaataccctggccattcgtttccaagtagaaagatactaacaagcaactagataataaaagacaaaaattaaaagaaataatacagtgaaaggtaagatggcctctagtggaaagaatcctgtaggcttcagtttggttcagagaataaacatatccctttgatacaatagtgctttcatataattttgctataaggcaagtaggatttttagatctggctggggttctacagttaaaaggtagtgagttccacccagatgctttagaagtgtcccttaaggaaacaaaggaccatgtatgagcacgtaggtttacactatccagaggacatcacaaacgcgtgcctgcttcttacctgagtggttaaaatatcactctgcgagcagtcttcagaaaggtttgtttcactctcgtatccggatgcctcttcacataaaatgacaacacaatcagagactcagatgtaaaactggaccgcgaaccctgcagcctcagtgcctgttcctccccttgtatagcttctacttctccctcatgtcacataattggctacatttgggacactggatttcctttcagaactcccacaataggctgggtgaggtaatgaatgtatttaatcccagattttgggaggcagaggctggcagatctctgttccaggctagtcagagctacatagacaaactgtctaaaaccaaaaccaaaaccaaagcccaaacaaatcagaaaaattctgcaataaaaagtagaatcaagtctactgaaaattaggttactcaagctcatgcccccaggcattctggctgcatgacagcattaaaatattttatttttaatcatgtgtatgtctgtgtgggctacttatacactaatgcaggagacaccggggggagccacctgaaatgggtgctgggaattcaacttggtcttagatagagcaccactttatttttttaatgtgcatttgtgttttacctgcatgtataagtgtgagggtaatgggttcccctggaattgaagtgaccaaaaaaatgtgagctgccacatggatgctaggatttgaacctacatcctctggaagagcagccagtgctcttaacagctgagccatctctccagcctttccccaacccccaaagtacctactcttaaccacccgaaatctctctagccccaagaaggagatttgactgtgtatgttcagcccacttctgtagactggggcaaataaaccaacaaaactacctgaatctgggattatactatcctcttcttggtcattatcctcttctaggcaagttgccatttcctcgttatctgaaatcaattccttgtcacttaggaaagcttcctcattcccacactggtgactcctctgtttggaaggtggaataaaattggaatcctgggagtttgcatttgcagttgacccttgggcagcactgtgctgtgaagagaacatgctgccagagcatcttggatcctcactaaactgatgctcctgagatgcctctatcatgatcacctcattattgcagtcactgctgctacccttccatggtgcttgggtcccctccgctttctctggcatacgctgtgtcacagcactgctgcatctggtaagctcaggtgtgttgcttattctgctcagtaagtgttggaagcagggaagatcttcatcctcagtggagtcgctctcttctgacgattctaatttcctagacgctctgtggagactctgagacttcgatgcatgggttacaggactagggctcctactggactcccttctcaggatgcttccgttaaagacagcagatctctccattatgtcaccttcaccaaagctagtatgtccctgtatttcaacatcatccagcaggtcatcaggtgtctcagagcaaacctgaaaaaccttaccactcatagattgctcaagatggtctgagaatagacatggagagaagtctgcacagacagcctcaccctcctgcttttttatttcaagatacttatcacttacaggaacactttgctgacagacaccaggctgcatactatctaatggaggcacagtgttcaccttaggccctctgtttctacctagttgtcctgggaaggagtcaccagtggaacatacttcatgaatactgcccgagccggcttcttgacaagcatttcctctgttattcaggctaactgtgtgcactgtactctgaagaatgttctcatttcccaccgccatctcagttgatgatgtatgtctctcaaatcgtccctctgtcagaggtttcctattgtcagtttttatagatgacctgatgggagaaactgattgtttaaaatgtgagttttgtgaaattcctgatttacctgtggcgctgagtccattctccccgcttctgtaatgagatgatggacaaagcctacaacctctatcacacattgtatcagcagctagcttaccttcttgacagggcacaggtaagcccactgtggccgcaactgcttgtacgtgactgatttcaaattcttcctgtccctgacgttctttttgtttacctttagctgtcacctttggactcagttcctttgagggcacagagtgagcacagtccttttggggacttctaggttttgaaaataaagcaaatgactgacgctttgaaacttgaaatgtattctgcaaatactgagtatcaagttcactgtcttccatttctactttctcctgactgaggttaagcgcgtgtctcaaggggggcttgagaccctctgtgccactcccagcattgttagagccatggacgagttccttggggttttcgcttgctacaaactgagtcatacactgagcggatcctgttcttgcatatctgacagtgtgagcgtccaggactgagacactgttctgagtgtcgtagtcagtgtcagataccaaggatacgctggtgctctcctcagatcggtcagtggttttgccactgggctctcctcctaggacccgatccccgagttctttggcactgtcagacatttggcgtgtttcaagttgctctgttcctgttctctgagggctgggattgacaggcccttgagattttctaggacttgaacagctagttaataaaccagctttgttcattaatttctcttctgggaaagcatcgctggcacgtctcttccttatgtgttcatttggctcgttcttcttggcatccgctgcaggttcagtgtcttcgatgagttgaggctctctaaggtgcccggctggctgttggttggaatggtttttctttgtttcttcactgctaccacaactatcgatttgaagctcagcacaagtaggtgggcttggatttctactgattggttcaagtggaagagcacacctgatagaagacttcctcctcagcctatttttcttaggtgcttttgaactgtggacgtttaattctacctccaaatcacttacactgttgcttatagatttggctcctgctgtggaagcaggttcctttctcaatgattcagttggatgagcgcttttctctttctggagattactacctgctattttgttctcctgacagttactggtagtactcactgcttgctcatttggctccattaggtcagttccctgatttatgttgtcaggagtcctttgaacacctgctgaatctgctttcttgatgaagtcctcaggttgaagggatgtacttctcttacgttttaatttatttgtgaagggctgctcttgtgttatctgtggttctgtaataaatgtgcctataatttcagtcacatggttcaggtgagggcggcttccctttctctgataggatttcccaaatattttatcactgatattatcctctactggtttggagaagtctcttccacttttacacattaaagtatgatgggggtcgggggttactaagtctgttttccttgaagaactaaaacccccatccacttcgtttgaaacttccaacacaacagctgcttcagcatttgactcgtgcctcctggcagatgcgctgtcagaagttaacatttcaccagttctggaaaaccactcattaactttctgaacgctgctatttagtgttatccaaggaacatcggtggtagctccagaattctcagggcacagactttgcgggtgagtccacttctctctatcactaagggagtcagcgtttggacctaccttttccccagtgctgggaacctgcctgtcgttacatgttcctttacttgcagcccatctgctctgctggctcactgctatgccaggctgtttgcttttattacagaattcagccttttctgcattcattctgtcttcaatgagcaataaactgctggtctcaggctgtaatgagctggcatgagcatctgtgccacatggctccacacacacatttgaaatagaaatactctgacatttttctggatgcctttcagttgcatgattctcagtagggtttaaatcatcactgcattgatgatgttcaatgtttcttatgccctcagaaaactcacaagcagctgaaatacacaaaataagaaggttctttaaaatggaattatcacgagaaactacataccagatacaactggggagtaaaaaccaatccactaaccttatttatttaccttttaaattttagatgttcttaaaaaaaaaaataagggtctatgtgttttggcttacatccaagtatgtgcaccacaggcacgcctggtgcgcaaagaagagaaaagagggctgcagatctcctggaactcgagttttggatgcttacaaactacccagtgtgggtcctgggaatcaaacccaggtcttctgcaagaggaacaagttctcttcactgctttgccagttctccagccccagtccactggcgttttttatttctttgtttgttggaggtagggtttctctgtgtagccctgtctgtctgagaaatctatgagcccaggctagctttgaactcacagagattcacctgcctatgcctccaaagtgctgggattaaaggcttccatcaccactaactggtttccagtggcttctttagaggagctaaaatcataaactaccaaatatactgaagatctagctcatacaatcctattgtgcagattaagatattttctcaaacacaggaattagagcacatatcttatttccctagtctctttctttctttctttaagatttatttattaattatatgtgagtacactgtaactgtcttcagtcactccagaagaggatgtcagatttcattatggatggttgtgagccaccatgtggttgtgggatttgaacttaggaccttcggaagagcagtcggtgctcttaacctctgagccatctcaccagcccccatagtctcttaagattgaaataaaagcagattagttccagcttggaaggcttaaacaaaagtatggttaaattgctctgggttacatagaactcttaaaaaaaaaatcattggcagctttagttacacaagatattactataaccaccccagtctagtactactcactatctcacaatggcagctgaagaaaaaataatggcattataattccttaaaaaaatgatttatttattttatgtatgaaacactggaagagggcattgaaccccattacagacagtcatgaaccaccatgtggttgctgggaattgaactcaggatctctggaaatggagtcagtgctcttaaccactgagccatctctccagcccccgacattttaattctttaaaaagatgttgtgaatgataaatgataaataaatttggcaaatggccttcagatgatgggaataatggaacggcatcactccactgccccttagtgtcattatgtcaggaaggcctgacttaccctcttctgcagagtgcagcttgccttcatctccagcttcttgaggggcggtctgtaacaattcctggtctctcacactaaaggggaaaagacaacccctaataagaaattctatgctcagtcaaatgtgcaagatcaattatgttcgtgtctctaggtagggctggaacaactgagctgactgactcaccttctgacatctgttctccaaggacagtcactaaggtcagagtagtgtagaatgttgctttctagatatgcaaacacacacacagacactcacacacacagacacagacacacacacactcacatactcttgcaagcatgctcacagaccattgataaagaaggggttaaaagactcttaagagggctggagagatggctcagtggttaagagcaccgactgctcttctgaaggccctgagttcaaatcccagcaaccacatggtggctcacaatcatctgtaatgataactgaatctcttctggggtgtctgaagacagctacagtgtacttacatataataaataaataaaccttaaaaaaaagaggttcacaccacattaaaaaaaaaaaaaaaagattctaagaaccgtaagttggaaagaccagagcaaaacagtgtctattggacatgacagaggcactgtacatgagctcatagcaattttggtttacacaacatctgtacatgatcaagcctatcaacattctagcagagagaggggaggggctcatgagccacacccctaactaaggagctatggacaactgatagattctgagggagagacagtttccttcgaggttgtgggggcctttagagcaacaacctataagcacactcagtggatggtccaacaccttggagtaatgaagaaatggttcagggttaagaacatgggttaatttcccagaggacctgggtttgatcccagcaaacacatggtggctcacaaccacctctaatgagatcagacctccgcttcttgtgcatctgaagataactacagtgtaattatgtataataataaacaaattttgggctgaagtgtgcaaggactgagcaagcggggccgagcagagcgagcagaggtcctaaattcaatttccaacaaccacatgaaaggctcacaaccatttgaacagctacagtgtactcatatacataaactaaactaaataaaagatgtttgggtcaggcatagtggtggatgcctttggtgacttgaaaagcagcagacgatttctgagacttagaggtctacatagtgagttcctggacagccagggctctatagacagaccccaccccaaaataagtaattattaccatatatgagaaactcagagaacaacgatctggcagaaacaagtgcatgctgacttccactgttatctaaaactcgtttggcattaaaaaagtattcggggctggagagatggctcagtggttaagaagactgactgctcttccagaggtcctgagttcaattcccagcaaccacatggtggctcataaccatctgtaatgggatgtactggtgtgtctgaagacagagaagtgtactcatatacataaagtaaataaataataaaaaaacccaacaaacaaacaaaaaaagtatccaacaaacaaacaaaaaaagatttcccagaaaataaagtagataaaactaaatggtccttaaggttttttctaatactatgatctaaatctaggctcctcaatactaattagatatgacaatagcttcacagacaaaggctctctttgactcacctgcaatcacctggcttagttactgtctcttcagaagaatcagagtctagaaaaaaacaaagaaaataaaacccaaaaatcagtcaagattattaaggctcaaacaaaaccaaaacaaacaacccaaaacaaaccaaaaaaaccctgctttttgtaaaacatataatagttcatccagaaatatttattatatttataattaatacccactatgtagcaggtacagacacatgtggcaatacagagaagtggccgaaagcacaggccccaaagccagcttcctatgtccaaattcttaacttctttgtaagttaattttctcatcacctcaggactgacattttagataaggtataaaaaaactacaatagcacctatattctaatcaagtgctcctgaatattagccgataacgtttgcactactcctagtaatccataattacttgtatgtgcatgcatgtgcagtgtagatgtcagagaacagcttgttggagctgatttccctccttccaccctgtagattgtagggattgaatttaggtgacaagtacctcaccaactaagatatctccccagtctctgggatatttttatagatctgctgttgatggagacagatggtagtctggaactcaaaacaccaccattcttcccaatttgattatttactattatgatgatggtgatggtggtagtggtggtggcaatgatggtgatgacgatgattttgggctagggttctctgtgtatccctggttgacctcaaactcactgaggattctcctactttagcctcttagatgctgggatgacaaatgtgctaagatagagaagcctgtctgagctctcagtctttttggccagcttgagattgaacacagagcttgtagaatttatcccagatccttctaaattctatggcaaccaaacatttttttttctattatgactaagtttttcccaaaattcacttaaacccataaccagacatttttccttttgttccttttataaagtaagattcttcaagatgtaaagttttaacttttacaaaatctataattcatgatagaacccataaaattatttcatcttcacttaccaaaactccatgcaacacatacacatctatgagaaaactctaagccaaacaatctagcaagtatcatttccaacttaataaaacctgagccccttacctagttcaatgtagacagatttctttcgaggttgggtctgcctgtttttcttcactgatctcacgattccaaggttagacagctggacacctaggctgtccttctgtcaaacagtaaagaatgcctacggtttactttgtgaaatattttttcagatttatttttccaaaactaattataatcactagaaggccagcaacataaaatgtatttttgagaaggataaatgataagaggaggaatctgaaggggaggctacaaaggaggcacagaggtagcaagggcgggaacagagggaaagaactatgaacaatctcacttgaaaatgtcacagtgcattagtatatgtaagcacgtggactgcattacatgctgactgaaagccatgaaccgcgtcaagacagcttagaggctaagagcatgaattgttcctgcagaggtttctagtagcaacattgaacagctcatagctacatgtaactttaggtagaggggctctgatagcctcttctagactacaaagcatctatagtcacatgcacaacccccaccacatacataattaatgataaaaaaatctaaaatatttaaataaaagcatttttaaaaaggattgccagccataaaatcccagcattctaagaatacttagaaggtgtatttccatgatctccatcatccactggagcagagcaagtcattgtattttctttattcttacactggttaagttgaagcaatttgcaaacaatttgcttacaaaagatcagggacactgtgcccatttcggacctgcatcagagcagatggagttgtaaggcaggcaaagggcctgtaaagcgcctgttgatcacaccagatcccctgactttctgaatttaattcttacttattagaacacttgtccagccactaaatgtacaatcaccatcctctctctactaagttcttatatagatccacacactcactaactcactaagactcaataaagagacggcagaaaaaaacgtggaaagcagctttaccaaggtggcatttccaggttcgacctggggaagccttctgacacggttccggtagcccacgctctggatgatcgacgcctcctcattcaaacgctcacaagaattatttctcttttttgaaaaactaaaaccatttgtaactgtaaaacaaaaaggggcatgttttagttagaaaaagacattaatcttcactaaatatccaaaaagaatattgtgtttgctgtataagaataataggaaaaaaagcctagtggtggtggcgtcagcagaagaggcagaagcaggagggtctctgagttcgaggacagccagacctacacagagaaactctgtctcaaaaaacaagcaaacaaaaataatgcattatgggtatatttaatattcttgggcttttttttttttttaaaggtaggttctgtatagccttctttagtctggaatttgatagctttgaactccaagatccacctgtccttctgagtgctcgattcaaggtgtctgccatcatgcttgcctacgtttaaattttaactatgtgtatgtgagcatgagtttatgtggagtacatgtgtgcaggtgcctgcagaagtcagaaggcattgcagccctaaagttgtaagccacctgctctggctgatgagagatgaacctgggtcctctgttaagaagagtagttacacattctgaaatgttgagctgtctctccagctctgactacctataactgttttaaaagtcctgtttagaaattcaaagactcttaagttatttttattacctctgaaatacctaaaaactaataaacttgcttactaacaaatttaccacaattctctaaaatgctccctatttcagaaacattgagatatacatgctaggcaaggtggtagtggcacataccttttaatcctagcacttaggaagtagaggcaggcagacctctgagttcaaggccagtcttgtctacagagagttctaggatagccaggaactgtctcaaaaataaacaaacaaaaacaagcaagattgacatataaaatgcaagactaataggagtaatttaaaaccgcaggctgacaagctagcccagcaggtacaagtgcttgccctggcgtgaggacctgagcttgatcataaatgatgggtgagggctaaagttaacctgtaagccccacctgcccgaggacagagaacctcctggaatactgggagctgtaagattggctgtcccaactacacaggacaagcttgataggcaggcaggaagtacatcagaatgaatgcttgcccctccccctcccagattgggagaaggtgggaagtacatagcctgtgtgttctgtctgtatgagtacctgactaacagaattcaatgccatcctctgggaggcccaggtatgtacctggccagtgtccactgtcctatctagtattgggataaagctagctctaattagacaatcatggatttggtctttttcctcacaattttcaggtttaaaaccatgtaaaggtggaagaaaaaaaaaaatcaaccccaaaattgtccttttatacccaaatgtgtgccctagcgcatgcatgtgtgcactcacatctcatacacaaacacatacaattactagttataaaaatgtaaaaagtagggccagtgagtaaaggccgctagcaccaacactaactctatcagctcaatccctgagaaaccttgtctcaaaaactgaggaacaatccctggagatgacctctgggttccatacaaatagacacatctgtcccagcctgtgctccgggcctcccaataaataagtgcaataagtaaagcataatttaaccagaccagtctcatacaatagctccaaatgcgctcaggtttccaccagcccctggagcactgcctcaggctgcacgacacttacgctgcattcccgtgtcaagctcaaaagcagccattattctcagcagctcttcagcaagctgactaaaccttgtgcttccctgtaggctcctgaaatcagatttttttttttgagaagcatatataagtgattattaattttaagcacactaaaacaaagacacataaacacatggattgtagctttccgactgtagatgcagcagaaagcacaaccccagagaactagtcatttgatccccagcacagtacaaacccagtcctaccagagacgtcacattataatcactgaatcagtgacatgagaataaacttcatgagtatatttacttggctttgattttgggtgtctgtatgttttcattctctttttgactatacagatttttaaaatactttggtaaaagcccctaacagaatagtcccgagcgtagcatggctgtgtctgcctgtgaccccagtatgtaggaaggagacagagatagaagaatagacaagaccaatctggactacatgacactgttccaaacaaaccaaaaaacccagcagagtagcacactcctgcgatctcagcagaagcaggaggatctctagtttgaggttagtcatggtaatttccaatccaaagagagaccttgtcttaacccgtccctgccacaaaattctaccctgaattcagagtagatataaatcaacagcagaaagaacttacgattgatacttaacatcccaactcaacccttactgccagcacttcttctcagacttccatcaaatagtaaatttgtcattttgaaaacagacaccaaaatctgaagagagacttaggcttaggtagaatataattaatttttcttttaaaaatatctgacagcctactatgatctaaacactggcaaaacaggactgactgaaagataacagaactaaccgtgccctaacagaactaaccgtggtaggcgatgtgcggctgacctaagtgcagctccatctgaaagactgagtgtgttatctatggccatcgcacctgagcgcactggagttgagagctaagtaggatgggggctgactagcatgtgggtgggagaacaaggcaccaaggtggtaagacttgctgacagcagatgtctcataaaaacttccaaggaaataacttcatagacagtcataaactacaaacacccttaacctctgagtcaactctccagctcttattcttaaataataataaaaaaaaaacaattaattgattgattagagaaagagtgcgtgtatgccacagttcatgcttggaggctagaggacaggcagttctcaccttccatcatgggtcttgggaaccaaactcaggtcttcagcttgacagcaaccttacctgctcaggcacgtcaggcaagatgcctgatttatgaggtactgtcaagtgaagtcagaggccttgtgcctacttagtaagcacccctagtccccaaacacattagtatatttttctattggtgaatggttttatagaaatattatttacatattaatttctaccttttcctgccatgttgcttccaacctcccatgattatacaaattatgtaccttttggttatctcattcttacacaaaggacattgtgaaggccctttcttctggttaagaagtttcagcatacaaaatctataaattagaaagagagaaagaaagaaaaccaatttaagttactttttttttcttttgtagaaagaacactcaaaaggcaacagccacgaatgcctttaagagtcatttaaagagtaatggcaggtaaattacaaccaatgatttttcagtaattatttttagatgctgcataagcagaaaaatcaaatgatataagaaatgacctatgaaaattgcacttacctgcatatgacttactgctatgatcaagtaaaacactaaaaaaattaatgcagcatatttaatgatatattcataattatttcatgctgtataatcagatataaatgcttaagtagttaatataaaatggttgtattagtttaaaggctcagcaccaagtgccagatacatacatacatacatacatatatatatatatatatacacacacatacatatacaaacatgcgtgtgtgtgtgtgtgtgtgtgtgtgtgtgtgagtgtgtgtgtgttgtgtatgtgtgtatgtatgtaaagtgcttgcctagtatacataaaccccaggtttgtttttttggaccaagtaaacaaaaactctgtatctcactacaaatctacagtaattaaaataatataattctactctggcatagtgcacaagcctttaatcccagcatttgggaggcaggggcaggtggatttctctgagttcaaggccagctcggtcgacaaagtaagttctaggacagccaaggctctacacaaagaaactctgttaagagagagagaagggggtgagggaaggaagggagggaggaaggaaggaagggagagagagacagacagacactgagataaaagaaaagataatgtggttagtacttgtaaaggttctttgaattcaaagccaggctgatctagagaatgagtcccaggatggctaggactctttttttgtttggttggttttttttctttgagacaaggtttttctgtgtagccctggctattccggactcacttagtagaccaggttgacctcaaactctgagatccacctgctttggcctcccaagtgctgagattaaagtgcaggccaccacactcagtgatagccagggctcttaatccaatcattctccaccttattttttgagacaggctctctgactgcacccggggcttgttgatttggctgtaataactagtcagcaagcccagggaccctcctatctctccttccccagccctgggattccaggcacacacagccacgcttagctttgggtcctgggcacataaagaccttagttttgtatggtgcatactttgccaactgggtcatttcctcaacccaaaagtcactccacacacaaaaaggaactcgaatggctcatggacaagcggtagagattcagtggtgataattaacgatgtgactcaggcacacgactaactcataactggtacctctccagatacagtaagtgctaaagcaaaggaaaatccttgctattttaatgcacatgacagggtagggaataaaaagcagataccaacattaatgacaaccaaggaagatgaaaggaattgaaaagttagtgttaatagtgaactaggagacaaatgtagtgtatggccaagtcttttaacatatatttccctctttttaaattccttatttttaaatgctttattcagtagtgtaggatagggctaagagaatagcaagctcttacaggatgctgttgctactgacccataaactccttgaggagtaagctttaagagttgcactatccagtaaaacagctacagccagatgtggtactgagcaatgtgtcagcctgaactaaggtaaggtaaatatggaacaacacaggcacgtggagactgtaactctcactctttggagtaaacgttttcgcttacaatttcagttcacagctggctggctccagtgctctgggccagagaggcaaggtagaaatatcaaggcaacagggacggtggaattgcagaggggacaacacagagagaggggaggggaagaaaacagcagagggggtaaagaaccacgaacaagacagaacccagtagactattacctcaaattagccctatcttagaatgttcccatcatgtcccaaaatgccattaagaggactagaaatatggctcagcagttaagggcttggattgctgttattgaggacccgagttcagttctcagcacccacagatagctcaaaaatgcttggaactcctactccagggaatccaacaccttcctctggcctccatgggcatctacactcatctacacatgctctgacacgacccacatgagtgcacatgatgaaaactaaaatagaaaaaagaaactgttcctacacaatatatagtttaacatgtagaagccagacggccagaaagttgttaaataacaataacaaaaattactatttccattattcttgcttcctgggtcaggatgtgagctctaacgttctagcaccatgccagtcacaccccctgccaggcccctgctgtgatcccggcctgactgagggatgaggtgatggactcatctggaactctaagccccagttaactgtttccttctgtaatctctcttggttacagtgctttatcacagcaacagtaactaagacaaggtgtatgctatcacgactgatttagataccttcattcaaaggctagatgctgtggctcacacctgtaccatcagtatttgggaagcagaagcaggaccacaggaagttcagagcccatctggtctacataccgagctcaaatctactcagggacacacagttgagatgcctcaaaaaaccaaaagaaaaaaaaaaaaaggaaagcataacaaagcacccctgtgaagcatctctgtcaacagttgcaggctagccctaagatgtcaacagttgcaggctagccctaagatgtcaacagttgcaggctagccctaagagtcatttagaacttcatagactgctagaactataacatcggaaactgtttgaacaacaaaaaaaagagcaagattcttaacagtcttccctcagaatgggcgagataggtctcatggataccaaaatctttggatactcaagttccttacataaaaagatacagtttgggctggtgagatggctcagtgggtaagagcacccgactgctcttccgaaggtccagagttcaaatcccagcaaccacatggtggctcacaaccatccgtaacaagatctgactccctcttctggtgtgtctgaagacagctacagtgtacttacataaaataataaataaatcttaaaaaaaaaaaaagatacagtttacttagaataggtaatgtaataaaatataaatgatccagggctggaaagatggctcagtggttacaaggacttgctgctctggcagaggacctgagcttgcttcccagcatccacactggacagcttacaactacctgtaacgccagctcctggagatccaacacatacatgcatacattcacataagcaaagatacacacgtaaatagaaatttatttgtaaattaaatgatacgtggctatgactttatatactttagggaacaatgaaaaggagaaaaggtttgtggatgttccatgtagatgcaatttgtttcctgatttccaggacattttcagcccatgggtgattcattcagccaacacataatctctagatacggagggctacgtgtgactggagtcattgatatgaatgaataaatatatattgttcagatatagaaataaaataaatatatatcgttcagatccctattttcatcagcaccacaaaactcacaaacactgcacctcctgctcaggaagagcggaaggtcacttaggagtgaacggagacaagaaggggtgatggctgaaacagagctgctcatttcacaactgctttcagcctacattcacccttggacaccaaaacccaacagaacctctgtacaacatggctatgtgatttttttttttttggtttttcgagacagggtttctctgtgtagctctggctgtcctggaactcactttgtagaccaggctggccttgaactcagaaatccgcctgcctctgcctcccgagtgctgggattaaaggcgtgcactaccacgcctggcggctatgtgacttcttatacacagataagctatgttacaactttaccaagaacgatggctacagccaatatacatgaggaattcctaggtgctccctgaggaaacaaggctagttttcttgtcatctaactgaagaaacaaatgctgtgcagtgaagaacacgtacaaaagctactaatggatctacaaaaccattcacttacttgcaaaatatgtggtcacactttgtggaaacaggttctttgatcagttccaaactagaaagaaagaataagtgtggcttagtagttgtttatacacaaacaaacacttggttttggctaaagaggttcagctttaagttgctatacctgagcctggatataggcttaagacagtggttcacaacctgtgggtcgtgaccccttaggggtttaataaaccttagaccgttggaaaacacagataacgcagatatttacaactcacaacagtagaaaaattgtaatcacaaggtagcaacaaaaataattttatggttgagggtcatccccaacattaggaattgtattaaaggccaaagcattaggaaggttgataactgtaatattcaaaatgaattcaagaccacccagtaccttccctcttcgaaaaggactttccaaactgtaccagcagaccaagtgcagagccagataaggaagctgcctgactaaacaaatgtaaaaacatagttttagcagtcaaaatgaattagcctacaagctgccaaaacaatattagctgtcctcagagaaataaccataataagattagcaattctcctgcccccctcccgccccatattgcattctgaaaaagaccacaaaccaccctgaccttgttgcgagaacattaacagctgtggcgttaatagctgatccataagttcagaatgtattactgctttgctgaccaaatcataataacccaccatggggcaagcaaagtgagtcactaggccaaagggttacttagtcactatacaaaccaaccaatgcctgaaagggttacttgctacaccaatgagaatcctgttgctcaaatctgctccttacaaaggtataaaaagtgtgttctttctttgttctgggtctctcctctggcctgcgtgctgggagggaagtccccaacatgtaggatcaataaaaatccttatgtgggttgcagcgatggtggcggtctttgtggtctttgtgagtaagggtcttttggcgaaccccaacagaaccactattttagaataattcatgccgggcagtggtggcgcacgcctttaatcctagtacttgggaggcagagacaggtggatttctgagttcgaggccagcctggtctacaaagtgagttccaggacagccaagactacagagaaaccctgtcttgaaaaaccaaaaaaaaaaaaaaaaaaaaaaaaagaaagttagaataattcagtatcaaaggtctgccttgctaggaacaaagatcagaggagaaaatttgatcctgtgggtgtgctggtgcctccacccctggagaggcagaaaggaagcagatagattctgagagttcaagacctgtcagggttccacaatgagaccccgtctcaaaggaaacaaaacaaaagatcctttcatcaagcattcagaaagcagacagaaataccggtctcctcactgctctggattactgccagcatctataagattagctctaggttgggaatgaggctcaacagcagagcacctcccaaccaagttcaaggccctggcttgacaactgatatttctctcacattggttattttcactgtcaggcatcatttccaacgcatatcctgaatcttaactaaactccacaaacacacacacacacacacacacacacacacacacacacacaaattgtccttagtgtggtagtgtagtcccacaattccagaacttgagaaatagaagaaggagaatgaatttgggtcatcctggacatactgaaagttcaaggccaccctccagaaccctccatccccagtcaaaccagtggctgaaaagatgggagatggctcagcagtcaagagcacttgctagtcctgcagaggacctgaccagtccccagcactcacatcatgtagctcacaactgtcaggagctatattctagaggacctgatacattttcctgggctatctaggaacctaaacacatgtgacataccttgatatggacagacacacacacacaaaacccataaaaaaaaaaagacagaaaggtttgcttttttaaagatgtatttattttatcgtatgtaagtacattgtagctgtcttcagacacaccagaagagggcatcagatcttgttacggatgcttgtgagctaccatgtagttgctgggatttgaactcaggaccttttggaagagcattcagtgctcttaactgttgagtcatcactccagtcccccgaaaggtttgctttatagcaagctttccctcagttataatttaaaaaagaaaagaaaagaaaaagactgacttttgtgaggacttgtgcctgtgggtatagtgggcaccacatttatgcaatgtccttgggagccagaagagggtgtcagattccctgaaactacaggctgttgtgagcaacctgatgaaggtgctagaaactgaacctgcgtcctctgaaagagcagcaagtgcttttaaccactaagttacctctccagcccattgtaagtttttacttgcttgccttttaattggctatgagtgttaccaactaaggtcaccaggcttgtgccttaggtgcattggccagtgagccatcccactggcacatccatgagtttttaaatgtagaagatttttagtcagtattactccatccccccagaatctgaatcatcatccctttgtgcagtgttaaacacctttatgtgttactgggtactaaacccagcctagctctgctttagtccagtgtatccaggctgtactcataactgctaacagatcagtagaagtttgccacgaaatcgggtgctaggctataaaagtgtctgtgttcgagtaacattaaattcgacttactatggccccagagctaacaagcaatgatgccagtcaccccactccaccccaccccacagattctgtgtcactatgtaactcaggctggctttgaactcacagaccctcatgactcagttctgaaatcctggtattctaggtatatgccaccatatcaagctggcaatttagacataccacagcaagggcataaaatgctcctttaaatgaaaaggtaaaagttcatcaaaggtatgtatgcattgagagagggggaggggaaaacaccatagtgtatgcagggttcagtattatctgaggttacaagacaccctttagagatcttggagtgtatgtaccctagccatggttatgtgaagcctagtgtatatatttttgattgcctcacagtacttaaaagaatgtacttttgtactgtgtatgtactgggcgatgtgtgagtgtgtgcacttgccacggtgcacatgtggaagccagagaacaatctgtgcgtcctaaggatcaaacgcaggctgtcaggtggtaagtgcctttacctgctgagccatcttgacagcccacctcacagcgctgtgttggcatggattgggattgacttgactttttaaaactgagtaggacaagttcaagcatttgcacaaataaaataggaaaatgagctgcacaaacttatcatctagaaggaagaaatgtgctagaaggaaaaactaaataggacaaaaggacacagcgcagtgcacatgagcaggtctatatagaacggcacaaaaaatacacaaacaaggaagtgacggcagaggacagctgagtcataagggacaaactgcaatcactggagacgagcagagacagcacagcggagaagtgaagctgagcaggactgtgcctggtggtagcgcatgccagccactctgagagggcatcatggaggcctgcagtagaggacagaggtagctgggagcccaggcaggcaggaaactcatctattgtctttactttattctgtgtgcgatacagacactgagttctagcggtaacggccatgtaagacactaaagagatgacttgctagtgtgagagaaacacagtccttttgttacatgtagaacaggatcacgggaaaggctgggagggaaaagcccgcccaaaggggcttagtaatgtaggacttgtggtcagaggggtcctgacggtgcagagggcaacgaccacacctgactaagcctgaaggctggctcctactaccagctctgtctacaggagcagaacaacctcgagccaagctgtctacctgaacttagtcccccttggcagtcttctggggtcactgtgagaatccaatgtccacagaggagactgctctgttactgcttctgagacaggctagacaccaaaggaagttcttagtaaaagagaaattggattgagtcatgataccagatggctttcattctcaccactgactcaattctgaaataattatatttcagtatggtaattatgatccaagctatataaacacactgtaaacaccaactctgaacagatgaaaactcccatatgtaaaaaggtagtgactgttgtaggaagagcttggagatgaataggaatgaaaatggaaaaaaaaattaaaatgtttctcttctagcttctgataagagtaaatgtttactacaaaattcaaatgttttaaacacttttcgtgccacacagtattttcagcctactgcgtatctgtacttttgagttttaacaggatgagtcactgggaacagcatttagatttggatttggggggaaaaaaaaaaccagaactactaggtacccatttcagcacttaaaaaatattacagtcacatttaatttttgtaaaaagagccggccagccagtcctgacctaggcttttaacaccaacaaacaaaacaggcagaagcaggtagatctgtgagttcaaggtcaatcatgtctacagggccagttccaagacagctagggctacacagagagaaagcctgtgtatgtgtggggagggggtgggggggacaaacaaacaagcaaaaagcaagacaaaacaaaacaacttcccccacatggatacacacacatcaaggactagcaaacaccacaagggcctgccacagagtcaggtatagtagtgcatattggcagttccagatacttgggaggccgagataggaagacgacatgaacatgggacttggagaccactctgaacatcacaagaccccaccttgagaataaaaacaaagctgccactcataattgagggacagaaggaatctcagtgcaggagatctgaggactgagcgccttatcctgcacccaccccaaggaataacttttgttttatttttttctaggtaggtaggtagatatgtatttatttttattttggttttagacaggatctttatgtagccctggctgtccagaaatttgctacataaaccaggctgacctccaattcagaaatctccttggatctgtctcccaatagcagcgataaaagctccaagtaacagtttttagttctaatcagttatcattaagaactaactgcatgggctgcacgtgtaactcagcagtagagtgtgcctataggattcgtttcctattaacatacagaggaagaagcttcacataactaaaattcacccaggtaggttgggactgtacgtgtaacgcagccgaccatgaagaggccctcagttcaatcccaggaactggaaaacaaaacaaatcaaacacacacacacacacacacacacacacacacacacagacacacagacacacacgtaggttgaacatcccactatagagcattctatataaatgaccttaagctttaaaaacaactattattaaattattaaaagcaaacctggtatggtggcatatacctttaatcccaacactgggaggcagaggagtgggcctctgagaagtagaggctagcctggtttacacagtgagaccccatctcaaaacaaaaagcaagcctaaagcttgcaaatgcacacccataattctagcatttcgaggctgagataggaggactgagacctttgagaccctgtctcaaggagaacaagaagtgcacgaagaagccagggacattgaacaactgaaaatttagcagtaactttctcccttgcatctttagtttgtatgtatctgaattttttttaaaatttatttatttattatatgtaagtacactgtagctgtcttcagatactccagaagagggcatcagatttcgttacagatggttgtgagccaccatgtggttgctgggatttgaacacgggaccttcggaagagcagtcggcacactgagccactcagaaatccaactgcctctgcctcccaagtgctgggattaaaggcgtgcgccaccaccacccagcctgaatttttaactgatggtttaatttgccagaatgagaaagtacattacacttttatgactgagtcccacgggaatgtagaataaatggacccaaatggcacgttactgaagactttttgatcactgtttataattatcctcagtaaacttaggcttctcacagcccatctttctctcgcagtgttatttctgcctctgtggctttgatatttcatagacttggttgtaaatctcattaggacttgtttttattcagctgcaatgctgtagagtggctagcacttttgaaatcttgtctctggaagcacacacatctacctaaaccttattaacttgactctgaacaaaataacaaccccgtgaagcacagaggcaaatttacttgcatttatccatcgaagctaaacaaaaacaaaagccacaaaacacaacccccttaaacaaacaagcacctaactgattaactaaaaagctatgttttgacatgtggtgtgtgtgcacacttgtggaggctccaggctgatgccctccttcctttccaccctaagcattgagacgggcctttcacttgaacctagagctgtcattgctagtctagcatttagggggtgctggggatccaaactttggtcctcatgctctcatggtaaaagttttcccaccaagacatctatctctccagccccctacttctaaatgctgtactctaataccatattactaaagaatatttaaaagctgggcacagtggcacatgcctttaatcccaggaaaaagcagacagatctcagtgagtttgaggtcagtctggtctacacagtgagtgccaggacagctagggttacatactgaaaccctgtacagaaaaaaacaaaaacaaaacaacacagcaacaacatagcaaccacgagtccccaagttaacccccagcactaaaataaagtattaagaactaatttcaggggctggagagatggctcagaggttaagagcactgactcttggttaagggtctgttcttctgaaggtcctgagttcaaatcccagcaaccacacagtggctcacacccatctgtaatgagatctgacgccctcttctggtgtgtctgaagacagttagtgtacttacatataataaataaataaatattttaaaaagtttttaagaactaatttcaaatttaagtaggatatgacagtacatgttattaattctagcactttggaggcagagacaggaggatatctgtgagttcaaggccagcttggtatacatggtgagttctaggtcagtcagaactacacaggaagactgtcttgaaaaaaatttaaaaggcggagggagtatgctcagagattaagagcactaactgctctcccagagatcctgagttcaattcccagcaaccacatggtggctcaccaccatctgtaatgggatctgatgcatgtatgtctgtgtgaggatgtcagatcttgaagttacagacagttgtaagctgccatgtgggtgctgggaattgaactcaaatcctctggaagagcattctccagcccttgcttaggatttttaacattccttatgccagaggattcattttccccgagtatccatttctttatcatctatctttggggctgaaaactgaacttggagcctaaagctattcaccaagtttctctacttccaagcaaaaagaatcagggtcatctgtactccaggctagtctcacagtcaaagatgacctgatatccactcctaagtctcactcttctgatgggattatagatgttggtcactaggcccaacttatacagtgatggaaactgaaccgagggctcccggtgtgctagctaagccattatactagctacattctgagccctagtgcacaaaattctaaaaatcacaaaatcacacactaaagcctcatttccaaaggtcctagtaggcctgaaaagtaagaactcactgagaacaccagagaattttctaaggtaatggaaacatttcctatcttggaggtaagagttatacttacacagataaacactggtcaaaactcactcttttagccaggtatggtagtgtatgcctagaatccttggcaggaggatctgagttcaaagccagcctgggcaagatggtgagtttgagattgagttggtctaaccaaatctagtataacccccaaccaaaaacaaaaacaaaaagcaggaaagtggaaaggcctgaatagaccaaaaggtcaggcctcaattaattttatagaaagagaaatttaaaacctcatcccacactggacttgctaaaagctgaggacaggggcactctcatgtaaatttacaggaccagtttccaccctagtgtcaaaggtagacagaggccctcacaaaccccaagcattccattgttattctgatgctatttatgagagtcattctaagagatcaggctgtcccacccctggagaaaaagccagaatcctgccatgaggaagaacacatcaagtcaggctttgcctggacagggaggagggatggcagagtgaagaccacctttctgtatttttaaaactcttcagggatgaaaaatacaaagtccttttaatacagagtgtttttctctactatcttaagcctctgctactcatttgcatgaacagtaaccacatgaagaattccagctgagtaaactcttctgttgacttaccagatcggacactctaagattttctgcatagcatgaaggacattttgtacttcttgaatttggacggcagataaatccatttcttccagttccagtgaacttttaacacaaatttaaaaacacatgcaattaaactacattaaagggcttttaaatacagtagcttaccttgccaactttctttccctttttgagacaagatgtcatgtaacccacactggctttgtaccttatgtactcaaggctagtcttaaacctctgatcctcctgcctccacccacttagtgctggaattactgaaggtaagtcacccccatccatgctttttggaggagttctcacgctgaagcccacacacatctggaaataattatgcagcccagattagcctccaacttgaagcaatcgccctgcctcagcctactgagtacaggtgtttaagctactgcaccaggcttgtcatttctaaataagaaaaatttaaatttggagtgctttagaattataccaacagttgatgaaaaaacttcactaaaaaacaaaaacaagggactaataagatggctcagcagttaagtaaactcactgctcttccaaaggttcaattcccagcatccacacggtggctcacaaccatctgtaatgggatccaatgcccttttctagcatgtctgaagacagtgataatgtactcacatatataaaatgaatggaactgtttaaaaaaaattcttttaaaaactccaaaaccggactggagagatggttcagcggttaagagcactgactactcttccacaggtcccgagttcaaatcccagcaaccacatgatggctcacaaccatccataatgagatctgatgccctcttctggggtgtctgaagacaactacagtgtacttacatatagtacattaaaaaaaacaaaaacaaaaacaaaaaacaaacccaacccgggggctggagagatgactcagcggttaagagcactgactgttcttcctgaggtcctgagttcaaatctcagcaaccaagatggtttacagccatctgtaatgagcttagatgccctcttctggtgtatctgaaggcagcaacaatgtactcacataaaataaataaataaatcttaagaaacaaaaaactcagggtctggagagatggttcagtggttaaaaatatgtgcctcttcccagcacccatgtcagatgtctggaacgctacatccaggtcagaacctctgcacacacatacacataattaaagataatgaaaaatgaatctttaaaaaataaaaatttctccaggcagtggtggcacatattcttgatcacagcactgagagtcaaaggcaggcagatctctgagttccaggacagcctggactacagagtgagttccagaacagccagggctatatagaaaaaccctgtctcaaaacaaaacaaacaaacaccaataaatcaacagataaataaaattcttagcagttgctctttgtagctagcaatctaaattctctactctttgatatgaaagccttccttgggtcacttcctttcttcaaggaaaaaaaaaaaagctaaaatggagtgactggacagaagtgatatatatatgaactttccccagagtctggtgttctttttcttgcttagaatcaaaaccagtggtgtcatacctatagtttcagggactggagaagttgaaggaggaggatggcttggactcagaagttcagcagtctttttgggctagtttggggaggccaaaagatcagatatggttgtttcaacctgtactttcagcattcaggaagtacaggcaggaggatagagttcaaggtcacctagagctacacaacccaattacagaaggccctgtctcacaaactctaaaactagctgagaatggtagtggatatctttgaccccctcctccccagagacaggggcaggtggaggagtgtttaagaccagcctgttctattatacacagctccaagccagccagagctaatataaatgagactagactctgtctcaaaactaatcaactacccagcattcaggaggcagaggcaggtggatctctgtgaattcgaggccagcctggtctatagagctagttccaggacagccaaggctacacaaaagccaaaaccaaaccaaaccaaaccaccaacataaacgctaaccaaccaaacaaaaaagaagcacacatattattttaaaagtcgccaaaaggaacacttaaaaactgctaaagcgtctccaccctacctcttctggatgtttccctgttaaggctctctttaaacacgtcttctctgccaacagcattcattactattgccattcccttatgtacttcccttctagaaccttctgtgaaatgtactcgggtctagttcttcaggagtttccctccacaaactccgtttttcccccctcttccctgccacacttctgcccgcctttcctctcatcctttagcccgcatccgtatacaaccttcaagatacgattacagccagaactccccctcgtagatcctttgccctcttcctcacagctgcccccgggaatgcacaaactgcacccttcccaagagtcctgtttgaaaacgtctgggaccctttggttccgccccaggtactttcctaatcagtaaacacccgtctccaccagcagcttcctgcctttcatatgagtattccggggtaccctttctgttcctcagggctgtctcaccttttctccgagaaaaaagatccgtacttccaagcgccgaggacggagaagccccaagagaggtgctggatcctctggctgcacgggcagcggccgcgcagccgcaattacaatctatctaaaattcccgcgctctccgtcgccaaggaaaccggccgcttggcgcctagcgctagcctttcggaacacaagatccagacacgtcagcggaagggaagggaggagcgagttggggggggggggtgctgaaactgtttctgggtttgcgattggctacctagtctttttttttcctgtatgtcgtcactagaaagagacggaagagaaagaatttcgaggtttctcttaggcagccccttcgcatctacgcctgcttattacgtcacagtagttctgtacaaagggtgggaatcgctccctgaggccggaatatgagcgcaaggtagtgcccaaagcagttgcaaaacgaggtctcatccctccctcagccttcctgccatggaagtctccagtttcggtaaataagagacttgtgtaagaagaactaccaattccagcatgcattgcggaacgaaaggccttctccacagcatctcttggaaagtgtagtcttacgggaaaagagcttctcacaccggaagcaggcacgagtaccacaggaacccagtcggtacagcggagacctcctcgcagttatgcgtcttagctgctatgaatcgcagcgttctgtgttcgtgttttgtgcacagaaaatagactaaaaggagctgtgggttccaggaagactacaattcccgtccagccccgcgattctcgggtaactagtccgccaatgtcagtgacctgggaaaagcagagggtggccaatcggcttgggaaagggaaatccaaccagctgacttctgcgcgctagttccgcccctcggcctgggtgtttgttattgttatgcggttcagagagcttctgtccctcccttgccaacgcagcactgaccaatcggtagagaggttattttgaggggcagatagaaagagccaatcatcttgtggaaaactccgggaaacatgggactaggcccggtctctgtccgccatgttagattcaccccgcagggatagcaggcgagctggccgcgaacggtccttgcactggccactggcaagcgccccccgtgggcggaaagctggtaaggaagctaccactgttacctagaagtaggggcacgccgttcttagagtgctcggggaagttcaaggggaaaatcttgcaaagaggagtgactttccgtgttcaggggcagccagtcttttcagtgaccagatgagggagtcgcttgggttgtcatcgatagtggggggtggatactgcctgagggagacagttcatggcttagaagggccagtttctgctaagaaaaggtctcgatcccccccagaacataaagagggcttcgatggtggtgacactcactgtcctggggacatggagttccgggaaaccattactggaagactgggattaagtctgcgacaagaaaggacatacatcttcctcattctgtccctttcctatttttaaggctctattgaaggaagatatcttgagctaggaccttccaaattagaaaggcatcgtttttcccgttatgtcaaacacccacctttcagatgacacattttaaaactcaggttgcttgtgccagcttctggtatagaaaatgaagttcagattcccaaattggctttattaaaattatttgtcggggttgaaaaataatcacgtgaggaaaagctgacttagccacatgaacgtgagtcaataggtatgagtttacagtgccatttaggaaagtgcaggcttaggcccagctacctgactgctggaggtaaaccttcaggtatagatgtggttaactgtacttttgatattttcacaagttcaagatgattgctctggctgaaagaattttcacacgtaagccctttatgaagacctgtatattggccagctaaactagaaccgcctacttcctgttttctcccatgggcagaacagctggttgctccaaagtatggaaactaattcccacttgtgtaatttcagaacggggaagaatagtttccttccagacagaaaagagtggaagagtatttcttgaagttggaaagtgtgtttcacaatttttacattttggtcactttgtttttctggtttaaagaaaaaacaaacaaaccaaccaacttgaacgtgctggggagttgctggggagttgatgagccagcgtctgcctaaattttacagctcctaagaaggaagaattgcatttcaggtaaatgcatgctggttgtcagcagggtgggtgctagagattagcattagcttggcatcgaagtcaattctagataaagacaagtgatgggaaaaaatgaataattgagtatataaaatagtcagaattaagaatacaaggttcttttgtttcaattatttattttgaaaccgttggtgtttttgtatgtctgtaggagggtgttagattcccctggaattggaattacagacagttggaagctgctgcacgggtgctgggaattgaactgggttctttgggggggtcggggggggggggaggctgagccatctctccagccctacaggctcttaaaatgacagttgtatccatagtacaacactctgaaggcagaagcaggcaaatctatagcaattgccaggccagcatgggctgcggagtgagagtatgtctccttcaaaaattagtaaataataaactagaagctatcttagtgaaataaagaattgtttctgttgataagaatttatacactttgtggtgctagaaatgaaccccacagctatgcacataattgactggttcggccttattcccaatctcctaggccataattttattaaattcctttggtaacactgttaaggtcatcaaaatagtattgtttttatagattaaacagttgaagctcagagatagtgtttctcacagctctatgactagtctgtggtggaactgtgtctggaaccctgagtcttcccgccccatggcctcccttcctgtgacattggaaaagtctaggacttaatcttgtttgcctcttgtgtgtggagcagaatctggccctttctagatgcagatttaaaaatgtgctgaatattttaagaggtgacctttttttttttaatgccagtgagtttacttgtagcgttaaacaacttaaactaccttttcccctaaagtcacagatcatcagtaagcaaagtccttcattaaagtcaaaccgactttaataatagataagtgattaaagaattaccagcttcttaggtgtgataatggtgggttttacattttttttctcataaatatttacgaatgaaaggatgaatattttgtcaagagagacattgtcatgagacaagggtgtagctcagtggtagagtgattccctatcgtctagacatctgtattccatttgcagccccccacacacaactgaaaggaaggaatactggataactaaattagctcccagttggatattgtggaagctagctgataggtccaaaaggactcagcaagttcctttctttacttttatatacctttaaaattccccataagtgattgtaagaggttctggtagattgttgttgttgttgctgctttgttttggtgttggtttgtttgcttgcttattttctggagacttagtgttcattctgtaacccaggctattcttgacctccttacctaaaattggaaattccgtctatttgtactccccaaggcagagcccttgtctgtgttaatccaccttgctggattacgctacagatgctcaactatccaagcactgaaataggcagtgaaaaatcttagagacctaaaacatgtgaagggggtttttgttgatgtggataaaatttaaactcgttcaacagccgtttaccctccccacagcccacctctttaatcctaaagataggatctcattgtttcctaggctgacctagaactcttggacttccattaccatcctgcatcaacttctgagtaactgggactacaggtgtgtgcccaacttggcttttctctctaacatagaagttctatataagtggtagctataacataagtgcagatctttatagcagtatcttgagcattagtgtctttatttttgagaaggaaaaatcctgtgtaacagtgagatttgtagaaaacacattactagatagtaatgtcatcatggggacattgtctgtcttattcactatgatcttccaagtctaacttatatatcagagctgaagcctccgggtgggtttttaatcccttcctcttcctttcatctacctgtcctctcagctccagccagacagcatggaaccacaggttactctaaatgtgacttttaaaaatgaaactcaaagctttctggtttcggatccagaaaatacaacctgggctgatgttgaagctatggtaagtaccgctttgttctgtttctcagtgggttatacacagatatttttcaaaatgtagctattttgagcagtttattttatccatttctggaccttttggaaaatcattttttacagggatttggtattagtagagaatatgtacaaggaaaaaggaagaaacaattatgttcctttaaacatctttaaaattacatatattaatttttttgagagagagcaaaaatctgggacaattttgggagttggttctctcttgtatgaggtaaaatgatattttcagtgaattagggtttagagacattctggggataagttaggctgtccttccctgcagccaggccgtagtgggtgttgtctgactggagagcaggcgcactgctgtgtttgttacctgacgaggatgggatttgtgttttgcaagaccggtcagttgctttatcgctgggtcaaaggttggatgtctcagagctggcagaaagcagcgcagctcccatgggtgcccatgcagcagctcctctgctccgtgctttggtttagtgtctttcatcttgctttgccctttgtactcttctggtttgtgggttgccatggtcaatgttttcctacttgggcatctgtgtttaatgtaaccatttttggttacaaatatttctttacctggtttatctatgtgggtaacttcagcaggaaggacattttagaaaggggccttccagtgtgttacagtcgttccctgtcttccagcagtttctctccatcctgccctaggcaggtggctattgaggaagcagtggggtcctgttaaatgatctgagcaccagatttctttctttctctagcagctgttgggtgagttggcagcttgcccttttttttttttttttattggaacttgttttgttttgttttgttttgtttcgcttgagtagccctggctgtcctggaactcactctgtagaccaggctggcctagaactcagaaatccacctgcctctgcctcccaagtgctgagattaaaggtgtgcatcaccttgcctggctggaattttttttttttctttttttaagatttattttatgtatgtgagtacactgtcgctgtcttcagacacaccagaagagggcatcagatttcattgaaaatgattgttagccaccatgtggttgctgggaattgaactcaggacctctggaagagcagtcagtgctcttaaccactgagccatctctccagcccggaaatttttaaattatatcctacatgtgcagttcacgtcttctttaaatagccagagaaaacagcccgaggaacttcccacatttccatgttcatgcggttatctggtagggtcatacagtcttctacatcttgcttttcttgcccaacagtatattgtagctgtggttcctcgtcagtagacacagcaatcttagtcttttacagctgagtccacggtgttcttagtattgctggacgatgtggataggaccattacttactgatttccccaccaaggttttctttcttttcccattataaaatagacaggacctacatctcagtatgagtaacttatgtgtggttctatagagtagagtctatccaaaggttgtgtgtgtgtgtgtgtgtgtgtgtgtgtgtgtgtgtgtgtgtgtgtgagagagagacagatagggactggagagatggcccagtgattaagaacactggcagctcttccagaggaccctgttggatttccagcacccaggtggcagctcaccgctcgctatctgtaactgcagtctcagaacgtcagccatcctcctctttcctttgcaggcagcgcactcatgtgatgcacaggcatatgtgaaggcaaacactcagatgcatcaaatgaaaagcattttcatagatagtgccaagtggtccacagaataattataacaatgcacagaaaaaatgactcaatgcctagaagggtgttctgttttttattttgtggggccggaggtcaaatgttggaccttctacatgctggacaaacattctgccactaagttttgttccttgccctgaacctttgacaacactgaatattacaacttcaaaaaatattcatgaccaggcgtggtgctgcacacctctagtcccagtatttaggagacagaggcaggctctgtcttagactctgtgagtctaaggccagcctgatctacaaagtgaattccaagtcagccagagctgttgaacagagaaacagccatgtctcaaaaaaaaaaaaaatgttcacatcttaataatgtgtcagatgtgtctctgtttacactgtttggctagaggtaaggttgaatatgtttatatatttattaggcattcctatttcctcttctgtatattttgtgcacatttttacttgtattactctgtaaggtttttgttcgtttttgtaagtctctctggctgttctgaaacttactctgtagtccaggctggcctcacacacacacacagacatccacctgcctcagcctgctgcatgctggggataaaagcttaaggatgtgcacagctgcactggacactggattattcctcctgctatcggttttcatgagtgtgtgtgtgtgtgtgtgtgtgtgtgtgtgtgtgtgtgtgttttacaagttttacccctttatctgttaactcttacagatgttttctcttagtctgttttaagttatttttaaaaactatattaaggtgttatgtacgttggtgaagggctcagttagcatttccaaagctctgcattgaatccccagcatcacagaaaaaaatgaacataaggggctagggagagggctccttgggttaagcccttgccacacaggtgtgagcaccagtgtttggattcccagcacccatacaaatgtaagtgtgtgttatggcctgtccatagagggcatcctgggagcaaattggctggctagccagattggggagctcttggttcaagaggttttgcctcaatatgtaagttggagattcatgggctgctatctgcaggctgcaagagtggtcttggaaaggcccacaagtttaccacactactggtggcttaggcagaatactctccggctccaccattactgctaatgcatgtaatgtttggaaagttcatattcaataaaagaaagtcaaaatgattcatcttatatagtgagatacactgagccaattgtttcatttgcaggtaaaagtttcatttgatctgaatactatccagataaaatacctggatgaggagaacgaggaggtaaagtgtctgaacgccattgttagagatttacaacaggggccttttctaaagtgctaaggagcttaaagttcagaataaagcccattttagtggcttacacctgtctttccagtacttgggaagtttaacccaacctggactttaaaacaaaagactgtctcagagacccatagggaggtggggggggggggacgaaagaaaaaagttcatagtagtttaatctcatttgcctagtagtttaaatgtatttgctagttgcatacttcatgaagactatgggcagggaggcaggggcagatggatctctgaggccagcctggtctacagaacaagttccaggacagccagggctacacagagaaaccctgtctcaaaacagcaacaataataactattggcatctgagctggagttgagaaatgggaaagcaacatgaagactatcagagaaagaacctacaattatagcaagacttgacatttagtttatgatgatggtggagctaaatgggaaccctttatgaagtggttaaagtgcgctagactagcagtactgtatatctggtatgtcgtcatctttattttcccttaaggaagcagaagttctgagaggttagaaagcttgcccaaaggcacaaaagtactgaagtagggggcccagatcctgggctcctagccctacactatgctacgtgttaataccactaagataaaacagagcacattatttaagcagtagtaggaatactgaccacctgacctgggaatttgctaagagaccgatcctagtcaacaaaatgctcaggtgatgagacttagaattcactgttgctttttttctcttcatagatatccatcaatagtcaaggtaagttcctgagaaaaaccttgttagctttacttaatatttgcctgacatgacatctttaaagtccagtactgaggaggctgaggcaaggaggatccttggtttaaaggcactctggacttcatagtgaaaccctgtttcaaaacaaattaatctgtccgatgagatgtttccgtttaaaccatgctttgctctaacatacgttttagaatagaatttggtatactgtaaactgaagttgtacccagtcatcatctgtagcattagttttgtaggagagtctttttttcttattgaggcagggtctcagggtatcttcggcttacttctcactcagtgtgtagcctaggatgacctggaacctccagctcctgagtactggattacaggcttatgcttccacccccacgataggcagtactgggaatcagacttagtgcctggtgctttctaggcaagcactctaccagcccagctacatcctcagcctcacaggggacttttattgtataccaatgtttttaatagaagatagtacatttgtatgggtcataaggacaggtcttatccaacatggtatttaagatgctgatcttctaaaaatgatacactgctagtttgtcacatgcaactcgttctgctggtattgcatttgtttttgacctggcatatatgtgaatatcaatgcacaggcaagtcatgtccgtgtttatcaggcagttggttgtagtccatattgtagtccccacatccttatgtgaaccaggtaaaatgatagtcttaacacagtccaggaagttcactgaatcttaggcttcacaaagcatagtcagaagatttgggttgatattttgtgcttagaaggctagagcagcacagagggacttgagaggaagatgctatgtagtagcttctcttgtcactggattgcgttgcaataacttttccagaggagatgccacaccaagtgggcaccaacaacagatcaaagtataatctcaccaaagtccaacttggtggaagcagtgagtttgttgggctttcttgcagagcagagttatatgtacaagagtgtgggaggacgcaaacagctagatcactgcaagatcccaccccatcgtattttgcaatcttaccttatcatagagacctgcttttagccatccttcaattctataaataggctatcatctctcaagacctcttgcagctagagaaaggagtggaatctcaggcaagggtcttctgacaccccagtggagtaacaatagctccattgccagagtcctggctaacactgtgctctggttgtcatagctataggggaagaggccaggaatgaaatcttattatgaccagaaggaagagcaccatataataataagggagtccatatatgaagattctaagaatttgaataggattttaagaataaattatatatttttaaggagtttaacattgatataaaatatatacaggtggctttaaaaggttacttggggggataaactatgtatcatttcacagttgccaccctacacaccctgcctctgccacttcagggtaaaagtagctgtcatgtatagcaagagttttcaatacaatacatcagtattaactatagtctttgttttacactggaactataggattagccaagtatggtgtgacccttctgtaatcccaacacacaaaggattgtaagtttgacattatcctgagctacatagctagactcttccacaccctcaaaaagcaaaaaactgtagggcagatgatattcagtgtaatttgtaaaactagtcaaaaaaaatgacttttgttttgtttttgtccctttaggtgaatatgaagaagcacttaaggtaatgtttacttcatattattttcaagtaatttgaaaaatacttattgaaacctaaactcccctggaaagtactaagaatagaatgactcccgttagttagagagtctgtggtaagtagggcaaatgactcagcagcaggcagttcctgctacagttcaggtgatgtgtcatctcactgcgggacttaatgccaccatcttaaaaagaagcctcaggggttaagagtactagctgatcttctaggttctaagttcaattcccagccaccacataaccacatggtggcgtggctcacaaccatctgtaatgggatctgatgccctcttgtggcattcggtgtacatgcaggtagaacactcatacataaaataaaagaggaaaaaaagaaagcagcagcagccccggacatggtggttcacttctgtaattccagcactctggaggccaaagtgcctggatcattgagttcaaagacagattaggctgtgtaataggatcgtttgagcctagtttagggataacctgggcaacataataaaacccagtttcaaataaaatatattgtgtacaggaaattttaggtgatttttttttcctcttttgcaatgatgcgctcagcccctcatgcatgctctacaagtgctcatatcccacctaacaggactctcaggctgaggtaaaggaaaacagctatgaggcagaggggctggactcttagctgttcagtccctaatttttcttaaacattttatttatttatttatttatttatttatttatttattggtttggtttttcgagacagggtttctctgtgtagccctggctgtcctagaactcactttgtagaccaggctgaccccgaactcagaaatctgcctgcctctgcctcccgagtgctgggattaaaggtgtgcgccaccacgcccagtttcttaaacctttatataccttcatggaaaccaaacagcgtattggggtttccataatactttattaagaagatgttcttcacaaagatacaactatttgagctcgctctctaagaccccagggtagggaaagtgagtgcttagctatagggaaaagctttaagtagccatgattactatcagtctggaattaatttgttttttagaaagttgagattagcattaatgtcttacagagaaggcagttaacaggtaatacacacctcactcagagggtgaagcaggaagatcttgacctggatgccagccaggacaacccaggcgaccccatgtcaaaacagaaaacaaaataatttaagaagagcccagtagatggcaaaatctcacctaacaatttcttcacattttaacttaaagccctttgtagttaatattcttgataaacatcaggctagatattaatgtagaggttgactatctttatctaaaatgcttggaaccagatatgcttcaattttttaaaatttgatttggggatatttgtacattcataatgagatgtcttaggaatgggtcccaaggctaaatttgaaatttatttgtttcatatacactttatatagcctaaaggtaattttctatagtatccttagtatacagtatgatcataaaatgccaggtgctaattttttccttgtggca

SEQ ID NO: 9 - DNA, 74514 bp, Homo sapiens
ctcgtaactttataaaataaaccatggagatggagttgaaagggggtgctgacaaggaagggagttggagaaggcatctattctcgtgagaaggcctgaagagtgcacaacagcctggccccaagacacaagagcactgggctggcttgaggagcaccaggtgaccaagaccaggcaatgcacagggggaagtcagcaggccccatggagatacgcagctgcagtgtttgtacttttatacagtgaaactcattaccaccttgcttacttcctagtagagagatgtgtcttgtagttacactgaaacacctggctgggcacataggtgaagctgttgagtctgtaattgtcaaactgctcccaggtgccaattataatgtagaagaggcacaagaagatgaagtggataagcctggcagtttgtcaagcattcatcagttgtcaagcatttgtcagttgcagaatgtaggtaggctgccaaggctttattgtagcctggttctattgcagctttattctagcaaggctgctggaaaatacaataatcactggtccaagaaagaactcttatactctatctatatgaagaaacagtaaaagtcaattcagtagaaatcatgatttttgtgcctggtgctttcacttttttatgccacaataccaagaggttaaaatgaagtgtctttgattgggaataccatctatctgggaaaagacagggctgcaacttctgaagaccttgacactctgtcctgttaccctgcttcatttttctcctgcgcttatcactacttgatgctataaacaaataaaaacatatatgatataaggtctatttctcctactcaactgtaagttccatgagggcagggctttctttcttgtttactactctattccctgtatctaaaacagtgcttggcacatagcaagtgctaaaaaatattctttgaatgagtgtatgaatggaacttacagtcagctgaaggagacagttattaagcataagagtgatgaccagtccaattgtgtgtgtcaggcatgtgtgaaaacgtgctaaatttgacttgcttattaggacagtaactgatacttctaatgttcttgcagcccatgacctcttctttaagaagtgtccattctgtactactttcccattattcactcattcattccaaagcatttgctatacagcagtattataccagataccatattaggtgctggggctagagagaatataaaagctaacattgattgagtgtttagtatgcgccaggccctgaactcagcacattacatgtattaactctttaacccctatggcagccctttgagataaaaactaatattatcttcactttacagataagttgagacacagaaagttaggtgactcaaatgggttcactgccttaaggatctcagtctaataaggaaagcagaaaagcaaagcaaccttataatatggtgcaataatttgctataatgaagttatatacaaagtgaagtagaagcatagaagaagcagcactaaatttgtctgggtgagtcagagaaggctaaccaggaaaaatagtttctgaactaacacttgaaggaggtgtagcagttcatcactgacagtgatgttggggtgggtctggtttcaggagaggggaggaaattggctttggtctgaggctgaggtgtgggcaaagcattagcttatgtgggtccattagcttatgtgagtccacaaaaggtgtgtgtgtgtttgtgtgtatgtgtgtgtgtgtgtgtgtgtgtgtgtgtgtacgaaatgggggctcaatgatttggtagtggtttggtttgtcaagaagcaggctgggaactcaataagcatctttccattcatttctactgtgtatcccacagcttcacacacacatgcacatttcaacattggtgactgcttcacttgcacacctaaggtaatgatggacacacctgtagcaatgtagattcttcctaagctaataattagtttcaggaggtagcacatacatttaaaaataggttaaaataaagtgttattttaattggtaggtggatctgttggcaccaatgattattcacggcatcaagacccagggtgcccgtcagaagttctccagcctctacatctctcagtttatcatcatgtatagtcttgatgggaagaagtggcagacttatcgaggaaattccactggaaccttaatggtatgtaattagtcatttaaagggaatgcctgaatactttaaagaattttggcagatttcagatattggacaaacactcttagcttccacaaacttaattccaaaaaataatttttcacttatgagcaatagagttattacggacatatcagcaaaaatgtagtagtgtcaaggctcatagatgatagaaatgaagagatgctgtattgatagaaatatgtgattcaggactgtgtggattgatgattgtgagcttgcttatggatatcctaggtttgaggttatagtaggacaatcaggttgaaatgtccagcaggcagtaggtgaaagacaagtttagggggcaaaaccatggatggagatgaagattcatgacttccacataaaaggatgggtgaaactttgggaattgatgaattctctagaggtgagctcaagacccttaaaggcttaaaacctcagcgttattgtctactcttccctcatttttatgcccacaaatctggtcaatcctttatttgcaatgcctctcacatctctttcttctgtttccatttataccgctgttgccacagcccagggtcccatcacctcacacttgatctattgtattacattcctaactagtcttcccccgtttctaatctgttctccgataaaagctgcacatcattttcaggataatcatcagtcgcctgcctaaaacttttcaatgtcttcccattgtctttagaataaagttcaaagtcttcaaatgaccccaagcaagataacttttgtttgcccctttagatccattttcctgcttctctaccctgcttcttgttctgtgaggtgagcttgtatagaatacatcaacaggttaccttgtcctccagcttttggttggatttcaccaacagggagcactggcaaaagattggcatatttattcttctgactttctccttgcagaggagttcactgtatctccccacttaaggtcactgtttccctcagagtggctttttctacctgtactagctactattgctgtgtaccaagccacttcaaaacttgctgtcataacaataaccattatgttttgctcacagattctgtagatcaagactgggacacagtggggatgggtggtttctggagcctcagttaggattatttaacagctgggtgctggaatcatctggaagttccttctcttgcttttctggtggttggtactgactgtcagctaggacagaatctggggttgttgactgatgtaactttacatggattatccctgaggcctggccttccttacagcatgtttcaaggtagttggacttctttttgagggggggtaggaaggtggggggaggacagagtctcactctgttgcccaggctggagtgcactggtgtgatctcggctcactgcaacctctgcctcccgggctcaagtgattctcctgcctcagcctgctgagtagctgggactacgggctcatgccaccacacccagctaatttttgtatttttagtagagacagggttttgccatgttgaccaggctggtcttgaactcctgacctcaggtgatccgcccacctcagcctcccaaagtgctgggattacaggcacccggcctgtagttggacttcttacacgtcattttagggcctccaagtgtgagtgttacagttaacaaggtgaagactacataaccttttctgaccgagtcttctaagttatgtagcatcacttttgttgacaaaaagtgttgaactctataaaatatttgaagagatttattctgagccaaatatgagtgagtatggcccatgacacagccctcaggaggtcctgagaacatgtgcccaagatggtcagggcacagcttggttttatacattttagagaggcttgagacatcaatcaaatacatttaagaaatacactgatttggtccagaaaggcgggacaactcaacctgggggcttccgggctataggtgaatttaaacattttctggttgacaattggttgagtttgtctgaagacctgggattgatagaaagggaatgttcaggttaagataaacattgtggagaccaaagttcttttgaagtcttatagtggctccccttagagacaatagatgacaaatgttttgtattcagatcttagttaatctctttaggattgggaggggctgggagaaaaagatctagctatgttaatagagattctttacagttgcaaatttccctccacaaagaacagctttgcagggccatttcaaaatatggcaaaaaaacatgttttggggtaaaatattttgattttcttccttgtctcataatgttatgccagagtaaggttggaaagtaaatcatgacatataaggttaaataaaacccatctgatgagaatttatgatttgtagggcatgactccccagaccccttagataggaatttgggcaagataaaaaaaaatcagagtttagtcctcactttcaatacattctattggttataagcaaatcgcatatccacccagattcaaggggaagagacatagaccctaatttttaatgggagaaatgttaaataattggtggtcattttttaaagccactacaataatctatccaattctctctttcaggatgtttctctcttctgatcctttcaggtttagggattgtcaacaaacaaaaagttaaaccctgtaaaatacttgaagagatttattatgagccaaatatgagagaccaatggcctgtgacacagccctcaggagatcctgagaacatgtgctcaaggtggtctggctacaacttggttttacgcattttagggagacataagaccgaaatcaatagatggaagatgtacattcattgagtttggaaaggcaggacaactggaagcgaggcggggcttccaggtcgtaggtagattcaaagattttctgattggcaattggttgaaagagttaagttattgtgtaaagacttagaatcaatagagaggaacatcggggttaagataaggggttgtgaagaccaaggttctgtcatgcagatgaagcctccaggtagcaggcttcagagagaatagattgtaaatgtttcttatcagacttaaagagtctgttctatcagtctgaaggtctgtgttgatgttaatgctggtcagatttttctgaattccaaaagggaggcgggtataataaggcatatttgatccccactttcccatcatggcctgaacgtttttcaggttaactttggaaggccctttgccgaaaggaggggggattagaattttattttgggtttacaggatggtaatactctgttcccaccctcctaactagtatctttattaaaccttccacaaattatcctaatttccatgttttctgttccttgctggatcccttgtttcatacagtaattggtgctagaagaaaccccaggaaacagattttcaaaatgcaattctaaggttatgttgctaatatattcaagaaacacagagataacatatttgccaaggaagaaaatgagcagttagggaatccatgacatgtgttagtattatagtttctcagattatcaccagtgatactatgggatgagttgcagatggcaagtaagacactggggagattaaatgacagtggcatttagtcactgtggcaacaaacgtagcattacctgattgtagagtggtctgtcttcttacagccctagagggcatacacatggaaaaagaaatgaaatgttatgaatatatacaaaataagaacactgatgaacatacatggaaaatcaggatgcatgcatagagcttttgaggaatactccgtatcctgtggttgtaggcagatacgacttaggggctgagcataagttgcagagctgcagtgacaattaaatgcttaactccaccagatctattatgctgtggtaagagtaccggtgggaaggagtgaaactctgaggcctgagatggaggcatttaggcagacatggatgaggctgagaattgcaaacctccaaattcccctgaacctcctttgcctgaggaggcaaccactccccagtctctgaagcagtcatccctcttttgtgtaaaagcctttcagtggctataactgagataggtgcctcacaaaccagtgactattctccttagagaccctgtttggacactacgaaagccaggcgagtcacagaaaatgacagcagatcacaaatttaatcaggtggtgatgccaaaaaacaattgcaattccagatatcatatctctgttgaagcaaatttacacagccccaggcacctgatatggaagtattgacctagagaatgttttttcttcatttccatacattagtaaaatcagaatacatttgaatttaccaagtaggaacaagagtattaagtttactgcccatgcatcagggcaatgttagctctcttgttttctatcataatatagactcaagggacctcaaacatctttacatcccacaagcacaatgcctgtccattacactgatgacattatgctgacaggatctggtaaacacataacaaataagcctgtcttgctcttgactttaatgagaatgtaacctgtgtttcactgtttaatataatgttcactgttagtttcaaatactttttatgatgtttaaaaagttttctcctatccctattttatttgcaatggcaactgaattttatcaaatgcttttccagcatctttgacatggtcacatttctcttttgtgttgtcaaattatacttaacattcaatagtgtgctgacaagaaattaacaacccacaggggagcaaagtgagaagaggttaagaagtaaaggccttgatttatagcattggcagatttccctgacataaatactactcccatcatgcctggccccagggatgggaagagatgcttacttacaattggctctcacagaccagtgcaagagcactactgtgctccatttctgggaaaactttcgtcagtcatagtgtgttagttatttaaaacttagctggatccaatttgccaacatttcatttataatttctatatctatattcatgaatgaaatgggtttagctttttcagtagctctacttaccaggttttggcatgagggttatattaaacttgaaaataaagtgggaaagcttccatttttttccatgaagactattgctctagaatagcttatttaatgtaggaatccagtatttaatgagagtaaatgaaaaagccatatgagccatgtgctttatttagtgagagatactaggctatattttccaatcgttatatgattattgctattctcatttgtgttgccttgagttaatgtctgcaaatgtgcacattagagtcatatatcccttcctgtgccatacatctatatctgtatacacacatatgtcttttctccttttttcccttctgtatcaagagttggcaagtgtttgtctattctattaatttttcaaagaatcagctcagttttaaacccaaacgtggttttgaaagagctgtttctagttcatcaatctctgttcaaaactttaaaaattctattttcctttcttttggtttgtttcctacaatctggaggtgaatgcttagttcacttattcttcaatctttgtattttaacgataaggataaattacttacagttattaactactctcatgaggttcattccttgaacagtcactgagcaactactatgtcctgggttctaattcaggggtgggcaaactatagccccagaatttggcccatagcctgcttttgtacggactgtgagttaagaatagtttttacacgttgaaaggattgcaaagacaaacatacaaagaaacaaagaagactgtgcaacagagaccacctgtggtctgtaaagactaacacatttctatcccgcccttgacagaaagagtctgtgggctgctggtctcctctaacggtggtagagatgcctgcacggttaacattaatccttggcaccagaatcctcagcacctaggaaccagatcttgcctaacacgctaatttcagtcttgaccaccttcctccggcgtagcggttctcaaacgtctttgtctttgtactattcacgtataaaatattctttcataagcaacatttatccttttgggaatacctcacaatggggagaaggggaaccccaacagcctttaagggttcactgcttcgctgccaccatttccgacggtttacactgttttaagtgtgaatttggaattgttttcaagttaaaaagcaaactaatcatgtcctctgaaagtatttgcttttggcatgctagaaatcagtgttgacttttgatactgatgtgatacattacgagggaattctcaaaactgctgaaatctggcctcggcccagttatcactgctcttaagcttctgagggagatacatgaatgagcccacggcaaatggaaaacgaggagttttagtgtttcctagaattatgctcagatacccactacctgaccgtctggttatccttcccctcacctccctgacgcaaggagtttggaccagaggcctaaggaggcttctcctgaagcccaaatcccaaactggtcaccagtcatgctccgtaactcctgaacctgacaagaagccagccggccaggtctgcagcccgggttaagaggagcataccaggaaagagccaaagagcaaaggagcatgagcccttcaaccgcttttacaataatttgggctaggcgttcagggctccgtaggacccttcctggcagccaagtgagagaaagaggaatgatggtggaatgggcctctcctgtgcttcccattacttccacactgtcgaaatagaaatagaagcagaaaagaacaccctacaagtcccacccatttggaggcactcaactcacagtgacaaccctccacacctctcccctgcaaaaagacgcaaaacaaaaacacctactccaaactgtgtccttacatctcagccccgaagatcaggattgtgtgcaacttcggcccaaaggatgcatttccccagggttgaaagtttgagaaagaggctatattctgaagagttcttgttgtcaccatcaaaaggattaaaaagacgcaataaataagaaaacagcgtagttggggggcatgctccatttgagccagaaagccttggaaacttaagtgttctcaaacggaacgccatcctgctttgggggaacacggaggctgccttgcagtcacgtgatcgcacaacaccaaagggccacgcactctgatttcacctacttaactaaaagttgcagcaaaatccctattacaggccaggcgtggtggctcatgcctgtaatcccagcactttgggaggccgaggagggtggatcatttgaggtcaggagttggagaccagcttggccaacatggtgagaccccatctctattaaaaatacaaaaattagcccagcgtggtggtgcacgcctgtaatcccaggcaccctggaggttgaggtaggagaatcgcttgaacccaggaggcggaggttgcagtgagccgagatcacgccactgcgctcctgcctgggcgacagagtgagactccatctcggggggaaaaaaaaaaaaaaaaaaaaaaaaaatccctattacaaataaaagctgttgtgatccagactgcatatacctctgcgaatggaaccagaaccgtgaattccaatgcaaatcgatgcatcggcaccagacccgctgcactggatgtatctgcattgcagtcacccgagtacggagcacatcatagatgatctctgcaggttcgttgcccacataggaggcatagcgcaaatttcaaaggaacgaatacatcctggagcccaaacagctatctggttctgctgctggcctcctgacaagtaggtaagagagtcacattttatagacgacggacaccaaaaccacacatgaggagtacaagagtagctttatcatggatttagggctgtggttacaaggaagctgtaaggaataaaatgactcccatgaagacgtaccgtgcggacgagtggaaggagaaatttggccattacaaagacacaggaatatgttaagaagtgaggggcaggatgaaatcatctagggtaggtatttagagggagggcgccgtgcaaaataaaatcctcactatgaaacaaaggcggaggcaggaggctgcgttaggtggaagcagcggaggaaggagacgaaagggattgtcattttcatgtcgtggctttttagaagacagccatgtcctctactctgattctatcaaaatgtgttctcggggtgctggtaacgttcagccaacgaaataattcctatggcggcagtaggaataacaaaacgcagaagcgggaacgatgtctttttattcctccccagacgcaaacgtggatgcatgaggtttggtaacaggcaaagtcatctggttaacgtgactgatgcaaaaagtccaggcctgggcaaaaagaagtcactgggtgaatgggatggatcagactccctgtcctgagggggagatggtttcttgcagaacgaggtgaaggaggtggttctgctcagcagtcaacagtggccacatctccacctgcagcgacttgatggcttccgtgtccttttcgtgggtagccatgaccaaagactggagcagcagaaagagctcctcgggaagctggccgctgctctcctgcccgtggctgtcaaaagcctcccaggagtacttctccagggtctgggcgtgctccggcagcagcttggcgggcggtggttgcaggaggagcagcagcagcacgcgggacacctcgcagcggaccagcacgtccgagaaggcgcccagggcggcgggagagggcgccgccgagccggagttcggaggaagcagcgcggccggtagggcgggcgtcgccccgggcccgggctggggtgccggcggcgggggcggcggcagtgactgcaccgggtggctgccgtgctcccgcgccaggcgctgcatgcgcgtgaagaccgccagggcgccggtgtagtcgcgcgccagcagctggcaggaggcggcctcgccaagcgcctgcagcgcggccaggggcagctggggcagctggagctgggcggcgcgctggaagtgaccggcggcggcggccggctggcccaggtcgcgcagggcggcggccagctcgaggcagagggcggcggcggcggccggctggcccagctcgaggtgcagacgcaccgcggcgcccagggcgctggcggcggcctgcagcggctccccgtaggcggcggggcagaccaggcgctggcgcgcgtcgcgctcctgccgcaggaagaggcgggcggcctcggtgagggccagcgcctccccgggcccgtggaagagcgcctgctggcagcgcgccaccgccagctggcaccaggccgcgtagggcagacactcctgggcgcgcagctcccggcccagctgtccgaactgctcgccggcctccgccacgttcggcttccgcaggaaccgcttcttcagcttgttcgataccagccggtagcgggccaggaagtccccggcctcgggtcccgggccggcgccgccgccgcccaggcctgcagccgctgccgccatgctcgccgccccaagcacttcccgacgcgccgccgcagctggcgggcgggccggggcggggcgacgtgccctgcgtccccctcggcgggctgccgccgtgcccgcgccggctccccagcccgagcctgccccttgccctgatgaggtgcaaagagcgggatcggaggcggggcctggccgggctgtgagcggcgtatgcaaatcgagggtctcggggatgcggatccaagaccctgggaaggtacgcggggcctggcggggcaccagctgctgctagctcggctgcaatgcaagtggtctaggttgctaaaggcatcccacagcctctccatctgaacatgacccaaacgaaactcgtgaccctaattccatgtctgcgcatttctagactgttgtccccccccccccccgccccgactactcagtcctccgtcttccggtccagggccccttgccaagcaccgggtccacctctccgtccccaccccggttgccttagaagtccgtcctgtcgcaacactgcagtcatggtcttgaggcccacccgccccaacgaacaccatcatgctgaggactttcccgggcaggccctgacttgctcagaaccagcgggggtgtccccttcccacccagggccactcccctgcactgtcacccggagagactgctcctctgtgccatccctggctcccacccaaccccagacccccaccacctctccatccctccagctgtggaggtctcacaaccccccaacccatctcaccgcccccccacccccaccccaaggcaaagtgactgaagcgggcagatggcttccttgaaacattttattgacagaattaatgaaggcccaagactttggggcctgggttgtggggggagggtgtttaaggccgggggttcaggccgggggatttggggccgggtgggtggacgagtggacctgtcaggtcccaggggccgggtgtcagaagctagtcctcgccaggggccacttgagagatggtggtcgtgttgaaaagggtgctcagtagcctgtcgttgtgaaccaccatgtccagcagcaggggagtgatgttccgctctccgctgttctgggcctcgttgcccgccagctccgggaccttggccgtcaggtactcaataaccgcagcgaggtagaccggcgccgtgcgactcaggcgctgagcgtagtggccctcccgtagactgcgctccacctggctcactgaaaacgaaagctccgctcggacggtgcgagagcaggtccgcccccggccgccagcaccggaggaccctcggcgtctcctcctcctcggcatgctgggcgttgagtgtgctatctcggcttggcccagctaggcaagatggctctcaagaggacagttaccgcgtccagtactgtgtatcctagcgaccagggcccagcccctcattggctagggagccgagaccaatgggcacgcacatccggcgacgggcacgcatgtggtgacggcccctcacaagggacacacgtccgtcaggtgacctcatcactttcccattggcctcgagggagcaggcctgggcctagaagtggctggagggccgtgggggtggggtggggcggggcagggggaatcgcgctggtgaccctctctttgccagtgggaactttccctttctactggatgggaacaccgtgggaaagacaaaggggtgggcgaggggaggacgggtaccacgccttcacaatgttgcacatccatcacgaccacctagttccaaaacgttttcaacaccccgaaaagaaaccgaaacccctgtacctataagcagtcacttgccgcacgcctccttccacaccaccactaccagcccccacaccctcccacacacaccccctgcccccgcccatacacacgttcccgatagtccctggcaacccctagtccatctgctttctgtccatagaggttagcctgttctggagatttcctatagatggaattatacgaccaaatgtgaggccgtgtgtgtctggctgctttcacttagcgtaatggtttcatcagggtgcatccatgtagaggcatgaatcactacttccttcctttgaatgactgagtacgattctgttgtatgaataggaggccacattttgtttacccactcgtcagttgatggacaggttatttcccccttctggctattgtgagtggcactgccatgaccatctctctacaggtttttctttgaatatctcttttcagttcttttgggtctatttctagcagtcaaactgctggctcgtgtggtaattctgtttaacttattgaggaaccaccaaactgatttccacagcagctgtaatctttcgcattcccaacagtagtgcatgagagtcccaatttcttcacagcctcatcaaaacctgttttctgtttgcctcattttgttttgtttacagtagccatcctactgggtgtcaagtgctatctcatggtggttttcattcgtatttcccaaatggctaatgatgttgctgtggtttgagtgcatcccccaaattgtgtgtcttggaaacttaatccccaaattcacatgttgattggaggcgcagcctctgagacggtaattaggattagataaggtcatcggggtgagacccccaggatgcgactggtggctttataagaataggaagagaggcctgaaacgacatacacgctcttgccctctcgccgtgtgataccctctgccgtccccagatgccgggtcacttcccagtccccagaacggtaagaaataaatttcttttctttataaattgttcagtgtcgggtattcaattatggcaacagaaaacagactaagacatcttttcatgtgcttcttggccctctgtacctctgctttggaggaatgtctattcaagccctttgcccattttttaattcggttgattgtattttggctgtgggcttctaaaacttattcatatattctggaaaatagactcttatcagatatgtgacttgcaaatgtttctcccattcactttctggatagagccctttgttgcccaaaagatttacatttggatgtagtccaacttgccaaatgaaaagatatctgtggctttgcctttggtgtcatactgaaggagctgttgcctaatccaaggtcgtgcaaagttacatctccgttttcttcttagagttttatagtttcagcccttacatttagatctgtgatccattttgaattaattctttacatgatgtgaggtaggggtccaggggccttcttttgcatgtggctatccagttgtcccagcgcagtttgttgaggggattattcttcccctccacccattgaggggtgccggaactcttactgaaaataaactttacataaatatatgggtttattcctgactctgagttctgtaacattgacctaatgtatcgatcacgatggcagtaccacccttttcggattactgcggttttgtagtacgttttgaaattgggaagtgtgagtccttcaacttttttcttttctgagattgttttggctatctgagccccttacattttcttatgaattttaggatcagcttgtcagtttttacaaagaaggcaggttggattctgacaggcatcacgatgaatctgtatattgccttggagattatgggcatcttaacaatattaagtgtcccaatccgttaacacaaaatgcctttcgatttatttaggtcttctttaatttattttagcaacgtcttgaaattttcagagtatacatcttgtacacctttagttaaatttattcctcgacattttattgtttcgatgctactgtaaaatgaatcatttccttaatcttattttcatgttattcattgctagggtgtagaaatacaaccgactgttgcagattgatcttggatactgcaactttgctgagccgaatatgctttgctgagcatactcagacagggttggcatattagtccgttcctacactgctataaagaactgcctgagaatgggtaattcctaaagaaaagaggtttaattgcctcatggttctgcaggctgtacaaggcttctgcttctgggcaggcctcaggaaacgtgcaatcatggcggaaggcgaaggggaagcaagcaccttcttcacatgttggagcaggaggaagagagagagaacgcacgcaaagggggaagcgctgcacattttcaaacaatcatcagatcttgtgagcgctctatcagaagaatagcaagggggaagtccgcccccatgattcaatcacctcccactaggcccttccttcaacaggtggggattacaattcgacatgagatttgggtggggacacagagccaaaccgtctcagttttttttttttttcttttgttggactctttagtgtcctctatataagaacatgccatctatgcatctatgaatagagatggttttacttgttcctttccgatctggatgccttttatttctttttcttgactaattgccctgactagaactttgagtacgatgttgagttacaagtggcattcctgatcttagggggaaatcaaccagtctttcaccattaagtatgatattatctctgggtttttcatggatgccctctatcaggttgaagaagtttctttctgttcctggtttgttgaatttattttcatgaaagggtactgcgttttgtcaaatgatcctttttgtacatgattaagatgaccatgagccccctcccccgcccccgctccgccatgcattctgttaatatggtgtattatataaattgattttcacatgttgaaccaaccttacatttgtgggataaatcctatttggtcatagtgtataaagagtggtcaataaacatttcgttgaaagaataggagtggatctggcaagcttcttggaggacaatgtgtgtgttaaagaatctgtagcatgatgagaagccaaggcaccggtgggaggaggggagttgcaaccaattcattaaggctggagagtacgatgccagtggagcagtagtggttgatgtggctgggaaagaggtaggcaggagccaagacatggaggttctattatgccatgctcaggttttagaataccctgtaggctacactgaacccactgtggtctttcagcttgggagtgacgtggtctgatttgcctctagaaatatcaccctggaagctgtgtggagaatagaacagagaggattgtgtgtggagaatagaacagagaggactgagattggaattagaaagctgctgtattataccagtcaagaaatgacagatatctcaactaagacaatggcattggtagataagactaggggacagagtccataaaaagtttaggtagtaaaatggcacacagtagacactcactacatattactcatactggtgaacctagctggagacatgataattcatgtgctcattcttcaaaaaatattgaagggtagtgccaggtatactgtgttaagcattgagacaacaccaacgagaaatattctgttgtataaataggccacattttgtttatctactcatcagttgatgaacagttcattaaatgatttccatggcaggggaggtaaatgttgtcctctatcctcttagattctccagctaggacttaaataagatagattaacaaaagaaaagcatacaaaattttatttggcattttttacatgtacatgggagccctcataagaaatacgaagactcaagtgattaattacagctgaatacttacatactagggtgggaaaagtatggtaaattgtgaaaacataacaagacattggggtttgggctaggagagttaattgtggaaaagtcactaagaaggtaagagttgtgtaacaaggttttttggtgcagctttccctcaagcctggactccccatctctggcaataagaatgtgtttcttcttcctggtatacagataatacctttcacatcagagtttcatctcttcctttcatgaaaaaaaaaggaaggtcagtgtgcccttcttgcatctgctactttcaagtgcctttaaacacaaaataatcaatatgccaaagtggcatattttgaggtggcatttgatcccctacattactgattggatagtgtgaatagtgctgccatgaacgctcctgtacaagtgtttgtttgaacagatgttttaaattgcagacgctcctcaacttgggatggtattatatcctgataaacccattgttagttaaaaccattattagtgtaaattcatttaatacagctatattagtccattctcacactgctataaagaactacctgagacttggtaatttatgaagaaaagaggtttaatggactcacagttctgcaggcttaacaggaagcatgactgtgaggcctcaggaaacttacagtcccagcagcaggtaaaggggaagcaagcacgccttaccatggtggagcaggagagacagagagtgaaggacggaaatgtcatacacttttaaaccatcagatctcatgagaactcactcactgtctcaagaacagcaaggggaaatccacccccatgatccaatcacctcccaccaggcctctcctctgacacacggggattacaattcgatgtgagatttgggtggggatacagagccaaaccatatcagcggctaacctaccaatcatcataatttagccaggcctaccttaaacatgctcagaacacttacaattaggctacagttgggcaaaatcatataacgtaaagccaaatttataatgaagtgttgactatctcacgtaatttattcaatattgcactgaaagtgaaaggcagaatggttgtatgtgtactttaagtacttttatgcatatggattctactgaatgcatgttgctttcataccatcataaagtcaaaatattgtaagtccaaccattataagctgggaaccatccatatttgaggtacatacccatgaatatatttatgggtttatttcttgcttcttaattctattccatttatatatatgtctgtccttatgccagtaccacaaagcattgataactgtagctttatacgaagttttgaatttgggaaatgtgagttatccagctttgttattttttaggattattttggctatttgaggtcttgcacaattacacatgaattttaagattggcttttccatttctgccaaaaaaaaaatggccattgggattttgatgcagattgtattaaatctgtagatcactttgggtagtactatcatcttaataatattgtcttccaattcatgaacacaggatatattttcacttctttatgctgtctctaatatctttcagcaatgttttgtagttttcagtgtacaagtcttttacctccttagctgaatttattcctaagtattttattctttttgatgctattttaaatagaattattttttattttgttaatttcatctcagattgttcattgctagtgtgtagaaatacaactgatttttgcacgttgatcttatatcttgcaactttgctgaattcgtttattagctctatagtgttttgtggattcttcggggttttccatacataagctcatgttcatctgagaataagatagctttacttattccttttcaatttggatgccttttatttctttttttcctaattgctctggctaagacttccaatacaattttgaatagaagcagtaaaagcaggcattcttgtctcgtttctaatgttagggaaatatctttcagtcttctaccattgagtgtgatgttagttttgggtattttatgaatgctctttatcatgttgtggattttctcttccatttctagtttgcttagtggtttttttttttttttttttttttggtcatgaaaaggtgctcagctttatcaagtgatttttctgcatcaaccagaatgaacttgcaggggtttttttccctatattttattaatgtggagttgactgggggattgattgtcttatgttgaaccagtcttgcattattgggataatttccacttgagcatgggctataacctttataacatgctgctggatttggtttgctaatattttgttgaagatttttgcacctagatgcataagggaatattatactcacatattcaattacatgcaatttgtaattttcttttcttgtgatatatttgtctggctttgatatcaagatatggtggcctcatagtatgagttgtaaagtttactctccttttctgtctcttggaagagtttaagaaggattaatgttaatccttccttaaacatttagtagaatttaccagtgaggccttctagcacaatgcctggcacataatatatggaatctaggatttgtatagtcagtcattaactatttgttgaattaataaattgtctccccaagcaggtttctaatcaaggcacaaagattgagtaacgaatgaaggcaaagccaatgtatacagggtattagttttctaatgctggggtggcaaattaccacaaacttaatatggcttaaaacaacacaagtttattatcttacagttcgatagggcagaagactgacccaagtcttactgggctaaaatcaaggtgtcatcagggctgcatttctttctggaagctctagaaaaggatcctttttcggtcgcctgtagtcccagctactcgggaggctgaggcaggagaatggcgtgaacccgggaggcggagcttgcagtgagcggagatggcgccactgcactccagcctgggcgacagagtgagactccctctcaaaaaaaaagaaaaagaaaaggatcctttttcctttcttttccagcttctagaggccacacacattcattaactcatggcttccttcctccatcttcgaagccagtaacattgcacctttgtgactattcttaagtagtcacgtctccctttgactctcctcttctgcctctctctctcactttcaaggcctcttgtgattacattgggccgacctggataatccaggatattctccctattttgacatcagctaattggcaaacttaattccatctgcaaccttaaatccctcttgccatgcaacataacacagtcaaatgttctggggattaaaatgtggacatcactgagagatcatattcttcctagcacatacggtttagtcacaagttaatgatcaacatttattagctatataatactcttaagttcaacataaactttttggatgctgataaaacggaatggcattttacattgatatatacttcatttcaaaacttcttctacttctcaatgattattctgtagcaacaaatttcttttaaatcagaaatttggaaacataacgagacctatctcaaatcaaagatgactatccccttttggagtcagactacacattcattattttagtcaaaatgagacataaaattcaggcccccaagagctgccagtacccacttacgcaggaggtagctagacgaaacaggtagctttctacaaatgattttgcaccatcccaccccagagaggtggtttggagtgtttacttattacctgggatttaattatactagctcttgcaaaagccaaatctaaaggccataaatagaaggtcaaattttctcctatatagaaaggagagcagcagagaaaacaaaatccttggtaaatctttaaacaaagttatatggtttgaatatgttattcattctattttaaccccccaatacagatatatttataaaaaagaatattgtgatttctggtataacttgtttaggaacaaagccacaaatttattaatattttctattccctgggaagaaaaaaatgctacatggcagaataattttttaaaatttccagccgggcacggtggcttatgcctgtaatcccagcactttgggaggccgaggtgggcggatcacaaggtcaggagattgagaccatcctggctaacacggtgaaacaccgtctctactaaaaatacaaaacattagctgggtgtggtggtgggcgcctgtagtcccagctactcgggaggctgaggcaagagaatggcgtgaacccgggaggcggagcttgcagtgagccgagatcgcgccacggcactccagcctgggcgacagagcgagactccgtctcaaaaaaaaaaaaaaaaaaaaaattcccatgatactaaactgatgtgtgatcatataatagacttacactgatacctattttagtgtattcaagcagataaaaaatcccaggtgttctatgagtgatatcattttcagtatttcttatgctgtatgccatggtttaaatctaggcctttcgaattggcattactaccatatttctcaaactgtattccctttctcttgaatatgttatgtaattttgtccagaacccagacatgtcaaggtgtcaaatcccacgttttggatactaacgtgtctcattaattcatacagtgggatcattcattaatgcccacattatagactctctctctctctacacacacacacacacacacacacacacacacacacactacattcttagaagatcattctgagaccagggtggaggataggctgtgcattcccagtactctttcacagctgactgtgtcctctgccagtgttttcaaactttactgcttatgaaacagctaagggtcttattaaaatttagattctgattcagtagaactgacatggtgcccaaggaactgcatctcttttaaaaaatctttatttaggtataattgacaaaagttgcatatatttaagaggtacaacttgatgttttgatatattttgtttttcatatatgatgtttgatacattgtgaaatggtcaccacaagcaagctaattaagatatatctatctctttgcctagctacctttttttgtggtgagaacatttatgacctactcttttagcaaatttcaagtatacaatattgtttactatagttactatatcgtacattagatctccagaactaatttatcttgcataattgaaattttgtaccctttgatcaacatctccctgtttcccccacaccacagtccctagcacctaagattctactgtctgcttttatgagtttgaccatcttagattccacatatgaggtcatgaagtatttttctttcagtgtctggcttattacacttagcataatattttccaggttcatccatgttatcacaagtgggaggattttcttctattttaaggccaaataatattttataattgtgggaatattccatcagatatatatatatcagattgtctttatccctccatccatcaatggacacacttaggttgtttccatatcttgactattgtgaatactgttacagtgaacatgggagtgcagatattcaacatactgattttgtatcctttggatatataacagaagtgagattgccagatcacatggtattcatttttagtttttttgaggaacctctatgctgtttttcataatggctgtaccaatttatttttgcagcaacagtgtacaaaggtttccttttctccacattaccaccaacatttgtcatcttttgtctttttgataatagctatttgctatggtttgagtgttttccccaaaaaacatgtgttggaaacttaattcccaatgcgacagtgttgggaggtagggccgaatgggagatgtttaggttatgaggactccaccctcatgaatggattaatgccgattacaaaagcacctaaggctgtgaatttgaattgctctctcttgccctctttttgcccttctgccatgttatgatatagaaagaaggcctttgccagatgctggcctcttgatcttggactgcccagcctccagaactgtgagccaaatacatttctgttcactacaaattactcagtctgtggtattctgtcatagcagcataataaattagagtccataataagttatagtccataacagactaagacactattctaatagatgtgagggaatatctcattgtgttttgatttgcatttccctgtgggttagtgatgctgagcatcatttatctgttggccttttatatttcttcttttgaaaaattctatttgggttctttgcccatttttaattgggttgtttcttactaatgagttgtttgagtttcttacccattatcagatatacagtttgcaaatattttcatccattccataggttgtcttttcactctgttgattatttcttttgctgtgcagaaagtttttagtttaatgcaatcccagtttctatttttgtttttgttgcctgtgcttttggtgtcatataaaaaaattattgcccaaatcaatatcaggtagcttttttcctgttttcttctaggagttttatagtttcaggtcttatatacaagtgtttaatcaattttgagttgaattttatgtatagtgtgagaaaagggcccaatttctttcttctgcatgtggatattcagttttcccaatatcatttattgaagagactctcttttccccgttgtgtgttcttggcacccttgtcaaaaatctgttgactgtaaatgtgtgaacttatttctgggcttttctattctgttcccttggttgatgtgtctatttttatgccagtaccatactattttgattactggagacttgtagtatattttgaaatcaggaagtatgatgcctctagctttgttcttcttgcttaagattgctttgccaggctgcatgtggtggcccacgcctgtaatcccagcactttgggaggctgaggtgggtggatcacttgaggtcagaagtttaagagcagcctggccaacatggtgaaaccccgtctctactgaaaaaatacaaaaattagccaggtgtggtagcaggcccctgtgatcccagctaatctggaggctgaggtggagaatcacttaaacctgggaggcagaggttgtagtgagccaagatcgcaccactgcactccagcctgggcaacagagcaagactctgtctcaaaaaaaaaaaaaaaagattgctttgcctccttggggtcttttgtgatttcatattaattaaaattttttttttatttctgtgaagaacaccattgagattttgatagggatcacatcaaatctatagattactttgggtagtgtggacattttaacaatactaattcttccaatctaggaatatggaatatcttttatttatctgtgtcttctttaatttccttcataaatgttttctatattttcattgtacaagtctttcatttctttggttaagtctattcctaagtattttattcttttgttgctattgtaaataagattattttctaatttcctttgggatattttatagtgtatagaaacaccactgatttctgtatgttgattttgtatcctgcaactttacagaattcatgtattagttctaacaatttttttttgagtctttagagttttctacatgtatgatcatgtcatctgcaaaaagagataattttactattctcttctatttggatgctttttattttatttattttttaaattatattttaagttctgggttacatgagcagaacatgcagttttgttacataggtatacacgtgccctggtggtttgctgcacccatcaacccgtcacctacattaggtatttctcctaatgttatccctcccctagccccccaccccccaacaggccccagcgtgtgatgttccactccctgtttccatgtgttctcattgttcagctcccacttatgagtgagaacatgcagtgtttggttttctgatcttgtgatagtttttgagaatgatggtttccagcttcatccatgtccctgcaaaggacaggaactcatccttttttatggctgtatagtattccatggtgtatatgtgctacattttcttaatccagtctatcattgatggacatttgggttggttccaagtcttcgctattgtgaatagtgccacagtaaacatacatgtgcatgtgtctttattgtagaatgatttataatcctttgggtatatgcccagtagtgggatttgctgggtcaaatggtatttctagttctagatccttgaggaatcgccatactgtcttccacaatggttgaattaatttacactcccatcaacagtgtaaaagcgttcctatttttccacaacctctccagcatctgttgtttcctgactttttaatgatcaccgttctaactggcgtgagttggtatctcattgtggttttgatttgcatttctttaatgaccagtgatgatcagcattttttcaaatgtctgttggctgcataaatgtcttcttttgagaagtgtctgttcatatcctttgcccattttttgatggggttgtttgtttttttcttgtaaatttgtttaagttctttgtagattctggatattagccctttctcagatggatagattgcaaaaattttctcccatcctgtaggttgcctgctcaccctgatgatagtttcttttgctgtgcagaagctctttagtttaattagatctcctttgtcaattttggcttttgttgccattgcttttggtgttttagacatgaagtctttgcccatgcctatctcctgaatggtattgcccaggttttcttctaggatttttatggtcctaggtcttacgtttaagtatttgatccatcttgagttgatttttgtaaaaggtgtaaggaagggatccagtttcagttttctgcatatggctagccagttttcccaacaccatttattaaatagggaatcttttccccattgcttgtttgtgtcaggtttgtcaaagatcatatggttgtaactgtgtggtgttatttctgaggcctccattctgttccattggtctgcatatctgtttggccccagtaccatgctgttttggttactgtagccttgtagtatagtttcaagtcaggtagcatgatgcctccagctttgtccttcttgtccaggattgtcttggctatgagggctctttgttggttccatatgaagtttaaagtagtgttttccaattctgtgaagaaagtcagtggtagcttgatggagatggcattgaatctataaattactttgggcagtatggccattttcatgataatgattcttcctatccatgagcatggaatgtttttccatttgtttgtgtcctctcttatttccttgatcagtggtttatagttttccttgaagaggtccttcacatctcttataagttgtattcgtaggtattttattttcttagtagcaattgtgaatgggagttcactcatgatttggctctctgtttgtctgttattggtgtataggaatgcttgtgatttttgtacattgattttgtaccctgagactttactgaagttgcttatcagcttaaggaggttttgggctgagatgatggggttttctaaatatacaatcatgtcatctgcaaagagagacaatttgacttcctcttttcctatttgaataccctttattgctttctcttgcctgattgccctggccagaacttccaatactatgttgaataggagtggtgagagagggcatccctgtcttgtgccagttttcaaagggaatgcttccagtttttgcccattcagtatgatattggctgtgcgtttgtcataaatagctcttattattttgagatatgttccaccgatacatagtttattgagagtttttagcatgaaggggtgttgaattttatcgaaggccttttctgcatctattgagataatcatgtggtttttgtcattggttctgtttatgtgatggattatgtttattgatttgcatatgttgaaccagccttgcatcccagggatgaagccaacttgattgtggtagataagctttttgatgtgctgctggatttggtttgccagtgttttattgaggatttttgtatcgatgttcatcagggatattggcctgaaattttctttttttgttgtgtctctgtcaggttttggtatcaggatgatgctggcttcataaaatgagttagggaggattccctctttttctattgtttggaatagtttcagaaggaatggtaccagctcctctttgtgcctctggtagaatttgtctgtgaatccgtctggtcctgtactttttttggttggtaggctattaattactgcctcaatttcagaacttgttataggtctattcagggattcaacttcttcctggcttagacttgggagggtgtatgtgtccaggaatttatctatttcttctagattttctagtttatctgcatagacgtgtttatagtattctctgatggtagtttgtatttctgtgggatcagtggtgatatccccaatatcattttttattgcatctatttgattcttctctcttttcctctttattagtgtggctagaagtctatctattttgttgattttttcaaaaaaaccagctcctggattcaatgattttttgaaggtttttttgtgtctctatctccttcagttctgctctgatcttagttatttcctgtcttctgctagcttttgaatttgtttgctgttgcttctctaattctttaattttgatgttagggtgtcaattttcaatttttcttgctttctcttgtgggcatttagtgctgtaaatttccctctaaacactgctttaagtgtgtcccagaaattctggtacgctgtgtcttcattctcattggtttcaaagaacatctttatatctgccttcatttcattatttacccagtagtcattcaggagcaggttgttcagtttccatgtatttttgtggttttgagtgtgtttcttaatcctgagttctaatttgattgcactgtggtctgagagactgtttgttatgatttccattcttttgtatttgctgaggagtgttttacttcgaattatgtaatcagttttagaataagtgtaatgtggtgctgagaagaatgtataatctgttgatttggggtggagagttctgtagatctctattaggtctgcttggtccagagctgagttcaagtcctgaatatccttgttaattttctgtctcattaatctaatattgacagtggggtgttaaagtatcccactattattgtgtgggagtctacgtctctttgtatgtctctaagaacttgctttatgaatctgggtgctcctgtattgggtgcatatgtatttaggatagttagctcttcttgctgcatttttccctttaccattatgtgatgctcttctttgtctcttttggtctttgttggtttaaagtctgttttatcagagattaggattgcaactcttgcttttttttttgctttccatttgcttggtaaatattcctccatccctttattttgagcctatgtgtgtctttgcaagtgagatgagtctcctgaatacagcatactgatgggtcttgactctttatccaatttgccagtctgtgtcttttaattggggtatttagcccatttacatttaaggttaatattgttatgtgtgaatttgatcctgtcattatgatgctagctggttgttttgcccattagttaatgcagtttcttcatagtgtcaatgttctttacaatttggtatgtttttgcagtggctagtaccagttgttcctttccatgtttagtgcttctttcaggagctcttgtaaggcaggtctgatggtgacaaaatccctcagcattcggttgtctgtaaagaatttcatttctccttcacttatgaagctttaagaggtttaattgactcacagttctgcatggctgtcccataagtcccatgttctttcctcaggaaacctacagtcatagcagaaagggaaataggcacatcttacatggcagcaggcaagagagagtgtgtgaaggaggaactgtcaaacacttataaaaccatcagctctcataagaactcactatcaggagaacagcgtgggggaaaccatccccatgatccaatcacctcccactaggtccctcccttgacatgtgggcattatggggattacgattcaaggtgagatttgagtgggaacatagagccaaaccatatcagtatctaaaaggaaaaaccttcagtttttccacatttggttatgatatcagctgtgagcttttcctatatggtctttattgtgttaagttccttctgtatctatcttgctgaaagtttttattatgaatggatatctagttttgtcaaattctttttctgtattgatcgaaataatcatgtgtttttcatctttcattctgataatgtggtatatcacattgattgatttgcccatgttgaaccatccttgcatcctagggataaataccacttgttcatgatgaatgatccttttaatgtgctgttgaatttggttggctggtgttttgttgaggatttttgtatccgtgttcatcagggatattggcctgtagttttctttcttttcttttcattttctttttctttctttttttttttttttttttttgagacagagtcttgctctgtcacccaggctggagtgcagtggtggtatgatcttggctcactacaacctccacctcctggattcaagcgattctcctgcctcagcctcctgagtagctgggactactggaacatgccatcacacccagctaatttttgtatttttttagtagagatgagttttcaccttgttggccaggctggtctcgaattcctgacctcaagtgatttgcctgcttcagcctcccaaagtgttgggattacaggcttgagccaccacacctggcctggcctgtagttttcttttctagtgttgtttttgcctggatatggtatcagggtgatgttggctaataaattgtattttgaagtgttctctcttgtattttttggaagagtttaagaaatactggtattaatacttcgttgaatgtttgatggaattcatccatgaagccattggtcctgggcttttctttgttggaaggtttttgattactagatttaatatccctatttgttgttagtctgttaaggctttctatttctttgttattcagttttggtatgttatatgtttctaggaatttatccatttcctctaggttaaccaatttgttgacacttataatagtcccttatggttctgtctgtttctgtgacatcagttgtagtgtctcctctttcatttatattttatttatatgagtcttctctctttttttcgtagtctagataaggacttgtcaattttgtttattttttcaaaaaaatcaactcttagttttgtcagttatttccaattgtttttttattctcttttttatttatttctgctctagcatttattatctcctttgttctgctacctttgggcttagttttttttttcttctttttgtagttcctggaggtgataagttgggttgtttatttcatatgtttcttctttttaaatataggcatttattgctataaatttccctattagtatgcttttactgcatcctttaagttttggtatattatcaagattttggtttcttctgtgacccaatggtcgttcaagaatgtgttgtttagtttccacatatttgtgaattttcgtgttttcttattgttattgatttgtagtttcaatccattgtggtcagaaaatatacttggtatgatattaatcttcttaaatttattatgacttgttttgtgacctgaaaggtgatctgtcctgaagaatgttttgtgtgtgcttgataattctactgttgggtggaaagttctgtatatacattttaggtccattgggtctattttattcttcagttctgttttgtccttattgattttctgttgggatgatctattcattatagagagtggagtattgaagtcaactatattatattgttatctatttctccttccatgtctgtcaatgtttgctttatatatttaggtactttcgtgttgggtacatatatatttataattattacatcttcctgttcaagtgacccttttattatataatgaccttctatgtctcatgtcacagttttttacttaaagactattttttctcatacaagtatagccacccctgctctcttttggttacagtttgcatggcataactttctccaccccttcactttcagcctatgtatgtccttaaatcaaaagtgagtctgttatcaacaacatgtagttgggtcctgtttatttttgtttcttacttcccatctctgaattgttggctttttaaaaagcccattcagttactctgtgtcttttgactggggagtttagtcaatttacacttaaagtaattattgataggttaggactttctgttgccattctgttaatagttttctgttttgtagttttcttgttcctttcctctttttctttctttgtggtttgatgatttttgcttggatgtgttttgattcttttctctttatcttctgtatatctactgtgtgggggggcggtcgggggggttaccacagggatcaaattgaacactttatagttatggcagtctgttttaagctgacaacaccttcaatcacatacagaaactctatactttactcattccccccgccacaactttatgtaatcgacgtcatattttacttccttctatattgtgtttccattgacaaatttctgtcactatagttactattactatttttgtcttttaatttataaattaatattaatagtgatttataacaatcattatagtgttacaatagtctatgtttctctttatatttacctttagcagtgaaaggattcatatgcttttgtgttactgttttttttttatttcaacttgaagaactattagcacttcttataaggcaggtctcatggtgacaaaccccctcagtttttgtttgagaaaggctttatctttgtgttcattcttaaaggacagtttttccagataaagtattgttgattggatttttttctctcagtactttgaatatatcatcccactctttcctgacctgcaaggtttctgctgagatatccactcatagtcttatggagctcccctataggtgacaattcactttcttcttactaccccaaaattctcttttgtctttgttgaaaatttaattataatgcatctcactgtagacttctgtgggtttaatgtatttggttatctttgggcttaatgaatccagatggcacttcccctccatagatttggggagttctcacctattatttctttaaataagtttcctttctctctctcttctccttttaagatttctataatgcatctatcattttgcttgatgatgtcccataagtcctctgttcttccttcactctttctcattgttctttttattccgctaactagataatttcaaatgacttgtcttcaagtttacaaattctttcttctgaatgattgagtctgctattaaagatcgctattaaattttttagttcagtcattcttcagctatattcagcaatattctttagctacaggatttttatttggttcttttttatggtttttatttctttattaaacttctaatgttgttcatgtattgttttcctcattttgttagtcgtcttcctgtatcctcttgtagctaattgagcttctttaaatgattattttgaattctttgtcaaaaatttcatgaatctccatttcttcagggttggttactggagctttattagttccctttggtgatgtcatatttgcctgattcttcatgatccacatagcctagcattggtatctgtgcattggagtgagctgacacctcttctggtctgaagttgggtactcagacaatgggcccattaccagggctttggataggtgtagctctcactgggtccttgagtgggcaggactgcctgcagaccatgatgcagtgggcctggagctgggtcaaagggctgcttcagggtccccacttgggcccacagtcagtgggcctgttatgggggcacaggtaagtgtggattcaggcaggactgtctccagaacatggtacagcaagactggagttggctcacagggttacttctgagtccacagtcaggtctagttggtgggcctgcttccagaggtggactggcatgactcccacctgtttcctaagtaggcaaaacttccccaagaccatggtagtgtggtactgaagctgctttaggtacagggctgcttcagagtccacagttgggagccctgttactggggttgccaatgggagttgctcctcccagattcctgggcagatagggatagtggtaggaccacatacaaacaactctggagctaagtccccagggtggtgggctgcttctgggtccacaaccagaactacagttgacaggcctgccgctagaatgtgggcctgccttattaaagtattcatctttgttcttgagctctaccagggtttctcaacctcctacctgaatcccaaggctcccacaaagacacttttgtccatagatcattgtcaaattattgttcctgtgggggaacaagagctagggacctcctatcccatcaactcactgataccgttctcctgatgctgcattttgaattgccctcaggtgatgctgctactcctggtctgtggaccatgctggagtagcagagcccaaatggcttcctcaacttttatgagccttttacaggaactcaaagtagaaaataacttcacttgccccagacctaataatttcctttgttcccacttcttcttggtgctttcctcctttgtgtctaccatcgtaacatccatctaaccatagttgtcttatgtagatgttggatgctgttgagaaacgcacaaagcaaattagaaggaagatatgattgacagaaattgctttttactctgtattcactttccatgtatttgtgctaatctctccatacaggtcttctttggcaatgtggattcatctgggataaaacacaatatttttaaccctccaattattgctcgatacatccgtttgcacccaactcattatagcattcgcagcactcttcgcatggagttgatgggctgtgatttaaatagtaagtgccaagtcatcccatatccttcttccctcaaccatgggtagggtgactaactgttctagttatcctgagactgggggaggggttcccggtatcaggacacaaaattgtcagtgctaaaaccagcatagtcctgggcaaacccagaaataccattcaacccagcagtcccatcactgggtatataatcaaaggaatataaatcattctgtcataaagacacatgcacgcatatgttcatttcagcactattcacaatagcaaaggcatggagtcaacctaaatgcccatcaacaacagattggataaagaaaatgtggtacatacataccatggaatactatgcagccataaaaaagaatgagatcatgtccttttcagcaacatagatgcagctagaggccattatcataaatgaactaatgcaggaacagaaaaccaaatatcatgtgttctcataagtgggagctaaacattaaatgcacatggacacaatgatggacactcaggaggggagaggttgggaggggggtgtgggttagaaggttatgtattgtgtactgcactcactacctgagtgaggggatcattcatacaccaagcctcagtgacatgcaatttacccatgcaacaaacctacccatgtacccctagaatctaaaataaaagtagaagaagaaaagaaacaaagaaaattaaagagtcacacaaagtgggaagagctggctggaaaacagatagcaataacagaattggccgggcgtggtggctcacacctgtaatcccagcactttgtgaggccaaggcgggtggatcacgaggtcaggagatcaagaccatcctggctaacatagtgaaaccccaactctactaaaaatacaaaaaattagccgggtgtggtggtgtgcgcctgtagtcccagctactcgggaggctgaggcaagagaatcgcttgaactcgggaggcagaggttgcagtgagctgagatcatgccactacactccagcctgggtgacaaagcgagactccatctcaaaaaaacaaaaacaaaacaaaacaaaacaaaaaaccaataacagaatctgtgcaaaagttaaaacctgagaaatgatattatgatgacagtagccctagaatatcagtggaagctgctcagtataactgaggctgaagcatgtccttgtgataaccttcttttttcttttctttgaggttgcagcatgccattgggaatggagagtaaagcaatatcagatgcacagattactgcttcatcctactttaccaatatgtttgccacctggtctccttcaaaagctcgacttcacctccaagggaggagtaatgcctggagacctcaggtaagaggcaacagatttactgtttaactgactcagagcagtggttggggaaaaaatcggggaaggccttgactgtttcttctgaggtatttctgtcaactgttagttctaaaaagtgtgtcaaggaagtttggttatgggcagacaaccacacaggcatttgggggaaatgatctctaattgaacctcctggaagaagaatctctatatctagtactgagctaatatctgtcaaagaattgtagaagctaaagtccattttacagataaatatcaacaattagctttctttccaggtttctcattacatcaatgaaaagtaaacatttactgcacatcttagtatccctaggatgagcctagggatacaaaggtgaattgtgaaaaattttggccctgaagttgcttagagttgaataagagagactgactagccaatagaaagtggaggctgggtgcggtggctcatgcctgtaatcccagcactttgggaggctgaggcgggccgatcacaaggtcaggagttctagatcactcttttgctgaggcaggataatcgcatgaacctgggaggcggaggttgcagtgagctgagatcatgctattgcactccagcccaggcaacagtgcctgactctgtctgaaagaggcagagagagagagagagagaaagaaaggaaagaaggaaggaagaaaaagaaagaaaggaaggaaggaaggaggccgggcagagtggctcacgcctgtaatcctagcactttgggaggcctaggtggcagatcacctgaagtcaggagttcaagaccagcctggccaacctggtgaaacctcatctctactaaaaatataaaattatctggacatggtggtgggcacctgtaaccacagctactcgggaagctgaggcaggagaatcggttgaactcgggaggcagaggttcagtgagctgagatcatgccattgcactacagcctgggtgacagagcaagactccgtctcaaaaaagaaagtagagtgagaagtgctgtggtatggttaagagggatttgggaatttctgggagtaaatggtgaccaagaggctactagtccaactctattgccctcaggtgaataatccaaaagagtggctgcaagtggacttccagaagacaatgaaagtcacaggagtaactactcagggagtaaaatctctgcttaccagcatgtatgtgaaggagttcctcatctccagcagtcaagatggccatcagtggactctcttttttcagaatggcaaagtaaaggtaagctggtctccttggaaagaaagaaagaaagaaaaaaaataccacctctcctagagcttaacataacataaaaaggttgatatatgaccaaattttcagagcaaaatttattaagtacctatggtagcaagacattgtaaaaggcattctgagagaacacagtgactttaagaaaaaggtaaaatactgagaaaagggcagagtagatccaagagttaattctcctcatcagcaccttgattcccaagcctttttgacctttaagtttagtggtccaggaagtcttcattcttaatctgggtttgctggataattcaacaaattgtcctgattaaaagacatgacataaagtcttatcaccccatgagtaatgggggaaggaatagttcctctctttggtattttttatattcttttttcaccaagaattaaccatgatgtggtccttaccaatctctctaatacagtctcttgccacttggctctttaagctccatccatactaagaaattctcaggtcactaaatacagccattatatctcataccaggcttttaaatagatactatttcttctacctggaacatttttctagctaccctctactgccactttcacctgactcattcgttaagtctcaggtaaacatcatgtccaagaagaattcccttatccatcaaggctggatgaaagacttcaccaaactggcagtttggtgaactgaagtctagacattggatattctagaagaaaaattcccatttaaaaaaggttatatctctgattagtgccacaacatgatgaactttcaaaatatgctaagtgaaggccgggcgcggtggctgatgcctgtaatcccagcactttgggaggctgaggcaggcagatcacgaggtcggtaaattgagaccatcctggctaacacagtgaaaccccatctctactaaaaatacaaaaaattagccaagcgtggtggcgggtgcctgtagtcccagctactcgggaggctgagacaggagaatggcatgaacccgggaggcagagcttgcagtgagccgagatcgcaccactgcattccaacctgggcaacagagtgagactccatctcaaaaaaaaaaaaaaaagaaaatacgctaagtgaataggccagacataaaaggatagatattatatgattctacttatatgagtgtgttagtcagggatatccaaagaaatagaaccaataggagattctgtctgtctgtctctctctctctgtctctctggatgagctaaactgttttagttcaagactgaaagcaggaaaaagctgatgttccagtccaaaggcagacaggcagcaagaatactttcttacttggggaagactcagtctttttgttctattcaggccttcaactaattggatgatgcctcccacattagggagagcaatctgctttactcagtctactgacttcgatgttaatcccattcaaaaacaccttcacagaaataaccagaataatgtttgagtaaatatctgggcaccttatgaccaagtaaagtagatacataaaattaaccatgacaagtccaccccttgtcaatgtagcacccatcatacacatctcctttatctctaagtagagacaaaaatgaggtcataattccacctaacatgatataacaaaacttggctggtattgataactaccttcttctactacccattctgtattgactttgccttcagcaagcatctcagctgattgtggttctttacctgatgaggtgacccaaacctttattcctgaagagcctgggccactagtagtcctgcatggattgggttgctgtagtttcccattgaccagaatcatagggcctggtaatactaagagacactctaagggatctattgtattccagacacactcttccatacctccattgtgaagcagtagttcagtttccttccaggaaggacaaaacgctgccccttccatgatgaacatattccaatgtaatcaacctgctgccagatagctggctgatcatcctgggaaatactgccatactgaggactctgtgtttgtctctactgctggcagattgggcacttagcagtggccatagccaggtcagccttgttgaatagaagtccatgttgctgagcccatgcatagcctctatccctgccaccatggctactttgttcatgagcccatcaggcagtgacataggtggctgagtaaaaaggatgactggtatccacagaacaggtcatcatatctactttttttttgagatggagtcttgctctgttgcccaggctggagtgcagtggcacaatctcagctcactgcaacctctgcctcccaggttcaagcatttctcgtgcctcagcctcccgagtagctgggactacaggcacgcatcaccatgcctggctaatttttgtatttttagtagagacagggtttcaccatgttggccaggctggtcttgaactcctgacttcaggtgatcctcccgccttggcttcccaaagtgctgggattacaggcgtgagccactgcacccggcccatcatatttacttgattattgaaatccttatctgctgaggtcacccttcgttgagcactcacatgggacataaatatattcacatcctttgcccattcagagagatctgtccacatacctcttccccaaatttctttgtcacctgttttctaatcatgttccttccaagtccctatctggacaaagcactgactacagcccattacttgacatataattgcacacctggccatttctccttctaagcaaagtccacaaccaggtacactgcctaaaattctgcccactgtccttcatgggtatctcagatcgggactgtccacttttgtgtagtacctgcatatcgtgcagaaccgtctgtaaaccaggcccaagactcctcttcctctgtaaactgatcatagggaactcccaatggggccataagtgcaggctgggagagagaaggcagggtagcagaaacaggcaccatggacatttgggctacttcttcatgtaatttacatgtgttttcagtacctgctcagacatgatcatgtatataccacttccatttgatgatggagtgccattgttcatacccaactttatggcttggtgggtcagataacacctagttcatgatgggcagttcaggtcacatggcaacttggtggtctgtggctaagcattcagtatctactaaggcccagtagtaggccaagagctatctcacaaaaggagaacagttattcacagaggattacaggaggatttctcactacagtagcccctgctccataggtcagggaaccaatgtgaagatcctgctagctgctcaatatatctgttccaattacgcattccaggactggggaaataaccacaagatagtctcacagatcctctgcatccactttgagatggacttgagctaaaattccattgatcatttgaccctccataagcccatactctgactggtggaccacagtgacattttgggtctcctgaaattagtgccagttcagagccattgtccagtagtccctgaaaggtctgattaattatttttcttcagtgcacatttattctgatagaaaggccatatgtccctttggggaaggctgagagaaagagtggcagtattcttggcagtgtaccagagtccttcctcaaggagactgagcctccccttcattcaaggagtgctgggtctgtaaacctgctcaagtctgggaattgattgagaggccgtgactctgtttttattattcaggttagacttttgttcacttgacctagaacttttccacttatgcagttcaagaatttggtaggcattctatctatatcacatctaggaacactataatctactagccaacaccataggtctgtgcaagtcatactattctaactgctgctttgactctgctgtcccttatggtaaccacacttaccttgcctttggcagttgagtgctgcccattggccccttccaccccaggatccaattattcccattgtatttaggttttctaattcagtgactgcaggtcctgctgtaaggtgtcacctacagagaagagtgatcacagagcccttcaaggatgctgaggttcccctcacaaatttattcctcaaagtaatagtgagatctgtgtcttctgaactctcccagtgttggtgagtatgtcttaaatgacaaattcactctagcatttcaatctcctttcttctacattaaaccagggcaagtctgaaatttctagtttgctcactgtgggccatcttttggtctgtgtttcagccaaccaattaaactgttagaggccttcctaattccctgagatgcaacattaagtccagaatctctgcttagtgggcccatgtcaataaatttggcctaatccaactttacgtgccttccaccgttatctcacatccttagtacccattcctatacatattctctggattcctgcttgtgtaaattagaaaactcaagtcatgattttggagtgtagtgcaccttgtcatgggtcaccttcatacctcacctcgcctgctgggacttgagtgtagttatagatctaataacaaagaggggtggtagggtgggtcctgaaggaatcagcattatcttgcatggcagttgcctcaggggaagccattacagtttcctcaggcagtgcagggttaatccacttagactggagtagagatactgccaccacagggctggagagaaaactttcactgacaaagaagactcatcaatatttaggagctcaatgtccccagcttaatcagggtcttccacacatacctaatccaacttgtagtgccccattctttcccaatcactgcccttgctttaacagtagacaccctgcaaagctgggagtttggcttgctttgtaattcagttagtcacaggatgagatttggcatttgattttcagcaatctcagctctgtggctacagtagataagggtctccttcagggcatacatagaatctgtcaagtcatttatgcagctcttgagctgggaattcaaattcctgagctcctccttttctttcatcactttttccagcaacattaggagcaaccgactaatcccatcatattcattagtttgacaaatatgttcacaagtgtcaatatacatagtcaccaagacccttgcttcttaaaagtagttgattaggagtatccaatggagatattttgcatatacatattttttgagatggagtctcgctctgtcacccaggccggagtgcagtggcatgatctcagctcactgcaacctccatctcccaggttcaagcgattatcatgcctcagcctcccgagtagttgggattacaggcacctgcctaatttttgtgtttttagtagagacagggtttcatcatgttggccaggctggtctcgaactcctgacctcaggtgatccatccacctcggcctcccaaagtgctgggattacaggcgtgagccaccgcgcccagcctggcctacatatttctattgccagatcatgccatggacaatttttactactgaaaatagtcattagtgtctttaaatttcatcaggttacagaaccaattccagaaatccaataacaaatttataaaatttatccttaaaattctgttcctttagaatcactcttggtgtgaaaatctgtattagtcatggttcccaaagaaacaaaaccagaaccaagaggagatacatacacacacacacacacacacacacacacaaggaattagctcatgtgattatggagtctgccaagtctcaagatctgcagggtgagttggcagcctagagaccccagagagctgattcgtagttccagttcaaagaccagcaggctacagacccagaaagagttaaaatgttttagttcgagcccaaaggcaggaaaaaaactgaagtcccagtttaaaggtagtcaaatagaaggaactgtctcttactaagaggacagtaagcctttttgttatatttaggccttcaactgattggataagttctacccacactggggagaacaatctgctttacttagtctaccaattcaaatgttaatctcaccaaaaaacactctcacagacacacataaaataaagtttaatcaaatatatgggcaccccatggcccagtcaagttgacacataaaattaaccaccataatgaggtatctagagcaggcaaattcataaagacagaaagtagaaaagaggttaccagggtcttggaatggggaagaaatggagagttatttttaatgagtacagagtttctgtttggggtgatgaaaaagttctggaaatggatagtggtaatgggtgcacaatattgtgagtatacttaataccactaaattgtacacttaaaaatgattaaaatggtaaattttatgtatattgtacaacaataaaaaaggctatatcactgacaatgcattgttgtatttagcaaagaaaggggaatctccagcctccccatcaacaaaaacccccacaaacttctattttaaaataatgagctgaaatcatagcggagaggtgaataatgagcaaatataaaaaggaagacctttcctcagacagaatgcccatattaatgttgttactggaagactaagccttgagcaaaatgcaaggagaactcagtgtgagaattctgcattgtcatgaatcccagaaggaagctagagaagttgcagataaatattatcctctggcacctggaagaaccattctcaacctactctagaaaaaaagcacctccagtttaggcctccaggattcctacatattaaaattataagatcacagacatagatcagcaaacatgcaagacaacaagacaacttgagtacaagtgaacagaaacaatcaattcagatttaaaacttgaagaacaccagatattgacattatcggatacataatatgaaataattatgtataaaatctttaaagtaataacatatggaaacatgaaaataaaagacaaattatccaacattattaggcagttgaaaaaaaccattgcaggttacaaagtcaacatgcaaaaatcaattgtatttttatatactaacaattacaaatatgaaaaggaaaacagaaaagtctatttacaatagcatcaaagataatacaatatttaggaataaatttaacgaaggaggtgcaagtcttgtccactaaaaacaaaaaaacccagttgaaagaaactaaagaactgtctggtctgaagacagcaaatatggaaaattagcaactagaaaaaaattaaaaattaaaaattaaaagagaaattaaataactaaataaatgaaaaggcatcctggatttatggatttgaagacataatattcttaagataagaatattaccacaaaccatttgcagattcaaagcaagcattctgggtttttttgtttgtttgtttgttttttgatttgagacggagtctcactctgtcgctcaggctgcagtgtggtggtgcaatctccactcaccataacctctgcttcctgggctcaagcgattctccggcctcaaagcattctctatcagaatcccaaagacatttttttttttgaggaatagaaaaatctatcctaaaattcagatggaatttcaagggaccctgaatagccaaaacaatcttgaaaaagaacaacgttggaggagtcatacttcccaatttcagaacttactacaaagctacaagaatcaaaacagggcagtacttacataaatatagacacatagatcaatggaatagaattgagagtccagaaataagcctatacatctatggtcaattgattttcaataaaagtgccaagaccattttgtgggaaaagaatagtctcttcaacaaatggtgctgggacaattggatatccacatgcaaaagaatgaagttggatctttaccatatacaaaatttaactcaaggctggatgtggtggctcacatctgtaatcccagcactttgggaggctaaggctggtggatcacttgagctcaggagtttgagaccagcctgggcaacacagtgagactctgtatctacaaaacaagaaaaaaaaattagctggcatgatggtacacacctgtagtcccagctactagggaagctgggataggaggatcgcttgagcccaggaggtggaggctgcagtgagccatgatcgcaccactgcactccagcctgggtgtcagagcaagaccctgtctgtaaaaaatcatttaactaaaaatgtatcaaaaaactaaatataaaagctaaaaccataaaactgtaagaaaaaacaaagaggtaaattgttatgatactggatttggcaatggtttcttagatgtgacaccacaatcacaagcaacaactctataaaaatatatatagtaggcatctttaaagttaaaagcttttgtacatcaaagaacactatcaagaaagtaaaaagatgatctacagtataggagaaaaaaattgcaaatcatatatctgataaagggcctagtatcccagaatataaaaagaactcttacaactcaacaacagaaagacaaccaaattttaaaatgggtaaaggacttcaatggaacttctccaaagaagatatacaaggatccaacaaactcatgaaaagatagacaacatcattagttattagggaaatgcaaatcaaaaccacaatgagatagcatttcaaacctgctaggatggctaaattaaaaaaaaaacaaaaacaaaatgtcaagcgggaaaataacaagtgttagcaagaatataaagaaattggaaccttccttgatgatgagaatgtgaaatagggcagccactgtagaaaatattttggcagttcctcagtaaggaaaacatagaattaacatagacccagcaattctactcctgggtgtggacccaaaagaattaaaagcaggcactctaacaaaaactaatatacaaatgcatatagaagtactattcataatagcaaacaggtgaaaacaattcaaatgttcatcaagtgatgaacagataaacaaaatgtggtctatccatatatggactattatttattcataaaaaatcaaagtactgatccatgctaaaacatggatgctccttgaaagcattatgctaagtgaaagcagccaggcacaaaaggccacattccacttatatgaaatacccagaatagcaaatccatagagacagaaaacagattagtggttgccagaagctggcagaaggagtgaatgtggagtggcttcttaataagtattgaatctccttttggggttatagaaatgttctggaactagatagtggtgatggctatataacattgtgaatgtactaaatggcactgaacttcacactttaaaattgttaaaatggtaaattttatgtttgcgaattttgcaatagataagtcagaagacatgtacattaccataatgagtaacaaactgacagctgatttctaaataatagcaaatatcagaaaataatgaatgatgtcttcacaatgctaaaataaacaatgtgaacccctctctcaaaaagaaaacctaatgaaaatatcttttatgcgttaaagcaaaagaggaaattaggacacagacaggcacagagggacgaccacatgaagatatagaaagaggacagacacctacaagccaacgagagaggccttacaagaaaccaacccttagccaggtgtggtagtgtgcacttgtagttcttgttacaagggtgcagtgagctagggttgtgccactgcactccagcctgggaaacagaacaagaccctgcctctaaaaaaaaaaataaagagaaggagaagaagaagaaaaggaaaagaaaaaaaaaaagaaccaagcctgctggccaggcgtggtaactcatgcctgtaatcccagcactttggaaggctgaggcaggaagatcatctgaggtcaggagttcaagaccagcctgcccaacatggtgaaacccccctctactaaaaatacaaaaattagctggacatgctggcatgcgcttgtaatcccagctactcgggaggctgaggcacaagaattgcttgagcccaggaggcagaagttgcagtgagcccagatcgcgccatcacattccagcctggactacagagggagactccatctcaaaaaacaaacagacaaaaaaaaaatacacacacacacacacacacacacacacacacacacaaaacaagcctgcctaccccttgatcttggacttgtagcctccagaactgtgagaaaataaatttctattgtttaagccaggtgtgcgtgtgaaaatttagaacatatgacaacagcaaaaaagtcagcatgtggataaatagaataaaggattctaaaatccatgtattatctaggaggtaaagatgttaatattaaaccttcataatttgattaatgttgtagtttataggatagccagtaagtaatagaaatacacacaatgtaagactcccaaaatggtagaagaaaaaatatgaaaggataaaatatactcaacaaacctaaatgaaagcaagcaaagagagataaagaaacataaaacaggtaggaaaaatagcaagataagatggtatatttaaattgaaatataacagtaatcatatgtaatatgaatggaccaaatatttcagttaaaagacaaagattgtcagattgataaaaaagcaaaagtagctgggtgtgatggctcacacctgtagtcccagctacttaggatgctgatgtgggaggatcacttgagcccaggaggttcagcctggacaagatagtgagacttgtctctttaaaaaaaaaaaaaaaaagcaaaagtaaattgtgtgcattttatgagtcatatctaaaacattagatacagaaaagtagcaagacaaaaatgggaaaagaaattatgcaaatatctaaaagatatcgattacagctctattgatagcagaaaaatagactttaaagcaagaaagtattgctgaagattaagaatgtgatttcatggctggacgcggtggctcacacctgtaatcccagcactttgggaggccgaggcaggtggatcatgaggtcaggaaattgagaccatcctggctaacatggtgaaaccccgtctctactaaaaaaaaatacaaaaattagccgggtgtggtggcggacacctgtagtcccagttactcaggagggtgaggcaggagaatggcgtgaactcgggaggctagattttaacacatctctcgtcaattgatggaacaatgtatagaaatagaacaattaacatgattcacaagtttgatcttatagacatatttagaaaatagcaccttgaaattgcaaaattacaagggtggttccaacatggccgaataggaacagctccagtctacagctcccagcatgaatgacacagaagacaggtgatttctgcatttccaactaaggtaccaggttaatctcactgtggcttgtcggacagtgggtgcaggacagtgggtgcagcccaccgagcatgagccgaagcagggtaaggtatcacctcacccgggaagcacaaggggtcagggaattccctttcctagccaagggaagctgtgacagatggcacctggaaaattgggtcactcccatcctaatactgcgcttttccaatggtcttagcaaacggcacaccaggagattatatcctgcacctggctcagagggtcccacacccacggagcctcgctcattgctagcacagcagtctgagatcaaactgcaaggtggctgcaaggcagggagaggggcacccgccattgctgaggcttgagtaggtaaacaaagcggccaggaagctcgaacttggtggagcccaccgcagctcaaggaggcctgcctgcctctgtacgctccacctttgggggcagggcaaagacaaacaaaaagacagcagtaacctctgcagacttaaatgtccctgtctgacagctttgaagagagtagtggttctcccagcacagagtttgtgatctgagaacggacagactgcctcctcaagtgggtccctgacccccgagtagcctaactgggaggcacgccccagtaggggcagactgacacctcacacagctgggtacccctctgagaccaagcttccagaggaacgatcaggcagcaacatttgctgttcagcaatattcgctcttctgcagcctctgctgctgatacccaggcaaacagggtctggagcggacctccagcaaactccaacagacctgcagctgagggtcctgtctgttagaaggaaaactaacaaacagaaaggacatccacaccaaaaccccatctgtacatcaccatcatcaaagaccaaaggtagataaaaccacaaagatggggaaaaaacagagcagaaaagctgaaaattctaaaaatcagagtacctctcctactccaaaggaacgcagctcctcgccagcaacggaacaaagctggacagaaaatgactttgacgagttgagagaagaaggcttcagatgatcaaacttctctgagctaaaggaggaagttcgaacccatcacaaagaagctaaaaaccttgaaaaaaaaggttagatgaatggctaactagaataaccagtatagagaagtccttaaatgacctgatggagctgaaaaccatggcacgagaactatgtgacgaatgcataagctttagtagccgatgcgatcaactggaagaaagggtatcagtgattgaagatcaaatgaatgaaatgaagcgagaagagaagtttagagaaaaaagaataaaaagaaatgaacaaagcctccaagaaatatgggactatgtgaaaagaccaaatctatgtctgattagtgtacctgaaagtgacagggagaatggaaccaagttggaaaacactctgcaggatattatccaggagaacttccccaacctagcaaggcaggccaacattcaaattcaggaaatacagagaacgccacaaagatactccttgagaagagcaactccaagacacataactgtcagattcaccaaagttgaaatgaaggaaaaaatgttaagggcagccagacagaaagttcgggttacccgcaaagggaagcccatcagactaacagctgatctcttggcagaaactctacaagccagaagagagtgggggccaatattcaacattcttaaagaaaagaattttcaacccagaatttcatatccagccaaactaagcttcataagtgaaggagaaataaaatcctttacagacaagcaaatgctgagagattttgtcaccaccaggcttgccctacaagagctcctgaaggaagcactaaacatagaaaggaacaaccggtaccagccactgcaaaaacatcccaaattgtaaagaccatcgatgctaggaagaaactgcatcaactaatgagcaaaataaccagctaacatcataatgacaggatcaaattcacacataacaatattaaccttaaacataaatgggctaactgctccaattaaaagacacagactggcacattggataaagagtcaagacccatcagtgtgctgtattcaggagacccatctcacatgcagagactcacataggctcgaaataaagggatggaggaagatctaccaagcaaatggaaaacaaaaaaagaaaagcaggggttgcaatcctagtctctgataaaacagactttaaaccaacaaagatcaaaagagacaaggccattacataatggtaaagggatcaattcaacaagaagagctaactatccaaaatatatatgcacccaatacaggagcacccagattcataaagcaagtccttagagacctacaaagagacttagactcccacacaataataatgggagactttaacaccccactgtcaacattagacagttcaacgagacagaaagttaacaaggatatccaggaattgaactcagctctgcagcaagcggacctaatagacatctacagaactctccatcccaaatcaacagaatatacattcttctcagcaccacatccaaaactgaccacatagttggaagtaaagcactcctcagcaaatgtaaaagaacagaaattataacaaactgtctctcaggccacagtgcaatcaaactagaactcaggattaagaaactcattcaaaaccgctcaactacatggaaactgaacaacctgctcctgaatgactactgggtacatagcgaaatgaaggcagaaataaagatgttctttgaaaccaatgagaacaaagacacaatataccagaatctctgggacacatttaaagcagtgtgtagaggaaaatttatagcactaagtgcccacaggagaaagcaggaaagatcaaaaattgacaccctaacatcacaatttaaagaactagagaagcaagagcaaacacattcaaaagctggcagaaggcaagaaataactaagatcagagcagaactgaaggagatagagacacaaaaaaccctttaaaaaatcaatgaatccaggaactggttttttgaaaagatcaacaaaattgatagaacactagcaagactaataaagaagaaaagagagaagaatcaaatagacgcaataaaaaatgataaaggggatatcaccaccaatcccacagaaatacaaactaccatcagagaatactataaacacctctatgtaaataaactagaaaatctagaagaaatggataaattcctggacacatacaccctcccaagactaaaccaggaagaagttgaatccctgaatagaccaataacaggctctgaaattgaggcaataattaatagcttaccaaccaaaaaaagtccaggaccagacggattcacactcaaattctaccagaactacaaggaggagctggtaccattccttctgaaactattccaatcaatagaaaaagatggaatcctccctaactcattttatgaggccagcatcatcctgataccaaagcctggcagagaaacaacaaaaaaagagaattttagaccaatatccctgatgaacattgatgcaaaaatcctcaataaaatactggcaaaccaaatccagcagcacatcaaaaagcttatccaccatgatcaagtgggcttcatctctgggatgcaaggctggttcaacatacgaaaatcaataaacgtaatccagcatataaacagaaccaaagacaaaaaccacatgattatctcaatagatgcagaaaaggcctttgacaaaattcaacaacacttcatgctaaaaactctcaataaattaggtattgatgggacgtatctcaaaataataagagctatttatgacaaacccacagccaatatcatactgaatgggcaaaaactggaagcattccctttgaaaactggcacaagacagggatgccctctctcaccactcctattcaacatagtgttggaagttctggccagggcaatcaggcaggagaaagaaataaagggtattcaattaggaaaagaggaagtcaaattgtccctgttcgcagacgacatgattgtatatctagaaaacaccattgtctcagcccaaaatctccttatgctgataagcaacttcagcaaagtctcaggatacaaaatcaatgtgcaaaaatcacaagcattcttatacaccaacaacagacaaacagagagccaaatcatgagtgaactcccattcacaattgcttcaaagagaataaaatacctaggaatccaacttacaagggatatgaaggacctcttcaaggagaactacaaaccactgctcaatgaaataaaaggggatacaaacaaatggaagaacattccatgctcatgggtaggaagaatcaatattgtgaaaatggccatactgcccaaggtattttatagattcaatgccatccccatcatgctaccaatgactttctttacagaattctaaaaaactattttaaagttcatttggaaccaaaaaagagcccgcattgccaagtcaatcctaagccaaaagaacaaagctggaggcatcacgctacctgacttcaaactatactacacggctacagtaaccaaaacagcatggtactggtaccaaaacagagatatagaccaatggaacagaacagagccctcagaagtaataccacacatctacaaccatctgatctttgacaaacctgacaaaaacaagaaatggggaaaggattccctattgaataaatggtgctgggaaaactggctagccatatgtagaaagctgaaactggatcccttccttacaccttatacaaaaattaattcaagatggattaaagacttaaatgttagacctaaaaccataaaaaccctagaagaaaacctaggcaataccattcaggacataggcatgggcaagaacttcatgtctaaaacaccaaaagcaatggcaacaaaagccaaaattgacaaatgggatctaatgaaactaaagagcttccgcacagcaaaagaaactaccatcccagtgaacaggcgagctacaaattgggagaaaatgtttgcaatctattcatctgacaaagggctaatatccagaatctacgaagaactcaaacaaacttacaagaaaaaaagaccccatcaaaaagtgggtgaaggatataaacagacacttctcaaaagaagacatttatgcagccaacagatacatgaaaaaatgctcatcatcactggccatcagagaaatgcaaatcaaaaccacagtgagataccatctcacaccagttagaatggcgatcattaaaaagtcaggaaacaacaggtgctggagaggatgtggagaaataggaacgcttttacactgttggtgggactgtaaactagttcaacaattgtggaagacagtgtggcgattcctcaaggatctagaactagaaataccatttgacccagccatcccattactgggtatgtacccaaaggattataaatcatgctgctataaagacacatgcacacgtatgtttattgcggcactattcacaatagcaaagacttggaaccaacccaaatgtccatcaatgatagactggattaagaaaatgtggcacatatacaccatggaatactatgcagccataaaaaggatctgttcatgtcctttgtagggacatggatgaagctggaaaccatcattctcaaaaactatcacaaggacaaaaaaccaaacaccgcatgttctcactcgtaggtgggaattgaacaataagaacacttggacacaggtaggggaacatcacacaccggggcctgtcatggggtgggtggacaggggagggatagcattaggagatatacctaatgtaaatgacgagttaatgggtgcagcacaccaacatggcacatgtatacatatgtaacaaacctgcacgttgtgcacatgtaccctagaacttacagtataataaaaaaaaagaaattgcaaaattacacattctttgtaagcacacaaaggaaacatgttagaattttccattttaagctacaaataagctacaaataaagtagtctcaaatttcagataatataaaacatgttttctggtcacaatacaattaaagttgatataaataagaaagataactataaaatcttcctatgttagaatcaagaactatacttttaaacccatgtgtcaaataagaaatcataaattagaaaatattttaaactgaatgataacaaggcatgacatattaaaatgtgggaatcagctaaagcaatatttagaaagaaatgtatagcgttaaaaacatatattggaagagaagaaagcctgacaattaatgagctaaggtatgtctcaagaagctagtgaaacagcaaaataaaccaaaaggaagtagaagcaaggaaataataaagatatgaagtaaatgaagtaaaaaagaaacatacaatagagagaataaagaaaaccaaaagttggttccttgaaaattgacaaacttctggcaagagcaatcaagatgaaaagaaggcacaaataatatcagaaactttaaaaaactggacatcaataaagatcccacaaaaatttctgccaatataaaaatataaaaaatgaggatacttattaatattaaatgttctttcttgttgtatttaccagggattaatccattttacctaattttccaaacttagtgttaaaaggttattaatttaaaaaatccagatccagatggctacactaactatattctaccaatttttcaaaggagaaataatattaaccttgcaaaaattctttcagaaaatggaaaaagatggaatgttattcaattatcttatgataatagcataaccttgacaaccaaaccgaacaagaacaatattagaaaggaagataataggcccgttttattcataaacataaatcccaaacaaaatattagcaatatggatccaaattggatttatgctaggaatgcaagtttggcttatacattagaaaactgatataatttatcacagtgacagactgaaggattatacatattggctgtcctaagcagtgcaataagatgagaaaaagaaggaaaatatgtaaggattgaatatgatgaaacaaactcattgtatgtggaagatatgatggcatagatagaaaatccaaaggaatttatatataaattattagaatttttaaaatttttcaagcttgctgaaaacaaaataaataccaaaattaattgtatttctgtatacctgaaacagttggaaaaatagttttaaatagcatttaaaaattccaagcaggagttgcacattcctgtcagataatggcagctgcctaaatctctccacagtcttcaaaaaccatacatacacatacacacacaattttaaattatgactaaaaccacccataacccatctatagaataaccagaagacaaaaagtactataagtttatatttacaagtagaaaataaatatataaatctagccaaccttgctccagagagaaaccctgtctcaaaaaaaaaaaaaaaaaaaaaaagaagaaagcaaatgttggaaattaactgtcctataaaaacaaaagtgaattactaaatcacaagacccacaaacctctttggtcacatctattaaataaattacacttccatttatcaacagtagagggtactcctggctaagaaacctagtaagccacccagccctcatgtctgcctgcataaatcacctcttattgctgaaacaagaaaatgtaaggaatttctaaatgaacagaaaatagcatatgaagcagatggtattaatgttcttgagtttttattccctctttccttgaaaacctcatcaactttaggcatggccgtacggctcatcttgatcaatagaatgtgattggacatgacatatataccacttccaaatagaagctttaaatgtgattttgtgtttgacacactcttttgtgcctctgctccaggctccagactttaagcctctagaacgataagtgaataaatttcttttgttttaaaggcaccaagtgtgtggtgaatttgttacagtagccctagaaatctaatactaacaaaaagaatgttagagttgaattagaagtgtcagtgagaacttaggaatttaaaaaatcatattcttagcactgttcactgagggaatctagaagtaattacactgcagtaataacgagcccatcccatgcccaaatcttggtctctaactaccattttccagtcaaaagaatctgagctccctagagaaatgactttttcaaggctggatcaaggaaactgccaggcaatcttagatgatcttggtgatcttgatgtgccagaagattaatgggatcatgtgaaaagaacacagaaactggtctgaagggcttcctgttggccagatttgagacaatttgagcatcaaaaggaataatgagggtaatggatcataactggaaaatcagtttgcaaccatcaatgtacttactattgaatacttgtaaagaactttaagggttgctaataccattggataaaagcttgttgtgaaacagaatatttgcatggtctcaaagtctcactccacagattgttaggaaagggaaagggttacctttataaatatagagattaggtggacatcttaaccaagtgatcaaacttagcatcatcaataatgggacaatctggcatcgcatgccccctgatttaatgcagtaaggattaagtctaacaaaagatgtacaaagcctccaaatacagcgtaaacatttgtaaaataatctcagaacagggaccttaatgtttctcaaaaatttttccaaatacagaactttatttctatagatgtttatggtatatttgccatgctatatacattatgctatatattctatgtgctgaagatacaacaatgaccaaggtctttgcccttgtggaactgacatttggtggcggagacagaggaaacagtcaataagcatgtaaagagataaaggaaaagatactgaatgctacaaaggaaacaaataagttgagatttagaacaaaaaagagtcctattttacaagaggaataatgaggaagacctttctaaagaggtagctcagcactttgggaggccgaggcgggtggatcacgaggtcaggagatcaagaccatcctggctaacacagtgaaaccccatctctactaaaaatacaaaaaatgagccgggcatggtggcgggcacctgtagtcccagctacttgggaggctgaggcaggagaatggcgtgaacccgggaggcggagcttgcagtgagccgagatggtgccactgcactccagcctgggcgacagagcgagactccgtctcaaaaaaaaaaaaaaaaattgaggcagaatttcgctatgttgcctaggcttgtctcaaactcctgggctcaagcaatcctcctgcctcagcctgctgagtagctgggactccaggggcatgccactatgcttagtttaagaggtggtatttaaactgagacccgaagggtaaaaaacatggataaaagaagaaacagaaggggtaagagccttccaagcagagggaatcacatatacaaaggctctcatgttaaataaaacaagagttgacattgttgagaaactgaaagatcagctcatctgcgatgcggtaaaataggaggaatgcagtgggagaacagatcagagacttgggcaggggctatattaggcagaacttggagaccagagtaagggggccaaggtgggaacagaccgattaaattggcatctcttgggggggtgggggggtggggaacttacccatgcatcattttttaaaagctccaaaggcgattccaataagcagccagggttgggaacctagggggaaaatgtagctagatgaatgaagatggcccaaacgtcttttgttctgatagctaaactctctgtaggatcacagtgttacttcacagtgcatttgccaggaaaagtctcttcccatttggaatccgaagtaaaactgacaccacacttgaagatgccaggattgttagaggaaaatgtcacccaatagctccaggaagcaggagccctactgttgctgtttaaccacttctttcccattttggtggcaagttgcctccttttacacaaactgcctcaggagatcctaaagatatcatggtgtctgtctgtccttgcaagagcatgcattatggtaggacattgccttcattctgttcctttttctccaagactcttgcttattctcaccatttggctggactttctactgtaggattacctcggaatccacacaaaacccacagggtttcagagttgccttgaattacacgttttgaacattcagatcttcattttcccaaacatccacccagttataggtgacctttgctccaaagtcctggagtagcaaggtgccttgagtcttagactcttcccacttctttctctcttctgcatcccctcctgccaaggttgcccagccacactaaattgcatgccttgctgtgttgcattcgttatcattctaaagttgtcaccaacatgtgcgaaaccagtttatctaataacgatagctaccattttctgagctcttgccatgtactcctcttgccacagcaaatgcattgacaagggagtctgctggccaaagcctgactctcatctccagatggtccaacacagatgctgtgtgtgacccaggacaaagcacttaatgtcactgaggtttgggaagtgggtgagaacactgtagatataaggcctagctagagtgaaggcctccaaagcagggtgctcttaattctagatgtcccagatgcgtaggacagagtcatctagtcatcttccagggtttaatcctggactactggaaacaactagaagtgagaaaagcgtctgtgctttgcagtgaccattgtcctgtcagacaaccaataaatgctatctttcctctttcaggtttttcagggaaatcaagactccttcacacctgtggtgaactctctagacccaccgttactgactcgctaccttcgaattcacccccagagttgggtgcaccagattgccctgaggatggaggttctgggctgcgaggcacaggacctctactgagggtggccactgcagcacctgccactgccgtcacctctccctcctcagctccagggcagtgtccctccctggcttgccttctacctttgtgctaaatcctagcagacactgccttgaagcctcctgaattaactatcatcagtcctgcatttctttggtggggggccaggagggtgcatccaatttaacttaactcttacctattttctgcagctgctcccagattactccttccttccaatataactaggcaaaaagaagtgaggagaaacctgcatgaaagcattcttccctgaaaagttaggcctctcagagtcaccacttcctctgttgtagaaaaactatgtgatgaaactttgaaaaagatatttatgatgttaacatttcaggttaagcctcatacgtttaaaataaaactctcagttgtttattatcctgatcaagcatggaacaaagcatgtttcaggatcagatcaatacaatcttggagtcaaaaggcaaatcatttggacaatctgcaaaatggagagaatacaataactactacagtaaagtctgtttctgcttccttacacatagatataattatgttatttagtcattatgaggggcacattcttatctccaaaactagcattcttaaactgagaattatagatggggttcaagaatccctaagtcccctgaaattatataaggcattctgtataaatgcaaatgtgcatttttctgacgagtgtccatagatataaagccatttggtcttaattctgaccaataaaaaaataagtcaggaggatgcaattgttgaaagctttgaaataaaataacaatgtcttcttgaaatttgtgatggccaagaaagaaaatgatgatgacattaggcttctaaaggacatacatttaatatttctgtggaaatatgaggaaaatccatggttatctgagataggagatacaaactttgtaattctaataatgcactcagtttactctctccctctactaatttcctgctgaaaataacacaacaaaaatgtaacaggggaaattatataccgtgactgaaaactagagtcctacttacatagttgaaatatcaaggaggtcagaagaaaattggactggtgaaaacagaaaaaacactccagtctgccatatcaccacacaataggatcccccttcttgccctccacccccataagattgtgaagggtttactgctccttccatctgcctgaccccttcactatgactacacagaatctcctgatagtaaagggggctggagacaaggataagttatagagcagttggaggaagcatccaaagattgcaacccagggcaaatggaaaacaggagatcctaatatgaaagaaaaatggatcccaatctgagaaaaggcaaaagaatggctacttttttctatgctggagtattttctaataatcctgcttgacccttatctgacctctttggaaactataacatagctgtcacagtatagtcacaatccacaaatgatgcaggtgcaaatggtttatagccctgtgaagttcttaaagtttagaggctaacttacagaaatgaataagttgttttgttttatagcccggtagaggagttaaccccaaaggtgatatggttttatttcctgttatgtttaacttgataatcttattttggcattcttttcccattgactatatacatctctatttctcaaatgttcatggaactagctcttttattttcctgctggtttcttcagtaatgagttaaataaaacattgacacatacaaacaaatgcctttgagaattgtgtttttacactggaaataaaaatgtgaacactgatttttaaaacaaataggggcactgaatagcaagatggacactctagaaaaccaaattagtgagttagaaaaccagattaaattgaactcagagtaaaaatgatataattcatgagagtctgaataaaataaatcagaaatggagcctcaatccaggagaacagcttatatggagagagagagactgagagagaaatgggagtttctgttcaatgggcataaagtttcagctatgctgctgggcacagtggctcatgcctgtaatcctggcactttgggaggccaaggcgggcggatcacctgaggtcgggagttcaagaccagcctagccaacatggcgaaatcccgtcgctaataaaaatataaaaattagttgggcatggtggcacatgcctgtagtcccagctacttgggaggttgaggcacaagaatcgcttgaacccgggaggcgggtggaggttgcagtgagccaagatcgtgccgttgcattccatcagcctgggcaacagagtgagactccatctcaaaaaaaaaaaagtttcagttatgcaagatgaattaagttctacagatctaatgtacaacattgtgcatatagctaacgataccatactgggcacttaaaaatttgttaagagagcagataccacgttgtgttcttactacagttttacaacaatgcaaaaatgcattgtaaacactatgtgcaaatagaatagcaaagaatgtatacagtgcccatgagcataacattctagtggacccacaatgcatcagagttcagtgagactcaaagggagaagaatgttggcaaagtcagtggggaggagaaaatgagtgtgatgaaataggcggtctcattaaacttcccttacaaaacacaagatcaaagataaaattattaagaatttcgagacagtgacatcagagcaaacgaaacatagggcccctcagggtgtggggccctgtagacctgcatagatcaaactcccatgaagccaatcctgagtcccaggcaagctgggacttttggtcatcctagcaatagtcatgtgagtgcaccatcttggaagtagatcctccagtacagtcaagctttcagatgactgcagtcccagcagatacatgactccaatctcatcatccactccaaaactaacctacagaaactataaggtaataaatgttttcttcacagttgctaagttggaggtcatttttcattcagctaaagttaacttatatgacagccatattctttttacaatggaaaagtcagacaggcatacaatgctcattttcagcttattcacattgtcactattttgtggggttacctggtgggcacaggacagtgaccaagtttgcaggtcctccagctcctgctggatcttttagcttctccaaatcctagaaaagttgtgtgtttagctctttcagaaaacacctgaccttctcatgcatgttactccaccatcgaagttagaagcttggagataacatgagactgatgcaggttttagtccatttcatgggctcttctcttttcaggcttccagtgtatacttgctttctccacttcacctcacctttccttccacagaaaggtcagggtatggagctcatatgagggtttagaggaatttggctcaagggccagggccagcttcctccagtgtttcgggtcacaacctagatacacctttatcagcgcctgggaatgttcaaggtcctaattttcattcaggcctgttggctgggtcacagaatgatcaagccactccatgattttctagcatgacacagcaagaaactgggggagactggaggactctacaaaaactttcattttatgtatttcctggtagctctgttttctgatagaacctaactgagataccatttttgccagttcttctatggataagtattatttttttaatttttttaatattttattttttgtagagacagtatcctgctatgttgcctcgacttgatttgcattttttttttttactttaagttctgggatacatgtgcagaacatgcatgtttgttacgtaggtatacatgtgccacggtggttgggtgcacccatcaacccatcatctaggttttaagcccctcatgtcccccaggctggagtgcagtggcatgatcatagctcactgcagcctcaatctcccaggctcaagccaggctactgcctcagcctcccgagtagctgggactacaggcatgcaccaccacacccagctaatttttaaattttttgtagagacaggatctcgctatgttgctcaggctggtctcgaactcctgggctcaagctatcctcctgtctcagcctcccaaagtgctgggatgacaggcgtctgccactgtgcctagccagtactatttctttttaattagtttgtaagagttctttgtacgttaacaatcttaattgaatgtctgtcgtatatgctgtgaaattacttaatttgtcattaaccttttatcttttttaaacaatgttttgctatatgaaagctttacatttttatgttataaatttatcagcattttcatttatggctttgggttttatgacatgcttagagtagctttttctgcaccaagattataaaaatatccacacatagaattttctatcataaaagtatgacagaaaatgtcatattttgtatataattttattttttgtttagtcctggatccatctagaatttctattttgcatagcatggcaaagggctcacacccaacatcatattaaataaggtctttttccctgatatgaaatgccacatatatatgttattataatgcatagttagataccatgtggtgaataaaatatcttagaattattcaagcctaagaggatagaactactgcaaggatgggttttggtatcaacacagatgtttatacatagagagaaaatgatgtctgtgtgcttagctgtcaaataaggagactgggggagggttaaatgtaatcagtgatatcataaggagtggtggaattctgtttggaacttcagagacctaaggagaagactgaccagcttcttctgaagacttctgccctctaaagactaaggcctaattccactggtttctttgaattccgtggtcctaagtccattttcaggtaagtggtttcccgctggatgtgggtctctttaagccgtatcaaacagtaggtgagtgtatcagttataaatgtcttaagtaataggaggcccaaattataatggctcaaataaaagtatatttttctcataccatgcagtccagaagtaagcagatacaggtgttagtttagtggcttgaaattatcagagcaacttcaggcaacatttcttaagcaatattcaaggcagcataaagggaaaatggtagcaccatctcttttatcaagacagcaaaaagccttcccaaaagctatccatcagatttcccttatgtttcattatccagagctatgtcacatagccatgcctaacttcaaggatggctaagaaagggaggattcagctttttcagcttatctagttggatgtagtaaatgaaaaatgggtgggaacaatatctgccaaaagtcgccattcattcaaaaaatatttattgagcacctggataccctatgtgctaggtactgtttagcagtgaacaaaacagacaaaaatccctgcactcatagagcttacattatattcaggagatacatataataaagtaaagtaaaatatattctactaggttctgatgaggttctggagaaaaatcaagcaggtaagacaattaggaagtttgtaggagggtggtacaattttaacaatgggatctaaggaaaatcctcattgagaaggtgatatttgagtacctgacagaggtgaggaaataaattctgagaatacctgggggaaaagcattccctggaaagggaaaagcaagttaaaaagccccaaggtaggaacatgcctagcttgttcaaaatgaaatgaggctaagttggagtgatgatcaagaggagactcataggatatgtggtcagcagtaactaggacataatctgacctacaacctaccaagatctctttggccactcactggagaagaggcttaagggaggcaaggacggaagcagaaagacagagatgatggtgggtagcagtggaggtggtgtgaagtggcaggattctggatacgttttgtaagtaaaggtgactagacttttctgatggataaagtgtatgagagaaaaagaagagtcattactatatatgtaaatctaagcaaacatttactttttaaagcaatttaaagtttgttacttgaatatataaaatatatcatggagttaaaaatatatagaaatttattatatttggtatctaaagtagtcaaattcatagaaacaaaaatgaggagctgtttagagtttcagttttccaagttgaaaaagttctagagatctgttgcacaacaatgtgaatgtacctttttcagcctgaacaggtgaaagagtttctactaattgagttggggaagattgaaaaggtatcaggtgtaggaaggaatgtccggtatctgacctgatagagcatagtcaggttttgttttgttttcttggaggggatatattttgctttggaaactgaccattttcaggagtcacctgtgtaagtcagtcaattgtccttatgttcgtgatggtgagaagatttttggaatatgagctaaaccatcattgtctaacttttcagacaaagtttctgtggaaagacctacggacaaagacatctctccttggcagagtgagctaggattaccagctcttcagccgcagctgaaggcgggagtccatggaaccccagaagctgctgataattggatttctgctatgctctctaacttgcctcttgttggagacagtagcttcctctcctttgcctttgtctgccttgggaatacaagaaaaaacaggatcgaaaccacgctcagggggtgtgtttgctgttaggatgaatgtttctttcttcataggacttaagattcatgtttcagttcaggtcaggtaaaatgaatttcatgtttaaaaagaatgttcataggaaagcaaactattctggtttggttcaatttagttcaacaagcattaacctacctactacgtaccaagcccttttctgaactacatggattaggaattgaacagcctctgttatgaaggagctcacagataggcagacaaagccatagatgccaaccttccatggagtatgatcaatgctcccaggggacaaggggataatttaaattgttttgggggaggggtcaggaaagacttgacaaaggaggtgaaattgaaaataaacctgatggtccactgatccacaatctaggttccaacatgcacacacatgctattcaagtgtcttgctggttagtggtgaatcctctcaactccatgctgcagacactttcgttttcccctccttctttcttcagggtcaaagcactgtaccttcctcccccagttgctaatgaaaagacccaacatccccagccttacattgatcagcaaactccccctagaggtccttcttccagtggccctggcccctttctcctctgctcttagggctggtggccttctcctttctcttcctgggatactccctctcctcagcctcctgcaggactcccagatatactctaggcaacaacaccttagtaaagactttcttgttatcaagtcatgcttctctttcaaaaagtacccaatatactcaagatatccgaaacaacaattattgttcctatttgacttacaaggaggcaaaaattatatccatctcaggatactttaaaaacaaaatgtttgccctttgaacatcttacagccagcacagcaaagtagtttagaatatgggctctggacaactgtaagaacatgatatctgggacaactatttgaactcgaatttggattcaaacgccagccctatcatttacttgacctctcctcaatgaatgtctatgctctttctgcaggtaatcacaggtcctggctgaacaacttcagggattacttatggcaacttatcaagagtgccttacctccagcagccattgttgcttttcttctcacctcagcactaatggggatcctctgctgcttcacgtaagcttctgtgggaagaagagacagggaggagagagggaatgtgaaggggggtgggaacagaaacaggttgctcaccagcctgcatatctgtaattaagggaaagttttaagaaattcaattctgggaggaaaactgtgaaaggtcatgcaacccccttttaaaatgtctactttctcttttacttcctccaacttgctccatttgttaccagtgactgacaggtcacatttaatgactagtgtttccaatggtcatttcttttatcaactttattaactcctaatttttcttccctgtggctcaagaactatacatagaaaataaataattagctgtgctctcaatttcctgaaaatttatcataatatttatctacataaatcatatgaagccaaaagaatcctgaggaaaacaaaatagttgagctaaattttgttaattcagtcagtatttaccaacaaatgactacttgcttgtctctgtgcttgttgctagaaaggcagagaaagaagacaattaaaaattacaaattggtaggtcattgctattgtgggagacagagtccaagtggggagacctatgaaagtgatcaacaaaggtgttaaagagatgaggtcaggaaatagttggccagtttgcaagaggaactaaaagggaatagagaatagaaatggggggtcctgcagagctcaaaaatctaataaaagtggctgaggataaagatcagattaagggtgtggcatcacctatggctcctgtaacctcaaaatgatcacaggatcaagaactgtgtctaggaagcaaccttggatgtggttactggcacatggaactgattggagacaaatagattagaagtcagctaagcttttgagagaagcttattgccagagaaaccataagccagaactaaatgagccatctgttgtaaacaatagttaggcctccacctttccatgaaaaagaaggacaccagcttcgaaggtcccaacatttgcttcagatgcagccatagagaataatggatcagtagagcctcccagagaatggacaatgggccacagagtcaccctttgaaagcaggatttgggcctaatccatgcctacctaccaggactccaggattgccacagagcagtgactgctgtgtgtctctcattcttcctatttccaaatgggaatgtttatggtgcttatcctcttcctgttccatcattattctggggtgtggagatcaggagcatataactcgttttagttcataggtcacttaaccaagcagagccaccctcagacttgagagaactaagcatcacccagatactctggactttgagctggacacagtgatgagtgtgacttagtactgaggaaagggtttgccacaagtcaggtattctgaaactagacagggagaccggaatttggcattcagagtataattaatgatcaatgcctgtggaagatagggggtggaagggagaaatcaaactgccttgcaagcccaacaaagactcagtcggccccatcagggttgtcccacatggctgaaatggctggacctctctaaccccacctcagtcattcactggatgtgggctgcccccagaaagtacatggaagctctctgcagctgaggcagactctgaatgagctgacaggtagaggctttctgctgacaacactctcagcagctagggaaataaggcctttctcaagcggaaatatgggtggaatatttccatatgcatgacagggtggctgtgttccacgtatgaaaggaaaagtgaaacagatactgggtgatcagaaagacagactgtaacagagactggctatatgttcagcaatcctgttccttcttccccaagcacagagtaacattatattcttaaccttccttccagttaggctgggaccacagtactgagatttggccagttaaatacgagcaaaaggaatgtatgacatttccaggcctagccataaaatgtcttgcacatgtgtccatgctgcctctctctttcacatatgcagggcttcaactgaaggactctaagatggtgaaaccacatgatggaaggagctgggatccctgaatcaccttgtggaggagaacttaacttacatcagaatgaggcatgagtgaaggatcaattttattgtgttaagctactaagatctcaggattgtttgttatagcagctgaatatccctgactagtatacctagcaaccaaccaagggagctggaactcaaatcaagatatgtctggttccacatctttgaagtcattgttactcaaactgtggtcagcaggtcagctgcatcaaaagcatctgaagtattggttaattaatattcagagggacttctgtgaagataaagcaggcaatatgccaagaaaaagaattccttctttgaagtagatggcttaacctgaatagaaaagccaataagcccttgctgggaacaagcaagctaactagtgaaagaaacatttctggacccagttgggcaccaagtagaagcctaacaggtaaattggaatgaataagcatataggcaagccatatttttaagaagcagtttgttgaggcaagaaggtaaagtctgaaacttctttatgctcagacctacatctgctgctctcacttgactggaaagaagtaaaggctacaagagctcacacatacctcagcatcatgaagagaatttgttagtccaaagtatagctctggacttgtgcacatctcctgtaaataactggtccagtaagagtttacctcattcaacaggaaacagcaccagatctatgcagagttactatatggaaaacacaagaaacgtataagcaagaaatggcagatgaggaatactcactagaaaaatatctcagggcagataaaaaccatgtactaacatattgccataaattcaaaacatttgatacaaaatataaaataatagctaaggtcgggcatggtggcacatgcctgtaatcccagcattttcagaggctgaggcaggaggattgcttaaggccaggagtttgagaccagcctaggaacatagcaagacctcatctcaataataataatagtaaatgctatatgcagaaatacaacagggcagataaggtataccaaaacaaaagaagaagatgaaaattagttggaaaatcccaagaaaaatgtaaaagacaaaaagtaaaactatcaccaaaatgaggaagcatgaagaaaaagagacattggtgcaaaatatgaaagaaaatatggaaaataggattatataggcaagcagtattaagtaaacagtttggtgaaagtaagattagagaagaaatggtagatgcaggaggcacagaatgatttcttcgatgaagagaaccaaaataatccaacagaagaaaaagttataattttttctttttcttttttcttttttttttattgttactatactttaagttttagggtacatgtgcacaacgtgcaggtttgttacatatgtatacatgtgccatgttggtgtgctgcacccattaactggtcatttagcattaggtatatctcctaatgctatccctcccccctccctccaccccacaacagtccccagagtgtgatgttccccttcctgtgtccatgtgttctcattgttcaattcccagctatgagtgagaacatgtggtgtttggttttttgtccttgcgatagtttgctgagaatgatggtttccagcttcatccatgtccctacaaaggacatgaactcatccttttttatggctgcatagtattccatggtgtatatgtgccacattttcttaatccagtctatcattgatggacatttgggttggttccaagtctttgctattgtgaatagtgccgcaataaacatacgtgtgcatgtgtctttatagcagcatgatttataatcatttgggtatatacccagtaatgggatggctgggtcaaatggtatttctagttctagatccctgaggaatcgccacaccgatttccacaatggttgaactagtttacagtcccaccaacagtgtaaaagtgttcctatttctccacatcctctccagcacctgttgtttcctgactttttttttttttttttgaggtgaagtctcagtctgtcacccaggctggagtgcagtggcaccatctcggctcactgcaacctctgcttcccgggttgaatcgattctcctgcctcagcctcctgagtagctgggattacaggcacgcgtcaccacgcccagccagctgatttttgtattttttgtagagacggggtttcaccatgttggtcaggctggtcttgaactcctgatctcgtgatccacccgcctcggcctcccaaagtgctgggattacaggcgtgagtcaccgcgcccagccaagttataattttttaagtgttgcagaaattaaagaagactggagtctgtggtcataaaggacacatcaagtcccaggaaaaattgggacttgctactgggcacatagtagactctcagtaatacttgttgatttttaattaagacatttcacagtgaggattgcacacagcctctctgtgcctcattcttcctcctctatactcacctgtgtataccattagctgcagctgtaatgaaggcttaagctagctgcttattacctgaggcacatggaagcttggctaatctcccagcattccagaagcagaggtggaaatcaggaggactgacaggctctaacaagtccacaaagatatgtgtacaaggaatttttagtatggtttacgatagtgaagaaatggaaacttaaatgtccatcagtctggggctagctaaagaaagtattgcacattcatacactgagtactaaggataattacacagaaacatattcatgaaatatcattgagtggaaaaagcagattataacagaagatatatagtttagtctaatttcttattaaaaactaattgtatagggggaaagcctctaagaacctaacccaagtattagacattggttatctccttgtggtagtgaataggttgttttattactattggcggtggtgttaacttttgtttttcctgtctaattgcactttctgatctttcttttttttctttttctttttttttttttttttttttgagacggagtctcgctctgtcgcccaggctggagtgcagtggcgtgatctcggctcactgcaagctccgcctccgggttcacgccattctcctgcctcagcctcccgagtagctgggactacaggcgcccgccaccacgccaggctaattttttgtatttttagtagagacggggtttcaccctgttagccagaatggtctcgatctcctgacctcgtgatctgcctgcctcggcctcccaaagtgctggaattacaggtgtgagccaccgcgcccggcccactttctgatctttctacaatgagctgtattgtttgatcagttcatttttaaaaagatactttaaaaacaaaagaagaaaaactacctaaccatacttataccactacctccaagccccactgtactggaaacacattcttattctgctttttcatcaaagtattttgtttgtatggaattatttggttcatattaagagaaaaactggtgtcaaatccaatctttgaaaaggttatataattatatagcaactctgtgcagagcattcaccattttatcttcctt

SEQ ID NO: 10 - DNA, 74514 bp, Homo sapiens
aaggaagataaaatggtgaatgctctgcacagagttgctatataattatataaccttttcaaagattggatttgacaccagtttttctcttaatatgaaccaaataattccatacaaacaaaatactttgatgaaaaagcagaataagaatgtgtttccagtacagtggggcttggaggtagtggtataagtatggttaggtagtttttcttcttttgtttttaaagtatctttttaaaaatgaactgatcaaacaatacagctcattgtagaaagatcagaaagtgggccgggcgcggtggctcacacctgtaattccagcactttgggaggccgaggcaggcagatcacgaggtcaggagatcgagaccattctggctaacagggtgaaaccccgtctctactaaaaatacaaaaaattagcctggcgtggtggcgggcgcctgtagtcccagctactcgggaggctgaggcaggagaatggcgtgaacccggaggcggagcttgcagtgagccgagatcacgccactgcactccagcctgggcgacagagcgagactccgtctcaaaaaaaaaaaaaaaaaaaaagaaaaagaaaaaaaagaaagatcagaaagtgcaattagacaggaaaaacaaaagttaacaccaccgccaatagtaataaaacaacctattcactaccacaaggagataaccaatgtctaatacttgggttaggttcttagaggctttccccctatacaattagtttttaataagaaattagactaaactatatatcttctgttataatctgctttttccactcaatgatatttcatgaatatgtttctgtgtaattatccttagtactcagtgtatgaatgtgcaatactttctttagctagccccagactgatggacatttaagtttccatttcttcactatcgtaaaccatactaaaaattccttgtacacatatctttgtggacttgttagagcctgtcagtcctcctgatttccacctctgcttctggaatgctgggagattagccaagcttccatgtgcctcaggtaataagcagctagcttaagccttcattacagctgcagctaatggtatacacaggtgagtatagaggaggaagaatgaggcacagagaggctgtgtgcaatcctcactgtgaaatgtcttaattaaaaatcaacaagtattactgagagtctactatgtgcccagtagcaagtcccaatttttcctgggacttgatgtgtcctttatgaccacagactccagtcttctttaatttctgcaacacttaaaaaattataacttggctgggcgcggtgactcacgcctgtaatcccagcactttgggaggccgaggcgggtggatcacgagatcaggagttcaagaccagcctgaccaacatggtgaaaccccgtctctacaaaaaatacaaaaatcagctggctgggcgtggtgacgcgtgcctgtaatcccagctactcaggaggctgaggcaggagaatcgattcaacccgggaagcagaggttgcagtgagccgagatggtgccactgcactccagcctgggtgacagactgagacttcacctcaaaaaaaaaaaaaaaaagtcaggaaacaacaggtgctggagaggatgtggagaaataggaacacttttacactgttggtgggactgtaaactagttcaaccattgtggaaatcggtgtggcgattcctcagggatctagaactagaaataccatttgacccagccatcccattactgggtatatacccaaatgattataaatcatgctgctataaagacacatgcacacgtatgtttattgcggcactattcacaatagcaaagacttggaaccaacccaaatgtccatcaatgatagactggattaagaaaatgtggcacatatacaccatggaatactatgcagccataaaaaaggatgagttcatgtcctttgtagggacatggatgaagctggaaaccatcattctcagcaaactatcgcaaggacaaaaaaccaaacaccacatgttctcactcatagctgggaattgaacaatgagaacacatggacacaggaaggggaacatcacactctggggactgttgtggggtggagggaggggggagggatagcattaggagatatacctaatgctaaatgaccagttaatgggtgcagcacaccaacatggcacatgtatacatatgtaacaaacctgcacgttgtgcacatgtaccctaaaacttaaagtatagtaacaataaaaaaaaaagaaaaaagaaaaagaaaaaattataactttttcttctgttggattattttggttctcttcatcgaagaaatcattctgtgcctcctgcatctaccatttcttctctaatcttactttcaccaaactgtttacttaatactgcttgcctatataatcctattttccatattttctttcatattttgcaccaatgtctctttttcttcatgcttcctcattttggtgatagttttactttttgtcttttacatttttcttgggattttccaactaattttcatcttcttcttttgttttggtataccttatctgccctgttgtatttctgcatatagcatttactattattattattgagatgaggtcttgctatgttcctaggctggtctcaaactcctggccttaagcaatcctcctgcctcagcctctgaaaatgctgggattacaggcatgtgccaccatgcccgaccttagctattattttatattttgtatcaaatgttttgaatttatggcaatatgttagtacatggtttttatctgccctgagatatttttctagtgagtattcctcatctgccatttcttgcttatacgtttcttgtgttttccatatagtaactctgcatagatctggtgctgtttcctgttgaatgaggtaaactcttactggaccagttatttacaggagatgtgcacaagtccagagctatactttggactaacaaattctcttcatgatgctgaggtatgtgtgagctcttgtagcctttacttctttccagtcaagtgagagcagcagatgtaggtctgagcataaagaagtttcagactttaccttcttgcctcaacaaactgcttcttaaaaatatggcttgcctatatgcttattcattccaatttacctgttaggcttctacttggtgcccaactgggtccagaaatgtttctttcactagttagcttgcttgttcccagcaagggcttattggcttttctattcaggttaagccatctacttcaaagaaggaattctttttcttggcatattgcctgctttatcttcacagaagtccctctgaatattaattaaccaatacttcagatgcttttgatgcagctgacctgctgaccacagtttgagtaacaatgacttcaaagatgtggaaccagacatatcttgatttgagttccagctcccttggttggttgctaggtatactagtcagggatattcagctgctataacaaacaatcctgagatcttagtagcttaacacaataaaattgatccttcactcatgcctcattctgatgtaagttaagttctcctccacaaggtgattcagggatcccagctccttccatcatgtggtttcaccatcttagagtccttcagttgaagccctgcatatgtgaaagagagaggcagcatggacacatgtgcaagacattttatggctaggcctggaaatgtcatacattccttttgctcgtatttaactggccaaatctcagtactgtggtcccagcctaactggaaggaaggttaagaatataatgttactctgtgcttggggaagaaggaacaggattgctgaacatatagccagtctctgttacagtctgtctttctgatcacccagtatctgtttcacttttcctttcatacgtggaacacagccaccctgtcatgcatatggaaatattccacccatatttccgcttgagaaaggccttatttccctagctgctgagagtgttgtcagcagaaagcctctacctgtcagctcattcagagtctgcctcagctgcagagagcttccatgtactttctgggggcagcccacatccagtgaatgactgaggtggggttagagaggtccagccatttcagccatgtgggacaaccctgatggggccgactgagtctttgttgggcttgcaaggcagtttgatttctcccttccaccccctatcttccacaggcattgatcattaattatactctgaatgccaaattccggtctccctgtctagtttcagaatacctgacttgtggcaaaccctttcctcagtactaagtcacactcatcactgtgtccagctcaaagtccagagtatctgggtgatgcttagttctctcaagtctgagggtggctctgcttggttaagtgacctatgaactaaaacgagttatatgctcctgatctccacaccccagaataatgatggaacaggaagaggataagcaccataaacattcccatttggaaataggaagaatgagagacacacagcagtcactgctctgtggcaatcctggagtcctggtaggtaggcatggattaggcccaaatcctgctttcaaagggtgactctgtggcccattgtccattctctgggaggctctactgatccattattctctatggctgcatctgaagcaaatgttgggaccttcgaagctggtgtccttctttttcatggaaaggtggaggcctaactattgtttacaacagatggctcatttagttctggcttatggtttctctggcaataagcttctctcaaaagcttagctgacttctaatctatttgtctccaatcagttccatgtgccagtaaccacatccaaggttgcttcctagacacagttcttgatcctgtgatcattttgaggttacaggagccataggtgatgccacacccttaatctgatctttatcctcagccacttttattagatttttgagctctgcaggaccccccatttctattctctattcccttttagttcctcttgcaaactggccaactatttcctgacctcatctctttaacacctttgttgatcactttcataggtctccccacttggactctgtctcccacaatagcaatgacctaccaatttgtaatttttaattgtcttctttctctgcctttctagcaacaagcacagagacaagcaagtagtcatttgttggtaaatactgactgaattaacaaaatttagctcaactattttgttttcctcaggattcttttggcttcatatgatttatgtagataaatattatgataaattttcaggaaattgagagcacagctaattatttattttctatgtatagttcttgagccacagggaagaaaaattaggagttaataaagttgataaaagaaatgaccattggaaacactagtcattaaatgtgacctgtcagtcactggtaacaaatggagcaagttggaggaagtaaaagagaaagtagacattttaaaagggggttgcatgacctttcacagttttcctcccagaattgaatttcttaaaactttcccttaattacagatatgcaggctggtgagcaacctgtttctgttcccaccccccttcacattccctctctcctccctgtctcttcttcccacagaagcttacgtgaagcagcagaggatccccattagtgctgaggtgagaagaaaagcaacaatggctgctggaggtaaggcactcttgataagttgccataagtaatccctgaagttgttcagccaggacctgtgattacctgcagaaagagcatagacattcattgaggagaggtcaagtaaatgatagggctggcgtttgaatccaaattcgagttcaaatagttgtcccagatatcatgttcttacagttgtccagagcccatattctaaactactttgctgtgctggctgtaagatgttcaaagggcaaacattttgtttttaaagtatcctgagatggatataatttttgcctccttgtaagtcaaataggaacaataattgttgtttcggatatcttgagtatattgggtactttttgaaagagaagcatgacttgataacaagaaagtctttactaaggtgttgttgcctagagtatatctgggagtcctgcaggaggctgaggagagggagtatcccaggaagagaaaggagaaggccaccagccctaagagcagaggagaaaggggccagggccactggaagaaggacctctagggggagtttgctgatcaatgtaaggctggggatgttgggtcttttcattagcaactgggggaggaaggtacagtgctttgaccctgaagaaagaaggaggggaaaacgaaagtgtctgcagcatggagttgagaggattcaccactaaccagcaagacacttgaatagcatgtgtgtgcatgttggaacctagattgtggatcagtggaccatcaggtttattttcaatttcacctcctttgtcaagtctttcctgacccctcccccaaaacaatttaaattatccccttgtcccctgggagcattgatcatactccatggaaggttggcatctatggctttgtctgcctatctgtgagctccttcataacagaggctgttcaattcctaatccatgtagttcagaaaagggcttggtacgtagtaggtaggttaatgcttgttgaactaaattgaaccaaaccagaatagtttgctttcctatgaacattctttttaaacatgaaattcattttacctgacctgaactgaaacatgaatcttaagtcctatgaagaaagaaacattcatcctaacagcaaacacaccccctgagcgtggtttcgatcctgttttttcttgtattcccaaggcagacaaaggcaaaggagaggaagctactgtctccaacaagaggcaagttagagagcatagcagaaatccaattatcagcagcttctggggttccatggactcccgccttcagctgcggctgaagagctggtaatcctagctcactctgccaaggagagatgtctttgtccgtaggtctttccacagaaactttgtctgaaaagttagacaatgatggtttagctcatattccaaaaatcttctcaccatcacgaacataaggacaattgactgacttacacaggtgactcctgaaaatggtcagtttccaaagcaaaatatatcccctccaagaaaacaaaacaaaacctgactatgctctatcaggtcagataccggacattccttcctacacctgataccttttcaatcttccccaactcaattagtagaaactctttcacctgttcaggctgaaaaaggtacattcacattgttgtgcaacagatctctagaactttttcaacttggaaaactgaaactctaaacagctcctcatttttgtttctatgaatttgactactttagataccaaatataataaatttctatatatttttaactccatgatatattttatatattcaagtaacaaactttaaattgctttaaaaagtaaatgtttgcttagatttacatatatagtaatgactcttctttttctctcatacactttatccatcagaaaagtctagtcacctttacttacaaaacgtatccagaatcctgccacttcacaccacctccactgctacccaccatcatctctgtctttctgcttccgtccttgcctcccttaagcctcttctccagtgagtggccaaagagatcttggtaggttgtaggtcagattatgtcctagttactgctgaccacatatcctatgagtctcctcttgatcatcactccaacttagcctcatttcattttgaacaagctaggcatgttcctaccttggggctttttaacttgcttttccctttccagggaatgcttttcccccaggtattctcagaatttatttcctcacctctgtcaggtactcaaatatcaccttctcaatgaggattttccttagatcccattgttaaaattgtaccaccctcctacaaacttcctaattgtcttacctgcttgatttttctccagaacctcatcagaacctagtagaatatattttactttactttattatatgtatctcctgaatataatgtaagctctatgagtgcagggatttttgtctgttttgttcactgctaaacagtacctagcacatagggtatccaggtgctcaataaatattttttgaatgaatggcgacttttggcagatattgttcccacccatttttcatttactacatccaactagataagctgaaaaagctgaatcctccctttcttagccatccttgaagttaggcatggctatgtgacatagctctggataatgaaacataagggaaatctgatggatagcttttgggaaggctttttgctgtcttgataaaagagatggtgctaccattttccctttatgctgccttgaatattgcttaagaaatgttgcctgaagttgctctgataatttcaagccactaaactaacacctgtatctgcttacttctggactgcatggtatgagaaaaatatacttttatttgagccattataatttgggcctcctattacttaagacatttataactgatacactcacctactgtttgatacggcttaaagagacccacatccagcgggaaaccacttacctgaaaatggacttaggaccacggaattcaaagaaaccagtggaattaggccttagtctttagagggcagaagtcttcagaagaagctggtcagtcttctccttaggtctctgaagttccaaacagaattccaccactccttatgatatcactgattacatttaaccctcccccagtctccttatttgacagctaagcacacagacatcattttctctctatgtataaacatctgtgttgataccaaaacccatccttgcagtagttctatcctcttaggcttgaataattctaagatattttattcaccacatggtatctaactatgcattataataacatatatatgtggcatttcatatcagggaaaaagaccttatttaatatgatgttgggtgtgagccctttgccatgctatgcaaaatagaaattctagatggatccaggactaaacaaaaaataaaattatatacaaaatatgacattttctgtcatacttttatgatagaaaattctatgtgtggatatttttataatcttggtgcagaaaaagctactctaagcatgtcataaaacccaaagccataaatgaaaatgctgataaatttataacataaaaatgtaaagctttcatatagcaaaacattgtttaaaaaagataaaaggttaatgacaaattaagtaatttcacagcatatacgacagacattcaattaagattgttaacgtacaaagaactcttacaaactaattaaaaagaaatagtactggctaggcacagtggcagacgcctgtcatcccagcactttgggaggctgagacaggaggatagcttgagcccaggagttcgagaccagcctgagcaacatagcgagatcctgtctctacaaaaaatttaaaaattagctgggtgtggtggtgcatgcctgtagtcccagctactcgggaggctgaggcagtagcctggcttgagcctgggagattgaggctgcagtgagctatgatcatgccactgcactccagcctgggggacatgaggggcttaaaacctagatgatgggttgatgggtgcacccaaccaccgtggcacatgtatacctacgtaacaaacatgcatgttctgcacatgtatcccagaacttaaagtaaaaaaaaaaaatgcaaatcaagtcgaggcaacatagcaggatactgtctctacaaaaaataaaatattaaaaaaattaaaaaaataatacttatccatagaagaactggcaaaaatggtatctcagttaggttctatcagaaaacagagctaccaggaaatacataaaatgaaagtttttgtagagtcctccagtctcccccagtttcttgctgtgtcatgctagaaaatcatggagtggcttgatcattctgtgacccagccaacaggcctgaatgaaaattaggaccttgaacattcccaggcgctgataaaggtgtatctaggttgtgacccgaaacactggaggaagctggccctggcccttgagccaaattcctctaaaccctcatatgagctccataccctgacctttctgtggaaggaaaggtgaggtgaagtggagaaagcaagtatacactggaagcctgaaaagagaagagcccatgaaatggactaaaacctgcatcagtctcatgttatctccaagcttctaacttcgatggtggagtaacatgcatgagaaggtcaggtgttttctgaaagagctaaacacacaacttttctaggatttggagaagctaaaagatccagcaggagctggaggacctgcaaacttggtcactgtcctgtgcccaccaggtaaccccacaaaatagtgacaatgtgaataagctgaaaatgagcattgtatgcctgtctgacttttccattgtaaaaagaatatggctgtcatataagttaactttagctgaatgaaaaatgacctccaacttagcaactgtgaagaaaacatttattaccttatagtttctgtaggttagttttggagtggatgatgagattggagtcatgtatctgctgggactgcagtcatctgaaagcttgactgtactggaggatctacttccaagatggtgcactcacatgactattgctaggatgaccaaaagtcccagcttgcctgggactcaggattggcttcatgggagtttgatctatgcaggtctacagggccccacaccctgaggggccctatgtttcgtttgctctgatgtcactgtctcgaaattcttaataattttatctttgatcttgtgttttgtaagggaagtttaatgagaccgcctatttcatcacactcattttctcctccccactgactttgccaacattcttctccctttgagtctcactgaactctgatgcattgtgggtccactagaatgttatgctcatgggcactgtatacattctttgctattctatttgcacatagtgtttacaatgcatttttgcattgttgtaaaactgtagtaagaacacaacgtggtatctgctctcttaacaaatttttaagtgcccagtatggtatcgttagctatatgcacaatgttgtacattagatctgtagaacttaattcatcttgcataactgaaacttttttttttttgagatggagtctcactctgttgcccaggctgatggaatgcaacggcacgatcttggctcactgcaacctccacccgcctcccgggttcaagcgattcttgtgcctcaacctcccaagtagctgggactacaggcatgtgccaccatgcccaactaatttttatatttttattagcgacgggatttcgccatgttggctaggctggtcttgaactcccgacctcaggtgatccgcccgccttggcctcccaaagtgccaggattacaggcatgagccactgtgcccagcagcatagctgaaactttatgcccattgaacagaaactcccatttctctctcagtctctctctctccatataagctgttctcctggattgaggctccatttctgatttattttattcagactctcatgaattatatcatttttactctgagttcaatttaatctggttttctaactcactaatttggttttctagagtgtccatcttgctattcagtgcccctatttgttttaaaaatcagtgttcacatttttatttccagtgtaaaaacacaattctcaaaggcatttgtttgtatgtgtcaatgttttatttaactcattactgaagaaaccagcaggaaaataaaagagctagttccatgaacatttgagaaatagagatgtatatagtcaatgggaaaagaatgccaaaataagattatcaagttaaacataacaggaaataaaaccatatcacctttggggttaactcctctaccgggctataaaacaaaacaacttattcatttctgtaagttagcctctaaactttaagaacttcacagggctataaaccatttgcacctgcatcatttgtggattgtgactatactgtgacagctatgttatagtttccaaagaggtcagataagggtcaagcaggattattagaaaatactccagcatagaaaaaagtagccattcttttgccttttctcagattgggatccatttttctttcatattaggatctcctgttttccatttgccctgggttgcaatctttggatgcttcctccaactgctctataacttatccttgtctccagccccctttactatcaggagattctgtgtagtcatagtgaaggggtcaggcagatggaaggagcagtaaacccttcacaatcttatgggggtggagggcaagaagggggatcctattgtgtggtgatatggcagactggagtgttttttctgttttcaccagtccaattttcttctgacctccttgatatttcaactatgtaagtaggactctagttttcagtcacggtatataatttcccctgttacatttttgttgtgttattttcagcaggaaattagtagagggagagagtaaactgagtgcattattagaattacaaagtttgtatctcctatctcagataaccatggattttcctcatatttccacagaaatattaaatgtatgtcctttagaagcctaatgtcatcatcattttctttcttggccatcacaaatttcaagaagacattgttattttatttcaaagctttcaacaattgcatcctcctgacttatttttttattggtcagaattaagaccaaatggctttatatctatggacactcgtcagaaaaatgcacatttgcatttatacagaatgccttatataatttcaggggacttagggattcttgaaccccatctataattctcagtttaagaatgctagttttggagataagaatgtgcccctcataatgactaaataacataattatatctatgtgtaaggaagcagaaacagactttactgtagtagttattgtattctctccattttgcagattgtccaaatgatttgccttttgactccaagattgtattgatctgatcctgaaacatgctttgttccatgcttgatcaggataataaacaactgagagttttattttaaacgtatgaggcttaacctgaaatgttaacatcataaatatctttttcaaagtttcatcacatagtttttctacaacagaggaagtggtgactctgagaggcctaacttttcagggaagaatgctttcatgcaggtttctcctcacttctttttgcctagttatattggaaggaaggagtaatctgggagcagctgcagaaaataggtaagagttaagttaaattggatgcaccctcctggccccccaccaaagaaatgcaggactgatgatagttaattcaggaggcttcaaggcagtgtctgctaggatttagcacaaaggtagaaggcaagccagggagggacactgccctggagctgaggagggagaggtgacggcagtggcaggtgctgcagtggccaccctcagtagaggtcctgtgcctcgcagcccagaacctccatcctcagggcaatctggtgcacccaactctgggggtgaattcgaaggtagcgagtcagtaacggtgggtctagagagttcaccacaggtgtgaaggagtcttgatttccctgaaaaacctgaaagaggaaagatagcatttattggttgtctgacaggacaatggtcactgcaaagcacagacgcttttctcacttctagttgtttccagtagtccaggattaaaccctggaagatgactagatgactctgtcctacgcatctgggacatctagaattaagagcaccctgctttggaggccttcactctagctaggccttatatctacagtgttctcacccacttcccaaacctcagtgacattaagtgctttgtcctgggtcacacacagcatctgtgttggaccatctggagatgagagtcaggctttggccagcagactcccttgtcaatgcatttgctgtggcaagaggagtacatggcaagagctcagaaaatggtagctatcgttattagataaactggtttcgcacatgttggtgacaactttagaatgataacgaatgcaacacagcaaggcatgcaatttagtgtggctgggcaaccttggcaggaggggatgcagaagagagaaagaagtgggaagagtctaagactcaaggcaccttgctactccaggactttggagcaaaggtcacctataactgggtggatgtttgggaaaatgaagatctgaatgttcaaaacgtgtaattcaaggcaactctgaaaccctgtgggttttgtgtggattccgaggtaatcctacagtagaaagtccagccaaatggtgagaataagcaagagtcttggagaaaaaggaacagaatgaaggcaatgtcctaccataatgcatgctcttgcaaggacagacagacaccatgatatctttaggatctcctgaggcagtttgtgtaaaaggaggcaacttgccaccaaaatgggaaagaagtggttaaacagcaacagtagggctcctgcttcctggagctattgggtgacattttcctctaacaatcctggcatcttcaagtgtggtgtcagttttacttcggattccaaatgggaagagacttttcctggcaaatgcactgtgaagtaacactgtgatcctacagagagtttagctatcagaacaaaagacgtttgggccatcttcattcatctagctacattttccccctaggttcccaaccctggctgcttattggaatcgcctttggagcttttaaaaaatgatgcatgggtaagttccccacccccccacccccccaagagatgccaatttaatcggtctgttcccaccttggcccccttactctggtctccaagttctgcctaatatagcccctgcccaagtctctgatctgttctcccactgcattcctcctattttaccgcatcgcagatgagctgatctttcagtttctcaacaatgtcaactcttgttttatttaacatgagagcctttgtatatgtgattccctctgcttggaaggctcttaccccttctgtttcttcttttatccatgttttttacccttcgggtctcagtttaaataccacctcttaaactaagcatagtggcatgcccctggagtcccagctactcagcaggctgaggcaggaggattgcttgagcccaggagtttgagacaagcctaggcaacatagcgaaattctgcctcaatttttttttttttttttgagacggagtctcgctctgtcgcccaggctggagtgcagtggcaccatctcggctcactgcaagctccgcctcccgggttcacgccattctcctgcctcagcctcccaagtagctgggactacaggtgcccgccaccatgcccggctcattttttgtatttttagtagagatggggtttcactgtgttagccaggatggtcttgatctcctgacctcgtgatccacccgcctcggcctcccaaagtgctgagctacctctttagaaaggtcttcctcattattcctcttgtaaaataggactcttttttgttctaaatctcaacttatttgtttcctttgtagcattcagtatcttttcctttatctctttacatgcttattgactgtttcctctgtctccgccaccaaatgtcagttccacaagggcaaagaccttggtcattgttgtatcttcagcacatagaatatatagcataatgtatatagcatggcaaatataccataaacatctatagaaataaagttctgtatttggaaaaatttttgagaaacattaaggtccctgttctgagattattttacaaatgtttacgctgtatttggaggctttgtacatcttttgttagacttaatccttactgcattaaatcagggggcatgcgatgccagattgtcccattattgatgatgctaagtttgatcacttggttaagatgtccacctaatctctatatttataaaggtaaccctttccctttcctaacaatctgtggagtgagactttgagaccatgcaaatattctgtttcacaacaagcttttatccaatggtattagcaacccttaaagttctttacaagtattcaatagtaagtacattgatggttgcaaactgattttccagttatgatccattaccctcattattccttttgatgctcaaattgtctcaaatctggccaacaggaagcccttcagaccagtttctgtgttcttttcacatgatcccattaatcttctggcacatcaagatcaccaagatcatctaagattgcctggcagtttccttgatccagccttgaaaaagtcatttctctagggagctcagattcttttgactggaaaatggtagttagagaccaagatttgggcatgggatgggctcgttattactgcagtgtaattacttctagattccctcagtgaacagtgctaagaatatgattttttaaattcctaagttctcactgacacttctaattcaactctaacattctttttgttagtattagatttctagggctactgtaacaaattcaccacacacttggtgcctttaaaacaaaagaaatttattcacttatcgttctagaggcttaaagtctggagcctggagcagaggcacaaaagagtgtgtcaaacacaaaatcacatttaaagcttctatttggaagtggtatatatgtcatgtccaatcacattctattgatcaagatgagccgtacggccatgcctaaagttgatgaggttttcaaggaaagagggaataaaaactcaagaacattaataccatctgcttcatatgctattttctgttcatttagaaattccttacattttcttgtttcagcaataagaggtgatttatgcaggcagacatgagggctgggtggcttactaggtttcttagccaggagtaccctctactgttgataaatggaagtgtaatttatttaatagatgtgaccaaagaggtttgtgggtcttgtgatttagtaattcacttttgtttttataggacagttaatttccaacatttgctttcttctttttttttttttttttttttttgagacagggtttctctctggagcaaggttggctagatttatatatttattttctacttgtaaatataaacttatagtactttttgtcttctggttattctatagatgggttatgggtggttttagtcataatttaaaattgtgtgtgtatgtgtatgtatggtttttgaagactgtggagagatttaggcagctgccattatctgacaggaatgtgcaactcctgcttggaatttttaaatgctatttaaaactatttttccaactgtttcaggtatacagaaatacaattaattttggtatttattttgttttcagcaagcttgaaaaattttaaaaattctaataatttatatataaattcctttggattttctatctatgccatcatatcttccacatacaatgagtttgtttcatcatattcaatccttacatattttccttctttttctcatcttattgcactgcttaggacagccaatatgtataatccttcagtctgtcactgtgataaattatatcagttttctaatgtataagccaaacttgcattcctagcataaatccaatttggatccatattgctaatattttgtttgggatttatgtttatgaataaaacgggcctattatcttcctttctaatattgttcttgttcggtttggttgtcaaggttatgctattatcataagataattgaataacattccatctttttccattttctgaaagaatttttgcaaggttaatattatttctcctttgaaaaattggtagaatatagttagtgtagccatctggatctggattttttaaattaataaccttttaacactaagtttggaaaattaggtaaaatggattaatccctggtaaatacaacaagaaagaacatttaatattaataagtatcctcattttttatatttttatattggcagaaatttttgtgggatctttattgatgtccagttttttaaagtttctgatattatttgtgccttcttttcatcttgattgctcttgccagaagtttgtcaattttcaaggaaccaacttttggttttctttattctctctattgtatgtttcttttttacttcatttacttcatatctttattatttccttgcttctacttccttttggtttattttgctgtttcactagcttcttgagacataccttagctcattaattgtcaggctttcttctcttccaatatatgtttttaacgctatacatttctttctaaatattgctttagctgattcccacattttaatatgtcatgccttgttatcattcagtttaaaatattttctaatttatgatttcttatttgacacatgggtttaaaagtatagttcttgattctaacataggaagattttatagttatctttcttatttatatcaactttaattgtattgtgaccagaaaacatgttttatattatctgaaatttgagactactttatttgtagcttatttgtagcttaaaatggaaaattctaacatgtttcctttgtgtgcttacaaagaatgtgtaattttgcaatttctttttttttattatactgtaagttctagggtacatgtgcacaacgtgcaggtttgttacatatgtatacatgtgccatgttggtgtgctgcacccattaactcgtcatttacattaggtatatctcctaatgctatccctcccctgtccacccaccccatgacaggccccggtgtgtgatgttcccctacctgtgtccaagtgttcttattgttcaattcccacctacgagtgagaacatgcggtgtttggttttttgtccttgtgatagtttttgagaatgatggtttccagcttcatccatgtccctacaaaggacatgaacagatcctttttatggctgcatagtattccatggtgtatatgtgccacattttcttaatccagtctatcattgatggacatttgggttggttccaagtctttgctattgtgaatagtgccgcaataaacatacgtgtgcatgtgtctttatagcagcatgatttataatcctttgggtacatacccagtaatgggatggctgggtcaaatggtatttctagttctagatccttgaggaatcgccacactgtcttccacaattgttgaactagtttacagtcccaccaacagtgtaaaagcgttcctatttctccacatcctctccagcacctgttgtttcctgactttttaatgatcgccattctaactggtgtgagatggtatctcactgtggttttgatttgcatttctctgatggccagtgatgatgagcattttttcatgtatctgttggctgcataaatgtcttcttttgagaagtgtctgtttatatccttcacccactttttgatggggtctttttttcttgtaagtttgtttgagttcttcgtagattctggatattagccctttgtcagatgaatagattgcaaacattttctcccaatttgtagctcgcctgttcactgggatggtagtttcttttgctgtgcggaagctctttagtttcattagatcccatttgtcaattttggcttttgttgccattgcttttggtgttttagacatgaagttcttgcccatgcctatgtcctgaatggtattgcctaggttttcttctagggtttttatggttttaggtctaacatttaagtctttaatccatcttgaattaatttttgtataaggtgtaaggaagggatccagtttcagctttctacatatggctagccagttttcccagcaccatttattcaatagggaatcctttccccatttcttgtttttgtcaggtttgtcaaagatcagatggttgtagatgtgtggtattacttctgagggctctgttctgttccattggtctatatctctgttttggtaccagtaccatgctgttttggttactgtagccgtgtagtatagtttgaagtcaggtagcgtgatgcctccagctttgttcttttggcttaggattgacttggcaatgcgggctcttttttggttccaaatgaactttaaaatagttttttagaattctgtaaagaaagtcattggtagcatgatggggatggcattgaatctataaaataccttgggcagtatggccattttcacaatattgattcttcctacccatgagcatggaatgttcttccatttgtttgtatccccttttatttcattgagcagtggtttgtagttctccttgaagaggtccttcatatcccttgtaagttggattcctaggtattttattctctttgaagcaattgtgaatgggagttcactcatgatttggctctctgtttgtctgttgttggtgtataagaatgcttgtgatttttgcacattgattttgtatcctgagactttgctgaagttgcttatcagcataaggagattttgggctgagacaatggtgttttctagatatacaatcatgtcgtctgcgaacagggacaatttgacttcctcttttcctaattgaataccctttatttctttctcctgcctgattgccctggccagaacttccaacactatgttgaataggagtggtgagagagggcatccctgtcttgtgccagttttcaaagggaatgcttccagtttttgcccattcagtatgatattggctgtgggtttgtcataaatagctcttattattttgagatacgtcccatcaatacctaatttattgagagtttttagcatgaagtgttgttgaattttgtcaaaggccttttctgcatctattgagataatcatgtggtttttgtctttggttctgtttatatgctggattacgtttattgattttcgtatgttgaaccagccttgcatcccagagatgaagcccacttgatcatggtggataagctttttgatgtgctgctggatttggtttgccagtattttattgaggatttttgcatcaatgttcatcagggatattggtctaaaattctctttttttgttgtttctctgccaggctttggtatcaggatgatgctggcctcataaaatgagttagggaggattccatctttttctattgattggaatagtttcagaaggaatggtaccagctcctccttgtagttctggtagaatttgagtgtgaatccgtctggtcctggactttttttggttggtaagctattaattattgcctcaatttcagagcctgttattggtctattcagggattcaacttcttcctggtttagtcttgggagggtgtatgtgtccaggaatttatccatttcttctagattttctagtttatttacatagaggtgtttatagtattctctgatggtagtttgtatttctgtgggattggtggtgatatcccctttatcattttttattgcgtctatttgattcttctctcttttcttctttattagtcttgctagtgttctatcaattttgttgatcttttcaaaaaaccagttcctggattcattgattttttaaagggttttttgtgtctctatctccttcagttctgctctgatcttagttatttcttgccttctgccagcttttgaatgtgtttgctcttgcttctctagttctttaaattgtgatgttagggtgtcaatttttgatctttcctgctttctcctgtgggcacttagtgctataaattttcctctacacactgctttaaatgtgtcccagagattctggtatattgtgtctttgttctcattggtttcaaagaacatctttatttctgccttcatttcgctatgtacccagtagtcattcaggagcaggttgttcagtttccatgtagttgagcggttttgaatgagtttcttaatcctgagttctagtttgattgcactgtggcctgagagacagtttgttataatttctgttcttttacatttgctgaggagtgctttacttccaactatgtggtcagttttggatgtggtgctgagaagaatgtatattctgttgatttgggatggagagttctgtagatgtctattaggtccgcttgctgcagagctgagttcaattcctggatatccttgttaactttctgtctcgttgaactgtctaatgttgacagtggggtgttaaagtctcccattattattgtgtgggagtctaagtctctttgtaggtctctaaggacttgctttatgaatctgggtgctcctgtattgggtgcatatatattttggatagttagctcttcttgttgaattgatccctttaccattatgtaatggccttgtctcttttgatctttgttggtttaaagtctgttttatcagagactaggattgcaacccctgcttttctttttttgttttccatttgcttggtagatcttcctccatccctttatttcgagcctatgtgagtctctgcatgtgagatgggtctcctgaatacagcacactgatgggtcttgactctttatccaatgtgccagtctgtgtcttttaattggagcagttagcccatttatgtttaaggttaatattgttatgtgtgaatttgatcctgtcattatgatgttagctggttattttgctcattagttgatgcagtttcttcctagcatcgatggtctttacaatttgggatgtttttgcagtggctggtaccggttgttcctttctatgtttagtgcttccttcaggagctcttgtagggcaagcctggtggtgacaaaatctctcagcatttgcttgtctgtaaaggattttatttctccttcacttatgaagcttagtttggctggatatgaaattctgggttgaaaattcttttctttaagaatgttgaatattggcccccactctcttctggcttgtagagtttctgccaagagatcagctgttagtctgatgggcttccctttgcgggtaacccgaactttctgtctggctgcccttaacattttttccttcatttcaactttggtgaatctgacagttatgtgtcttggagttgctcttctcaaggagtatctttgtggcgttctctgtatttcctgaatttgaatgttggcctgccttgctaggttggggaagttctcctggataatatcctgcagagtgttttccaacttggttccattctccctgtcactttcaggtacactaatcagacatagatttggtcttttcacatagtcccatatttcttggaggctttgttcatttctttttattcttttttctctaaacttctcttctcgcttcatttcattcatttgatcttcaatcactgataccctttcttccagttgatcgcatcggctactaaagcttatgcattcgtcacatagttctcgtgccatggttttcagctccatcaggtcatttaaggacttctctatactggttattctagttagccattcatctaaccttttttttcaaggtttttagcttctttgtgatgggttcgaacttcctcctttagctcagagaagtttgatcatctgaagccttcttctctcaactcgtcaaagtcattttctgtccagctttgttccgttgctggcgaggagctgcgttcctttggagtaggagaggtactctgatttttagaattttcagcttttctgctctgttttttccccatctttgtggttttatctacctttggtctttgatgatggtgatgtacagatggggttttggtgtggatgtcctttctgtttgttagttttccttctaacagacaggaccctcagctgcaggtctgttggagtttgctggaggtccgctccagaccctgtttgcctgggtatcagcagcagaggctgcagaagagcgaatattgctgaacagcaaatgttgctgcctgatcgttcctctggaagcttggtctcagaggggtacccagctgtgtgaggtgtcagtctgcccctactggggcgtgcctcccagttaggctactcgggggtcagggacccacttgaggaggcagtctgtccgttctcagatcacaaactctgtgctgggagaaccactactctcttcaaagctgtcagacagggacatttaagtctgcagaggttactgctgtctttttgtttgtctttgccctgcccccaaaggtggagcgtacagaggcaggcaggcctccttgagctgcggtgggctccaccaagttcgagcttcctggccgctttgtttacctactcaagcctcagcaatggcgggtgcccctctccctgccttgcagccaccttgcagtttgatctcagactgctgtgctagcaatgagcgaggctccgtgggtgtgggaccctctgagccaggtgcaggatataatctcctggtgtgccgtttgctaagaccattggaaaagcgcagtattaggatgggagtgacccaattttccaggtgccatctgtcacagcttcccttggctaggaaagggaattccctgaccccttgtgcttcccgggtgaggtgataccttaccctgcttcggctcatgctcggtgggctgcacccactgtcctgcacccactgtccgacaagccacagtgagattaacctggtaccttagttggaaatgcagaaatcacctgtcttctgtgtcattcatgctgggagctgtagactggagctgttcctattcggccatgttggaaccacccttgtaattttgcaatttcaaggtgctattttctaaatatgtctataagatcaaacttgtgaatcatgttaattgttctatttctatacattgttccatcaattgacgagagatgtgttaaaatctagcctcccgagttcacgccattctcctgcctcaccctcctgagtaactgggactacaggtgtccgccaccacacccggctaatttttgtatttttttttagtagagacggggtttcaccatgttagccaggatggtctcaatttcctgacctcatgatccacctgcctcggcctcccaaagtgctgggattacaggtgtgagccaccgcgtccagccatgaaatcacattcttaatcttcagcaatactttcttgctttaaagtctatttttctgctatcaatagagctgtaatcgatatcttttagatatttgcataatttcttttcccatttttgtcttgctacttttctgtatctaatgttttagatatgactcataaaatgcacacaatttacttttgctttttttttttttttttaaagagacaagtctcactatcttgtccaggctgaacctcctgggctcaagtgatcctcccacatcagcatcctaagtagctgggactacaggtgtgagccatcacacccagctacttttgcttttttatcaatctgacaatctttgtcttttaactgaaatatttggtccattcatattacatatgattactgttatatttcaatttaaatataccatcttatcttgctatttttcctacctgttttatgtttctttatctctctttgcttgctttcatttaggtttgttgagtatattttatcctttcatattttttcttctaccattttgggagtcttacattgtgtgtatttctattacttactggctatcctataaactacaacattaatcaaattatgaaggtttaatattaacatctttacctcctagataatacatggattttagaatcctttattctatttatccacatgctgacttttttgctgttgtcatatgttctaaattttcacacgcacacctggcttaaacaatagaaatttattttctcacagttctggaggctacaagtccaagatcaaggggtaggcaggcttgttttgtgtgtgtgtgtgtgtgtgtgtgtgtgtgtgtgtgtattttttttttgtctgtttgttttttgagatggagtctccctctgtagtccaggctggaatgtgatggcgcgatctgggctcactgcaacttctgcctcctgggctcaagcaattcttgtgcctcagcctcccgagtagctgggattacaagcgcatgccagcatgtccagctaatttttgtatttttagtagaggggggtttcaccatgttgggcaggctggtcttgaactcctgacctcagatgatcttcctgcctcagccttccaaagtgctgggattacaggcatgagttaccacgcctggccagcaggcttggttctttttttttttcttttccttttcttcttcttctccttctctttatttttttttttagaggcagggtcttgttctgtttcccaggctggagtgcagtggcacaaccctagctcactgcacccttgtaacaagaactacaagtgcacactaccacacctggctaagggttggtttcttgtaaggcctctctcgttggcttgtaggtgtctgtcctctttctatatcttcatgtggtcgtccctctgtgcctgtctgtgtcctaatttcctcttttgctttaacgcataaaagatattttcattaggttttctttttgagagaggggttcacattgtttattttagcattgtgaagacatcattcattattttctgatatttgctattatttagaaatcagctgtcagtttgttactcattatggtaatgtacatgtcttctgacttatctattgcaaaattcgcaaacataaaatttaccattttaacaattttaaagtgtgaagttcagtgccatttagtacattcacaatgttatatagccatcaccactatctagttccagaacatttctataaccccaaaaggagattcaatacttattaagaagccactccacattcactccttctgccagcttctggcaaccactaatctgttttctgtctctatggatttgctattctgggtatttcatataagtggaatgtggccttttgtgcctggctgctttcacttagcataatgctttcaaggagcatccatgttttagcatggatcagtactttgattttttatgaataaataatagtccatatatggatagaccacattttgtttatctgttcatcacttgatgaacatttgaattgttttcacctgtttgctattatgaatagtacttctatatgcatttgtatattagtttttgttagagtgcctgcttttaattcttttgggtccacacccaggagtagaattgctgggtctatgttaattctatgttttccttactgaggaactgccaaaatattttctacagtggctgccctatttcacattctcatcatcaaggaaggttccaatttctttatattcttgctaacacttgttattttcccgcttgacattttgtttttgttttttttttaatttagccatcctagcaggtttgaaatgctatctcattgtggttttgatttgcatttccctaataactaatgatgttgtctatcttttcatgagtttgttggatccttgtatatcttctttggagaagttccattgaagtcctttacccattttaaaatttggttgtctttctgttgttgagttgtaagagttctttttatattctgggatactaggccctttatcagatatatgatttgcaatttttttctcctatactgtagatcatctttttactttcttgatagtgttctttgatgtacaaaagcttttaactttaaagatgcctactatatatatttttatagagttgttgcttgtgattgtggtgtcacatctaagaaaccattgccaaatccagtatcataacaatttacctctttgttttttcttacagttttatggttttagcttttatatttagttttttgatacatttttagttaaatgattttttacagacagggtcttgctctgacacccaggctggagtgcagtggtgcgatcatggctcactgcagcctccacctcctgggctcaagcgatcctcctatcccagcttccctagtagctgggactacaggtgtgtaccatcatgccagctaatttttttttcttgttttgtagatacagagtctcactgtgttgcccaggctggtctcaaactcctgagctcaagtgatccaccagccttagcctcccaaagtgctgggattacagatgtgagccaccacatccagccttgagttaaattttgtatatggtaaagatccaacttcattcttttgcatgtggatatccaattgtcccagcaccatttgttgaagagactattcttttcccacaaaatggtcttggcacttttattgaaaatcaattgaccatagatgtataggcttatttctggactctcaattctattccattgatctatgtgtctatatttatgtaagtactgccctgttttgattcttgtagctttgtagtaagttctgaaattgggaagtatgactcctccaacgttgttctttttcaagattgttttggctattcagggtcccttgaaattccatctgaattttaggatagatttttctattcctcaaaaaaaaaaatgtctttgggattctgatagagaatgctttgaggccggagaatcgcttgagcccaggaagcagaggttatggtgagtggagattgcaccaccacactgcagcctgagcgacagagtgagactccgtctcaaatcaaaaaacaaacaaacaaacaaaaaaacccagaatgcttgctttgaatctgcaaatggtttgtggtaatattcttatcttaagaatattatgtcttcaaatccataaatccaggatgccttttcatttatttagttatttaatttctcttttaatttttaatttttaatttttttctagttgctaattttccatatttgctgtcttcagaccagacagttctttagtttctttcaactgggtttttttgtttttagtggacaagacttgcacctccttcgttaaatttattcctaaatattgtattatctttgatgctattgtaaatagacttttctgttttccttttcatatttgtaattgttagtatataaaaatacaattgatttttgcatgttgactttgtaacctgcaatggtttttttcaactgcctaataatgttggataatttgtcttttattttcatgtttccatatgttattactttaaagattttatacataattatttcatattatgtatccgataatgtcaatatctggtgttcttcaagttttaaatctgaattgattgtttctgttcacttgtactcaagttgtcttgttgtcttgcatgtttgctgatctatgtctgtgatcttataattttaatatgtaggaatcctggaggcctaaactggaggtgctttttttctagagtaggttgagaatggttcttccaggtgccagaggataatatttatctgcaacttctctagcttccttctgggattcatgacaatgcagaattctcacactgagttctccttgcattttgctcaaggcttagtcttccagtaacaacattaatatgggcattctgtctgaggaaaggtcttcctttttatatttgctcattattcacctctccgctatgatttcagctcattattttaaaatagaagtttgtgggggtttttgttgatggggaggctggagattcccctttctttgctaaatacaacaatgcattgtcagtgatatagccttttttattgttgtacaatatacataaaatttaccattttaatcatttttaagtgtacaatttagtggtattaagtatactcacaatattgtgcacccattaccactatccatttccagaactttttcatcaccccaaacagaaactctgtactcattaaaaataactctccatttcttccccattccaagaccctggtaacctcttttctactttctgtctttatgaatttgcctgctctagatacctcattatggtggttaattttatgtgtcaacttgactgggccatggggtgcccatatatttgattaaactttattttatgtgtgtctgtgagagtgttttttggtgagattaacatttgaattggtagactaagtaaagcagattgttctccccagtgtgggtagaacttatccaatcagttgaaggcctaaatataacaaaaaggcttactgtcctcttagtaagagacagttccttctatttgactacctttaaactgggacttcagtttttttcctgcctttgggctcgaactaaaacattttaactctttctgggtctgtagcctgctggtctttgaactggaactacgaatcagctctctggggtctctaggctgccaactcaccctgcagatcttgagacttggcagactccataatcacatgagctaattccttgtgtgtgtgtgtgtgtgtgtgtgtgtgtatgtatctcctcttggttctggttttgtttctttgggaaccatgactaatacagattttcacaccaagagtgattctaaaggaacagaattttaaggataaattttataaatttgttattggatttctggaattggttctgtaacctgatgaaatttaaagacactaatgactattttcagtagtaaaaattgtccatggcatgatctggcaatagaaatatgtaggccaggctgggcgcggtggctcacgcctgtaatcccagcactttgggaggccgaggtggatggatcacctgaggtcaggagttcgagaccagcctggccaacatgatgaaaccctgtctctactaaaaacacaaaaattaggcaggtgcctgtaatcccaactactcgggaggctgaggcatgataatcgcttgaacctgggagatggaggttgcagtgagctgagatcatgccactgcactccggcctgggtgacagagcgagactccatctcaaaaaatatgtatatgcaaaatatctccattggatactcctaatcaactacttttaagaagcaagggtcttggtgactatgtatattgacacttgtgaacatatttgtcaaactaatgaatatgatgggattagtcggttgctcctaatgttgctggaaaaagtgatgaaagaaaaggaggagctcaggaatttgaattcccagctcaagagctgcataaatgacttgacagattctatgtatgccctgaaggagacccttatctactgtagccacagagctgagattgctgaaaatcaaatgccaaatctcatcctgtgactaactgaattacaaagcaagccaaactcccagctttgcagggtgtctactgttaaagcaagggcagtgattgggaaagaatggggcactacaagttggattaggtatgtgtggaagaccctgattaagctggggacattgagctcctaaatattgatgagtcttctttgtcagtgaaagttttctctccagccctgtggtggcagtatctctactccagtctaagtggattaaccctgcactgcctgaggaaactgtaatggcttcccctgaggcaactgccatgcaagataatgctgattccttcaggacccaccctaccacccctctttgttattagatctataactacactcaagtcccagcaggcgaggtgaggtatgaaggtgacccatgacaaggtgcactacactccaaaatcatgacttgagttttctaatttacacaagcaggaatccagagaatatgtataggaatgggtactaaggatgtgagataacggtggaaggcacgtaaagttggattaggccaaatttattgacatgggcccactaagcagagattctggacttaatgttgcatctcagggaattaggaaggcctctaacagtttaattggttggctgaaacacagaccaaaagatggcccacagtgagcaaactagaaatttcagacttgccctggtttaatgtagaagaaaggagattgaaatgctagagtgaatttgtcatttaagacatactcaccaacactgggagagttcagaagacacagatctcactattactttgaggaataaatttgtgaggggaacctcagcatccttgaagggctctgtgatcactcttctctgtaggtgacaccttacagcaggacctgcagtcactgaattagaaaacctaaatacaatgggaataattggatcctggggtggaaggggccaatgggcagcactcaactgccaaaggcaaggtaagtgtggttaccataagggacagcagagtcaaagcagcagttagaatagtatgacttgcacagacctatggtgttggctagtagattatagtgttcctagatgtgatatagatagaatgcctaccaaattcttgaactgcataagtggaaaagttctaggtcaagtgaacaaaagtctaacctgaataataaaaacagagtcacggcctctcaatcaattcccagacttgagcaggtttacagacccagcactccttgaatgaaggggaggctcagtctccttgaggaaggactctggtacactgccaagaatactgccactctttctctcagccttccccaaagggacatatggcctttctatcagaataaatgtgcactgaagaaaaataattaatcagacctttcagggactactggacaatggctctgaactggcactaatttcaggagacccaaaatgtcactgtggtccaccagtcagagtatgggcttatggagggtcaaatgatcaatggaattttagctcaagtccatctcaaagtggatgcagaggatctgtgagactatcttgtggttatttccccagtcctggaatgcgtaattggaacagatatattgagcagctagcaggatcttcacattggttccctgacctatggagcaggggctactgtagtgagaaatcctcctgtaatcctctgtgaataactgttctccttttgtgagatagctcttggcctactactgggccttagtagatactgaatgcttagccacagaccaccaagttgccatgtgacctgaactgcccatcatgaactaggtgttatctgacccaccaagccataaagttgggtatgaacaatggcactccatcatcaaatggaagtggtatatacatgatcatgtctgagcaggtactgaaaacacatgtaaattacatgaagaagtagcccaaatgtccatggtgcctgtttctgctaccctgccttctctctcccagcctgcacttatggccccattgggagttccctatgatcagtttacagaggaagaggagtcttgggcctggtttacagacggttctgcacgatatgcaggtactacacaaaagtggacagtcccgatctgagatacccatgaaggacagtgggcagaattttaggcagtgtacctggttgtggactttgcttagaaggagaaatggccaggtgtgcaattatatgtcaagtaatgggctgtagtcagtgctttgtccagatagggacttggaaggaacatgattagaaaacaggtgacaaagaaatttggggaagaggtatgtggacagatctctctgaatgggcaaaggatgtgaatatatttatgtcccatgtgagtgctcaacgaagggtgacctcagcagataaggatttcaataatcaagtaaatatgatgggccgggtgcagtggctcacgcctgtaatcccagcactttgggaagccaaggcgggaggatcacctgaagtcaggagttcaagaccagcctggccaacatggtgaaaccctgtctctactaaaaatacaaaaattagccaggcatggtgatgcgtgcctgtagtcccagctactcgggaggctgaggcacgagaaatgcttgaacctgggaggcagaggttgcagtgagctgagattgtgccactgcactccagcctgggcaacagagcaagactccatctcaaaaaaaaagtagatatgatgacctgttctgtggataccagtcatcctttttactcagccacctatgtcactgcctgatgggctcatgaacaaagtagccatggtggcagggatagaggctatgcatgggctcagcaacatggacttctattcaacaaggctgacctggctatggccactgctaagtgcccaatctgccagcagtagagacaaacacagagtcctcagtatggcagtatttcccaggatgatcagccagctatctggcagcaggttgattacattggaatatgttcatcatggaaggggcagcgttttgtccttcctggaaggaaactgaactactgcttcacaatggaggtatggaagagtgtgtctggaatacaatagatcccttagagtgtctcttagtattaccaggccctatgattctggtcaatgggaaactacagcaacccaatccatgcaggactactagtggcccaggctcttcaggaataaaggtttgggtcacctcatcaggtaaagaaccacaatcagctgagatgcttgctgaaggcaaagtcaatacagaatgggtagtagaagaaggtagttatcaataccagccaagttttgttatatcatgttaggtggaattatgacctcatttttgtctctacttagagataaaggagatgtgtatgatgggtgctacattgacaaggggtggacttgtcatggttaattttatgtatctactttacttggtcataaggtgcccagatatttactcaaacattattctggttatttctgtgaaggtgtttttgaatgggattaacatcgaagtcagtagactgagtaaagcagattgctctccctaatgtgggaggcatcatccaattagttgaaggcctgaatagaacaaaaagactgagtcttccccaagtaagaaagtattcttgctgcctgtctgcctttggactggaacatcagctttttcctgctttcagtcttgaactaaaacagtttagctcatccagagagacagagagagagagacagacagacagaatctcctattggttctatttctttggatatccctgactaacacactcatataagtagaatcatataatatctatccttttatgtctggcctattcacttagcgtattttcttttttttttttttttgagatggagtctcactctgttgcccaggttggaatgcagtggtgcgatctcggctcactgcaagctctgcctcccgggttcatgccattctcctgtctcagcctcccgagtagctgggactacaggcacccgccaccacgcttggctaattttttgtatttttagtagagatggggtttcactgtgttagccaggatggtctcaatttaccgacctcgtgatctgcctgcctcagcctcccaaagtgctgggattacaggcatcagccaccgcgcccggccttcacttagcatattttgaaagttcatcatgttgtggcactaatcagagatataaccttttttaaatgggaatttttcttctagaatatccaatgtctagacttcagttcaccaaactgccagtttggtgaagtctttcatccagccttgatggataagggaattcttcttggacatgatgtttacctgagacttaacgaatgagtcaggtgaaagtggcagtagagggtagctagaaaaatgttccaggtagaagaaatagtatctatttaaaagcctggtatgagatataatggctgtatttagtgacctgagaatttcttagtatggatggagcttaaagagccaagtggcaagagactgtattagagagattggtaaggaccacatcatggttaattcttggtgaaaaaagaatataaaaaataccaaagagaggaactattccttcccccattactcatggggtgataagactttatgtcatgtcttttaatcaggacaatttgttgaattatccagcaaacccagattaagaatgaagacttcctggaccactaaacttaaaggtcaaaaaggcttgggaatcaaggtgctgatgaggagaattaactcttggatctactctgcccttttctcagtattttacctttttcttaaagtcactgtgttctctcagaatgccttttacaatgtcttgctaccataggtacttaataaattttgctctgaaaatttggtcatatatcaacctttttatgttatgttaagctctaggagaggtggtattttttttctttctttctttctttccaaggagaccagcttacctttactttgccattctgaaaaaagagagtccactgatggccatcttgactgctggagatgaggaactccttcacatacatgctggtaagcagagattttactccctgagtagttactcctgtgactttcattgtcttctggaagtccacttgcagccactcttttggattattcacctgagggcaatagagttggactagtagcctcttggtcaccatttactcccagaaattcccaaatccctcttaaccataccacagcacttctcactctactttcttttttgagacggagtcttgctctgtcacccaggctgtagtgcaatggcatgatctcagctcactgaacctctgcctcccgagttcaaccgattctcctgcctcagcttcccgagtagctgtggttacaggtgcccaccaccatgtccagataattttatatttttagtagagatgaggtttcaccaggttggccaggctggtcttgaactcctgacttcaggtgatctgccacctaggcctcccaaagtgctaggattacaggcgtgagccactctgcccggcctccttccttccttcctttctttctttttcttccttccttctttcctttctttctctctctctctctctctgcctctttcagacagagtcaggcactgttgcctgggctggagtgcaatagcatgatctcagctcactgcaacctccgcctcccaggttcatgcgattatcctgcctcagcaaaagagtgatctagaactcctgaccttgtgatcggcccgcctcagcctcccaaagtgctgggattacaggcatgagccaccgcacccagcctccactttctattggctagtcagtctctcttattcaactctaagcaacttcagggccaaaatttttcacaattcacctttgtatccctaggctcatcctagggatactaagatgtgcagtaaatgtttacttttcattgatgtaatgagaaacctggaaagaaagctaattgttgatatttatctgtaaaatggactttagcttctacaattctttgacagatattagctcagtactagatatagagattcttcttccaggaggttcaattagagatcatttcccccaaatgcctgtgtggttgtctgcccataaccaaacttccttgacacactttttagaactaacagttgacagaaatacctcagaagaaacagtcaaggccttccccgattttttccccaaccactgctctgagtcagttaaacagtaaatctgttgcctcttacctgaggtctccaggcattactcctcccttggaggtgaagtcgagcttttgaaggagaccaggtggcaaacatattggtaaagtaggatgaagcagtaatctgtgcatctgatattgctttactctccattcccaatggcatgctgcaacctcaaagaaaagaaaaaagaaggttatcacaaggacatgcttcagcctcagttatactgagcagcttccactgatattctagggctactgtcatcataatatcatttctcaggttttaacttttgcacagattctgttattggttttttgttttgttttgttttgtttttgtttttttgagatggagtctcgctttgtcacccaggctggagtgtagtggcatgatctcagctcactgcaacctctgcctcccgagttcaagcgattctcttgcctcagcctcccgagtagctgggactacaggcgcacaccaccacacccggctaattttttgtatttttagtagagttggggtttcactatgttagccaggatggtcttgatctcctgacctcgtgatccacccgccttggcctcacaaagtgctgggattacaggtgtgagccaccacgcccggccaattctgttattgctatctgttttccagccagctcttcccactttgtgtgactctttaattttctttgtttcttttcttcttctacttttattttagattctaggggtacatgggtaggtttgttgcatgggtaaattgcatgtcactgaggcttggtgtatgaatgatcccctcactcaggtagtgagtgcagtacacaatacataaccttctaacccacacccccctcccaacctctcccctcctgagtgtccatcattgtgtccatgtgcatttaatgtttagctcccacttatgagaacacatgatatttggttttctgttcctgcattagttcatttatgataatggcctctagctgcatctatgttgctgaaaaggacatgatctcattcttttttatggctgcatagtattccatggtatgtatgtaccacattttctttatccaatctgttgttgatgggcatttaggttgactccatgcctttgctattgtgaatagtgctgaaatgaacatatgcgtgcatgtgtctttatgacagaatgatttatattcctttgattatatacccagtgatgggactgctgggttgaatggtatttctgggtttgcccaggactatgctggttttagcactgacaattttgtgtcctgataccgggaacccctcccccagtctcaggataactagaacagttagtcaccctacccatggttgagggaagaaggatatgggatgacttggcacttactatttaaatcacagcccatcaactccatgcgaagagtgctgcgaatgctataatgagttgggtgcaaacggatgtatcgagcaataattggagggttaaaaatattgtgttttatcccagatgaatccacattgccaaagaagacctgtatggagagattagcacaaatacatggaaagtgaatacagagtaaaaagcaatttctgtcaatcatatcttccttctaatttgctttgtgcgtttctcaacagcatccaacatctacataagacaactatggttagatggatgttacgatggtagacacaaaggaggaaagcaccaagaagaagtgggaacaaaggaaattattaggtctggggcaagtgaagttattttctactttgagttcctgtaaaaggctcataaaagttgaggaagccatttgggctctgctactccagcatggtccacagaccaggagtagcagcatcacctgagggcaattcaaaatgcagcatcaggagaacggtatcagtgagttgatgggataggaggtccctagctcttgttcccccacaggaacaataatttgacaatgatctatggacaaaagtgtctttgtgggagccttgggattcaggtaggaggttgagaaaccctggtagagctcaagaacaaagatgaatactttaataaggcaggcccacattctagcggcaggcctgtcaactgtagttctggttgtggacccagaagcagcccaccaccctggggacttagctccagagttgtttgtatgtggtcctaccactatccctatctgcccaggaatctgggaggagcaactcccattggcaaccccagtaacagggctcccaactgtggactctgaagcagccctgtacctaaagcagcttcagtaccacactaccatggtcttggggaagttttgcctacttaggaaacaggtgggagtcatgccagtccacctctggaagcaggcccaccaactagacctgactgtggactcagaagtaaccctgtgagccaactccagtcttgctgtaccatgttctggagacagtcctgcctgaatccacacttacctgtgcccccataacaggcccactgactgtgggcccaagtggggaccctgaagcagccctttgacccagctccaggcccactgcatcatggtctgcaggcagtcctgcccactcaaggacccagtgagagctacacctatccaaagccctggtaatgggcccattgtctgagtacccaacttcagaccagaagaggtgtcagctcactccaatgcacagataccaatgctaggctatgtggatcatgaagaatcaggcaaatatgacatcaccaaagggaactaataaagctccagtaaccaaccctgaagaaatggagattcatgaaatttttgacaaagaattcaaaataatcatttaaagaagctcaattagctacaagaggatacaggaagacgactaacaaaatgaggaaaacaatacatgaacaacattagaagtttaataaagaaataaaaaccataaaaaagaaccaaataaaaatcctgtagctaaagaatattgctgaatatagctgaagaatgactgaactaaaaaatttaatagcgatctttaatagcagactcaatcattcagaagaaagaatttgtaaacttgaagacaagtcatttgaaattatctagttagcggaataaaaagaacaatgagaaagagtgaaggaagaacagaggacttatgggacatcatcaagcaaaatgatagatgcattatagaaatcttaaaaggagaagagagagagaaaggaaacttatttaaagaaataataggtgagaactccccaaatctatggaggggaagtgccatctggattcattaagcccaaagataaccaaatacattaaacccacagaagtctacagtgagatgcattataattaaattttcaacaaagacaaaagagaattttggggtagtaagaagaaagtgaattgtcacctataggggagctccataagactatgagtggatatctcagcagaaaccttgcaggtcaggaaagagtgggatgatatattcaaagtactgagagaaaaaaatccaatcaacaatactttatctggaaaaactgtcctttaagaatgaacacaaagataaagcctttctcaaacaaaaactgagggggtttgtcaccatgagacctgccttataagaagtgctaatagttcttcaagttgaaataaaaaaaaaacagtaacacaaaagcatatgaatcctttcactgctaaaggtaaatataaagagaaacatagactattgtaacactataatgattgttataaatcactattaatattaatttataaattaaaagacaaaaatagtaatagtaactatagtgacagaaatttgtcaatggaaacacaatatagaaggaagtaaaatatgacgtcgattacataaagttgtggcggggggaatgagtaaagtatagagtttctgtatgtgattgaaggtgttgtcagcttaaaacagactgccataactataaagtgttcaatttgatccctgtggtaacccccccgaccgcccccccacacagtagatatacagaagataaagagaaaagaatcaaaacacatccaagcaaaaatcatcaaaccacaaagaaagaaaaagaggaaaggaacaagaaaactacaaaacagaaaactattaacagaatggcaacagaaagtcctaacctatcaataattactttaagtgtaaattgactaaactccccagtcaaaagacacagagtaactgaatgggctttttaaaaagccaacaattcagagatgggaagtaagaaacaaaaataaacaggacccaactacatgttgttgataacagactcacttttgatttaaggacatacataggctgaaagtgaaggggtggagaaagttatgccatgcaaactgtaaccaaaagagagcaggggtggctatacttgtatgagaaaaaatagtctttaagtaaaaaactgtgacatgagacatagaaggtcattatataataaaagggtcacttgaacaggaagatgtaataattataaatatatatgtacccaacacgaaagtacctaaatatataaagcaaacattgacagacatggaaggagaaatagataacaatataatatagttgacttcaatactccactctctataatgaatagatcatcccaacagaaaatcaataaggacaaaacagaactgaagaataaaatagacccaatggacctaaaatgtatatacagaactttccacccaacagtagaattatcaagcacacacaaaacattcttcaggacagatcacctttcaggtcacaaaacaagtcataataaatttaagaagattaatatcataccaagtatattttctgaccacaatggattgaaactacaaatcaataacaataagaaaacacgaaaattcacaaatatgtggaaactaaacaacacattcttgaacgaccattgggtcacagaagaaaccaaaatcttgataatataccaaaacttaaaggatgcagtaaaagcatactaatagggaaatttatagcaataaatgcctatatttaaaaagaagaaacatatgaaataaacaacccaacttatcacctccaggaactacaaaaagaagaaaaaaaaaactaagcccaaaggtagcagaacaaaggagataataaatgctagagcagaaataaataaaaaagagaataaaaaaacaattggaaataactgacaaaactaagagttgatttttttgaaaaaataaacaaaattgacaagtccttatctagactacgaaaaaaagagagaagactcatataaataaaatataaatgaaagaggagacactacaactgatgtcacagaaacagacagaaccataagggactattataagtgtcaacaaattggttaacctagaggaaatggataaattcctagaaacatataacataccaaaactgaataacaaagaaatagaaagccttaacagactaacaacaaatagggatattaaatctagtaatcaaaaaccttccaacaaagaaaagcccaggaccaatggcttcatggatgaattccatcaaacattcaacgaagtattaataccagtatttcttaaactcttccaaaaaatacaagagagaacacttcaaaatacaatttattagccaacatcaccctgataccatatccaggcaaaaacaacactagaaaagaaaactacaggccaggccaggtgtggtggctcaagcctgtaatcccaacactttgggaggctgaagcaggcaaatcacttgaggtcaggaattcgagaccagcctggccaacaaggtgaaaactcatctctactaaaaaaatacaaaaattagctgggtgtgatggcatgttccagtagtcccagctactcaggaggctgaggcaggagaatcgcttgaatccaggaggtggaggttgtagtgagccaagatcataccaccactgcactccagcctgggtgacagagcaagactctgtctcaaaaaaaaaaaaaaaaaaaaagaaagaaaaagaaaatgaaaagaaaagaaagaaaactacaggccaatatccctgatgaacacggatacaaaaatcctcaacaaaacaccagccaaccaaattcaacagcacattaaaaggatcattcatcatgaacaagtggtatttatccctaggatgcaaggatggttcaacatgggcaaatcaatcaatgtgatataccacattatcagaatgaaagatgaaaaacacatgattatttcgatcaatacagaaaaagaatttgacaaaactagatatccattcataataaaaactttcagcaagatagatacagaaggaacttaacacaataaagaccatataggaaaagctcacagctgatatcataaccaaatgtggaaaaactgaaggtttttccttttagatactgatatggtttggctctatgttcccactcaaatctcaccttgaatcgtaatccccataatgcccacatgtcaagggagggacctagtgggaggtgattggatcatggggatggtttcccccacgctgttctcctgatagtgagttcttatgagagctgatggttttataagtgtttgacagttcctccttcacacactctctcttgcctgctgccatgtaagatgtgcctatttccctttctgctatgactgtaggtttcctgaggaaagaacatgggacttatgggacagccatgcagaactgtgagtcaattaaacctcttaaagcttcataagtgaaggagaaatgaaattctttacagacaaccgaatgctgagggattttgtcaccatcagacctgccttacaagagctcctgaaagaagcactaaacatggaaaggaacaactggtactagccactgcaaaaacataccaaattgtaaagaacattgacactatgaagaaactgcattaactaatgggcaaaacaaccagctagcatcataatgacaggatcaaattcacacataacaatattaaccttaaatgtaaatgggctaaataccccaattaaaagacacagactggcaaattggataaagagtcaagacccatcagtatgctgtattcaggagactcatctcacttgcaaagacacacataggctcaaaataaagggatggaggaatatttaccaagcaaatggaaagcaaaaaaaaaagcaagagttgcaatcctaatctctgataaaacagactttaaaccaacaaagaccaaaagagacaaagaagagcatcacataatggtaaagggaaaaatgcagcaagaagagctaactatcctaaatacatatgcacccaatacaggagcacccagattcataaagcaagttcttagagacatacaaagagacgtagactcccacacaataatagtgggatactttaacaccccactgtcaatattagattaatgagacagaaaattaacaaggatattcaggacttgaactcagctctggaccaagcagacctaatagagatctacagaactctccaccccaaatcaacagattatacattcttctcagcaccacattacacttattctaaaactgattacataattcgaagtaaaacactcctcagcaaatacaaaagaatggaaatcataacaaacagtctctcagaccacagtgcaatcaaattagaactcaggattaagaaacacactcaaaaccacaaaaatacatggaaactgaacaacctgctcctgaatgactactgggtaaataatgaaatgaaggcagatataaagatgttctttgaaaccaatgagaatgaagacacagcgtaccagaatttctgggacacacttaaagcagtgtttagagggaaatttacagcactaaatgcccacaagagaaagcaagaaaaattgaaaattgacaccctaacatcaaaattaaagaattagagaagcaacagcaaacaaattcaaaagctagcagaagacaggaaataactaagatcagagcagaactgaaggagatagagacacaaaaaaaccttcaaaaaatcattgaatccaggagctggtttttttgaaaaaatcaacaaaatagatagacttctagccacactaataaagaggaaaagagagaagaatcaaatagatgcaataaaaaatgatattggggatatcaccactgatcccacagaaatacaaactaccatcagagaatactataaacacgtctatgcagataaactagaaaatctagaagaaatagataaattcctggacacatacaccctcccaagtctaagccaggaagaagttgaatccctgaatagacctataacaagttctgaaattgaggcagtaattaatagcctaccaaccaaaaaaagtacaggaccagacggattcacagacaaattctaccagaggcacaaagaggagctggtaccattccttctgaaactattccaaacaatagaaaaagagggaatcctccctaactcattttatgaagccagcatcatcctgataccaaaacctgacagagacacaacaaaaaaagaaaatttcaggccaatatccctgatgaacatcgatacaaaaatcctcaataaaacactggcaaaccaaatccagcagcacatcaaaaagcttatctaccacaatcaagttggcttcatccctgggatgcaaggctggttcaacatatgcaaatcaataaacataatccatcacataaacagaaccaatgacaaaaaccacatgattatctcaatagatgcagaaaaggccttcgataaaattcaacaccccttcatgctaaaaactctcaataaactatgtatcggtggaacatatctcaaaataataagagctatttatgacaaacgcacagccaatatcatactgaatgggcaaaaactggaagcattccctttgaaaactggcacaagacagggatgccctctctcaccactcctattcaacatagtattggaagttctggccagggcaatcaggcaagagaaagcaataaagggtattcaaataggaaaagaggaagtcaaattgtctctctttgcagatgacatgattgtatatttagaaaaccccatcatctcagcccaaaacctccttaagctgataagcaacttcagtaaagtctcagggtacaaaatcaatgtacaaaaatcacaagcattcctatacaccaataacagacaaacagagagccaaatcatgagtgaactcccattcacaattgctactaagaaaataaaatacctacgaatacaacttataagagatgtgaaggacctcttcaaggaaaactataaaccactgatcaaggaaataagagaggacacaaacaaatggaaaaacattccatgctcatggataggaagaatcattatcatgaaaatggccatactgcccaaagtaatttatagattcaatgccatctccatcaagctaccactgactttcttcacagaattggaaaacactactttaaacttcatatggaaccaacaaagagccctcatagccaagacaatcctggacaagaaggacaaagctggaggcatcatgctacctgacttgaaactatactacaaggctacagtaaccaaaacagcatggtactggggccaaacagatatgcagaccaatggaacagaatggaggcctcagaaataacaccacacagttacaaccatatgatctttgacaaacctgacacaaacaagcaatggggaaaagattccctatttaataaatggtgttgggaaaactggctagccatatgcagaaaactgaaactggatcccttccttacaccttttacaaaaatcaactcaagatggatcaaatacttaaacgtaagacctaggaccataaaaatcctagaagaaaacctgggcaataccattcaggagataggcatgggcaaagacttcatgtctaaaacaccaaaagcaatggcaacaaaagccaaaattgacaaaggagatctaattaaactaaagagcttctgcacagcaaaagaaactatcatcagggtgagcaggcaacctacaggatgggagaaaatttttgcaatctatccatctgagaaagggctaatatccagaatctacaaagaacttaaacaaatttacaagaaaaaaacaaacaaccccatcaaaaaatgggcaaaggatatgaacagacacttctcaaaagaagacatttatgcagccaacagacatttgaaaaaatgctgatcatcactggtcattaaagaaatgcaaatcaaaaccacaatgagataccaactcacgccagttagaacggtgatcattaaaaagtcaggaaacaacagatgctggagaggttgtggaaaaataggaacgcttttacactgttgatgggagtgtaaattaattcaaccattgtggaagacagtatggcgattcctcaaggatctagaactagaaataccatttgacccagcaaatcccactactgggcatatacccaaaggattataaatcattctacaataaagacacatgcacatgtatgtttactgtggcactattcacaatagcgaagacttggaaccaacccaaatgtccatcaatgatagactggattaagaaaatgtagcacatatacaccatggaatactatacagccataaaaaaggatgagttcctgtcctttgcagggacatggatgaagctggaaaccatcattctcaaaaactatcacaagatcagaaaaccaaacactgcatgttctcactcataagtgggagctgaacaatgagaacacatggaaacagggagtggaacatcacacgctggggcctgttggggggtggggggctaggggagggataacattaggagaaatacctaatgtaggtgacgggttgatgggtgcagcaaaccaccagggcacgtgtatacctatgtaacaaaactgcatgttctgctcatgtaacccagaacttaaaatataatttaaaaaataaataaaataaaaagcatccaaatagaagagaatagtaaaattatctctttttgcagatgacatgatcatacatgtagaaaactctaaagactcaaaaaaaaattgttagaactaatacatgaattctgtaaagttgcaggatacaaaatcaacatacagaaatcagtggtgtttctatacactataaaatatcccaaaggaaattagaaaataatcttatttacaatagcaacaaaagaataaaatacttaggaatagacttaaccaaagaaatgaaagacttgtacaatgaaaatatagaaaacatttatgaaggaaattaaagaagacacagataaataaaagatattccatattcctagattggaagaattagtattgttaaaatgtccacactacccaaagtaatctatagatttgatgtgatccctatcaaaatctcaatggtgttcttcacagaaataaaaaaaaaattttaattaatatgaaatcacaaaagaccccaaggaggcaaagcaatcttttttttttttttttgagacagagtcttgctctgttgcccaggctggagtgcagtggtgcgatcttggctcactacaacctctgcctcccaggtttaagtgattctccacctcagcctccagattagctgggatcacaggggcctgctaccacacctggctaatttttgtattttttcagtagagacggggtttcaccatgttggccaggctgctcttaaacttctgacctcaagtgatccacccacctcagcctcccaaagtgctgggattacaggcgtgggccaccacatgcagcctggcaaagcaatcttaagcaagaagaacaaagctagaggcatcatacttcctgatttcaaaatatactacaagtctccagtaatcaaaatagtatggtactggcataaaaatagacacatcaaccaagggaacagaatagaaaagcccagaaataagttcacacatttacagtcaacagatttttgacaagggtgccaagaacacacaacggggaaaagagagtctcttcaataaatgatattgggaaaactgaatatccacatgcagaagaaagaaattgggcccttttctcacactatacataaaattcaactcaaaattgattaaacacttgtatataagacctgaaactataaaactcctagaagaaaacaggaaaaaagctacctgatattgatttgggcaataatttttttatatgacaccaaaagcacaggcaacaaaaacaaaaatagaaactgggattgcattaaactaaaaactttctgcacagcaaaagaaataatcaacagagtgaaaagacaacctatggaatggatgaaaatatttgcaaactgtatatctgataatgggtaagaaactcaaacaactcattagtaagaaacaacccaattaaaaatgggcaaagaacccaaatagaatttttcaaaagaagaaatataaaaggccaacagataaatgatgctcagcatcactaacccacagggaaatgcaaatcaaaacacaatgagatattccctcacatctattagaatagtgtcttagtctgttatggactataacttattatggactctaatttattatgctgctatgacagaataccacagactgagtaatttgtagtgaacagaaatgtatttggctcacagttctggaggctgggcagtccaagatcaagaggccagcatctggcaaaggccttctttctatatcataacatggcagaagggcaaaaagagggcaagagagagcaattcaaattcacagccttaggtgcttttgtaatcggcattaatccattcatgagggtggagtcctcataacctaaacatctcccattcggccctacctcccaacactgtcgcattgggaattaagtttccaacacatgttttttggggaaaacactcaaaccatagcaaatagctattatcaaaaagacaaaagatgacaaatgttggtggtaatgtggagaaaaggaaacctttgtacactgttgctgcaaaaataaattggtacagccattatgaaaaacagcatagaggttcctcaaaaaaactaaaaatgaataccatgtgatctggcaatctcacttctgttatatatccaaaggatacaaaatcagtatgttgaatatctgcactcccatgttcactgtaacagtattcacaatagtcaagatatggaaacaacctaagtgtgtccattgatggatggagggataaagacaatctgatatatatatatctgatggaatattcccacaattataaaatattatttggccttaaaatagaagaaaatcctcccacttgtgataacatggatgaacctggaaaatattatgctaagtgtaataagccagacactgaaagaaaaatacttcatgacctcatatgtggaatctaagatggtcaaactcataaaagcagacagtagaatcttaggtgctagggactgtggtgtgggggaaacagggagatgttgatcaaagggtacaaaatttcaattatgcaagataaattagttctggagatctaatgtacgatatagtaactatagtaaacaatattgtatacttgaaatttgctaaaagagtaggtcataaatgttctcaccacaaaaaaaggtagctaggcaaagagatagatatatcttaattagcttgcttgtggtgaccatttcacaatgtatcaaacatcatatatgaaaaacaaaatatatcaaaacatcaagttgtacctcttaaatatatgcaacttttgtcaattatacctaaataaagattttttaaaagagatgcagttccttgggcaccatgtcagttctactgaatcagaatctaaattttaataagacccttagctgtttcataagcagtaaagtttgaaaacactggcagaggacacagtcagctgtgaaagagtactgggaatgcacagcctatcctccaccctggtctcagaatgatcttctaagaatgtagtgtgtgtgtgtgtgtgtgtgtgtgtgtgtgtgtgtgtagagagagagagagtctataatgtgggcattaatgaatgatcccactgtatgaattaatgagacacgttagtatccaaaacgtgggatttgacaccttgacatgtctgggttctggacaaaattacataacatattcaagagaaagggaatacagtttgagaaatatggtagtaatgccaattcgaaaggcctagatttaaaccatggcatacagcataagaaatactgaaaatgatatcactcatagaacacctgggattttttatctgcttgaatacactaaaataggtatcagtgtaagtctattatatgatcacacatcagtttagtatcatgggaattttttttttttttttttttttgagacggagtctcgctctgtcgcccaggctggagtgccgtggcgcgatctcggctcactgcaagctccgcctcccgggttcacgccattctcttgcctcagcctcccgagtagctgggactacaggcgcccaccaccacacccagctaatgttttgtatttttagtagagacggtgtttcaccgtgttagccaggatggtctcaatctcctgaccttgtgatccgcccacctcggcctcccaaagtgctgggattacaggcataagccaccgtgcccggctggaaattttaaaaaattattctgccatgtagcatttttttcttcccagggaatagaaaatattaataaatttgtggctttgttcctaaacaagttataccagaaatcacaatattcttttttataaatatatctgtattggggggttaaaatagaatgaataacatattcaaaccatataactttgtttaaagatttaccaaggattttgttttctctgctgctctcctttctatataggagaaaatttgaccttctatttatggcctttagatttggcttttgcaagagctagtataattaaatcccaggtaataagtaaacactccaaaccacctctctggggtgggatggtgcaaaatcatttgtagaaagctacctgtttcgtctagctacctcctgcgtaagtgggtactggcagctcttgggggcctgaattttatgtctcattttgactaaaataatgaatgtgtagtctgactccaaaaggggatagtcatctttgatttgagataggtctcgttatgtttccaaatttctgatttaaaagaaatttgttgctacagaataatcattgagaagtagaagaagttttgaaatgaagtatatatcaatgtaaaatgccattccgttttatcagcatccaaaaagtttatgttgaacttaagagtattatatagctaataaatgttgatcattaacttgtgactaaaccgtatgtgctaggaagaatatgatctctcagtgatgtccacattttaatccccagaacatttgactgtgttatgttgcatggcaagagggatttaaggttgcagatggaattaagtttgccaattagctgatgtcaaaatagggagaatatcctggattatccaggtcggcccaatgtaatcacaagaggccttgaaagtgagagagagaggcagaagaggagagtcaaagggagacgtgactacttaagaatagtcacaaaggtgcaatgttactggcttcgaagatggaggaaggaagccatgagttaatgaatgtgtgtggcctctagaagctggaaaagaaaggaaaaaggatccttttctttttctttttttttgagagggagtctcactctgtcgcccaggctggagtgcagtggcgccatctccgctcactgcaagctccgcctcccgggttcacgccattctcctgcctcagcctcccgagtagctgggactacaggcgaccgaaaaaggatccttttctagagcttccagaaagaaatgcagccctgatgacaccttgattttagcccagtaagacttgggtcagtcttctgccctatcgaactgtaagataataaacttgtgttgttttaagccatattaagtttgtggtaatttgccaccccagcattagaaaactaataccctgtatacattggctttgccttcattcgttactcaatctttgtgccttgattagaaacctgcttggggagacaatttattaattcaacaaatagttaatgactgactatacaaatcctagattccatatattatgtgccaggcattgtgctagaaggcctcactggtaaattctactaaatgtttaaggaaggattaacattaatccttcttaaactcttccaagagacagaaaaggagagtaaactttacaactcatactatgaggccaccatatcttgatatcaaagccagacaaatatatcacaagaaaagaaaattacaaattgcatgtaattgaatatgtgagtataatattcccttatgcatctaggtgcaaaaatcttcaacaaaatattagcaaaccaaatccagcagcatgttataaaggttatagcccatgctcaagtggaaattatcccaataatgcaagactggttcaacataagacaatcaatcccccagtcaactccacattaataaaatatagggaaaaaaacccctgcaagttcattctggttgatgcagaaaaatcacttgataaagctgagcaccttttcatgaccaaaaaaaaaaaaaaaaaaaaaaaccactaagcaaactagaaatggaagagaaaatccacaacatgataaagagcattcataaaatacccaaaactaacatcacactcaatggtagaagactgaaagatatttccctaacattagaaacgagacaagaatgcctgcttttactgcttctattcaaaattgtattggaagtcttagccagagcaattaggaaaaaaagaaataaaaggcatccaaattgaaaaggaataagtaaagctatcttattctcagatgaacatgagcttatgtatggaaaaccccgaagaatccacaaaacactatagagctaataaacgaattcagcaaagttgcaagatataagatcaacgtgcaaaaatcagttgtatttctacacactagcaatgaacaatctgagatgaaattaacaaaataaaaaataattctatttaaaatagcatcaaaaagaataaaatacttaggaataaattcagctaaggaggtaaaagacttgtacactgaaaactacaaaacattgctgaaagatattagagacagcataaagaagtgaaaatatatcctgtgttcatgaattggaagacaatattattaagatgatagtactacccaaagtgatctacagatttaatacaatctgcatcaaaatcccaatggccattttttttttggcagaaatggaaaagccaatcttaaaattcatgtgtaattgtgcaagacctcaaatagccaaaataatcctaaaaaataacaaagctggataactcacatttcccaaattcaaaacttcgtataaagctacagttatcaatgctttgtggtactggcataaggacagacatatatataaatggaatagaattaagaagcaagaaataaacccataaatatattcatgggtatgtacctcaaatatggatggttcccagcttataatggttggacttacaatattttgactttatgatggtatgaaagcaacatgcattcagtagaatccatatgcataaaagtacttaaagtacacatacaaccattctgcctttcactttcagtgcaatattgaataaattacgtgagatagtcaacacttcattataaatttggctttacgttatatgattttgcccaactgtagcctaattgtaagtgttctgagcatgtttaaggtaggcctggctaaattatgatgattggtaggttagccgctgatatggtttggctctgtatccccacccaaatctcacatcgaattgtaatccccgtgtgtcagaggagaggcctggtgggaggtgattggatcatgggggtggatttccccttgctgttcttgagacagtgagtgagttctcatgagatctgatggtttaaaagtgtatgacatttccgtccttcactctctgtctctcctgctccaccatggtaaggcgtgcttgcttcccctttacctgctgctgggactgtaagtttcctgaggcctcacagtcatgcttcctgttaagcctgcagaactgtgagtccattaaacctcttttcttcataaattaccaagtctcaggtagttctttatagcagtgtgagaatggactaatatagctgtattaaatgaatttacactaataatggttttaactaacaatgggtttatcaggatataataccatcccaagttgaggagcgtctgcaatttaaaacatctgttcaaacaaacacttgtacaggagcgttcatggcagcactattcacactatccaatcagtaatgtaggggatcaaatgccacctcaaaatatgccactttggcatattgattattttgtgtttaaaggcacttgaaagtagcagatgcaagaagggcacactgaccttcctttttttttcatgaaaggaagagatgaaactctgatgtgaaaggtattatctgtataccaggaagaagaaacacattcttattgccagagatggggagtccaggcttgagggaaagctgcaccaaaaaaccttgttacacaactcttaccttcttagtgacttttccacaattaactctcctagcccaaaccccaatgtcttgttatgttttcacaatttaccatacttttcccaccctagtatgtaagtattcagctgtaattaatcacttgagtcttcgtatttcttatgagggctcccatgtacatgtaaaaaatgccaaataaaattttgtatgcttttcttttgttaatctatcttatttaagtcctagctggagaatctaagaggatagaggacaacatttacctcccctgccatggaaatcatttaatgaactgttcatcaactgatgagtagataaacaaaatgtggcctatttatacaacagaatatttctcgttggtgttgtctcaatgcttaacacagtatacctggcactacccttcaatattttttgaagaatgagcacatgaattatcatgtctccagctaggttcaccagtatgagtaatatgtagtgagtgtctactgtgtgccattttactacctaaactttttatggactctgtcccctagtcttatctaccaatgccattgtcttagttgagatatctgtcatttcttgactggtataatacagcagctttctaattccaatctcagtcctctctgttctattctccacacacaatcctctctgttctattctccacacagcttccagggtgatatttctagaggcaaatcagaccacgtcactcccaagctgaaagaccacagtgggttcagtgtagcctacagggtattctaaaacctgagcatggcataatagaacctccatgtcttggctcctgcctacctctttcccagccacatcaaccactactgctccactggcatcgtactctccagccttaatgaattggttgcaactcccctcctcccaccggtgccttggcttctcatcatgctacagattctttaacacacacattgtcctccaagaagcttgccagatccactcctattctttcaacgaaatgtttattgaccactctttatacactatgaccaaataggatttatcccacaaatgtaaggttggttcaacatgtgaaaatcaatttatataatacaccatattaacagaatgcatggcggagcgggggcgggggagggggctcatggtcatcttaatcatgtacaaaaaggatcatttgacaaaacgcagtaccctttcatgaaaataaattcaacaaaccaggaacagaaagaaacttcttcaacctgatagagggcatccatgaaaaacccagagataatatcatacttaatggtgaaagactggttgatttccccctaagatcaggaatgccacttgtaactcaacatcgtactcaaagttctagtcagggcaattagtcaagaaaaagaaataaaaggcatccagatcggaaaggaacaagtaaaaccatctctattcatagatgcatagatggcatgttcttatatagaggacactaaagagtccaacaaaagaaaaaaaaaaaaaactgagacggtttggctctgtgtccccacccaaatctcatgtcgaattgtaatccccacctgttgaaggaagggcctagtgggaggtgattgaatcatgggggcggacttcccccttgctattcttctgatagagcgctcacaagatctgatgattgtttgaaaatgtgcagcgcttccccctttgcgtgcgttctctctctcttcctcctgctccaacatgtgaagaaggtgcttgcttccccttcgccttccgccatgattgcacgtttcctgaggcctgcccagaagcagaagccttgtacagcctgcagaaccatgaggcaattaaacctcttttctttaggaattacccattctcaggcagttctttatagcagtgtaggaacggactaatatgccaaccctgtctgagtatgctcagcaaagcatattcggctcagcaaagttgcagtatccaagatcaatctgcaacagtcggttgtatttctacaccctagcaatgaataacatgaaaataagattaaggaaatgattcattttacagtagcatcgaaacaataaaatgtcgaggaataaatttaactaaaggtgtacaagatgtatactctgaaaatttcaagacgttgctaaaataaattaaagaagacctaaataaatcgaaaggcattttgtgttaacggattgggacacttaatattgttaagatgcccataatctccaaggcaatatacagattcatcgtgatgcctgtcagaatccaacctgccttctttgtaaaaactgacaagctgatcctaaaattcataagaaaatgtaaggggctcagatagccaaaacaatctcagaaaagaaaaaagttgaaggactcacacttcccaatttcaaaacgtactacaaaaccgcagtaatccgaaaagggtggtactgccatcgtgatcgatacattaggtcaatgttacagaactcagagtcaggaataaacccatatatttatgtaaagtttattttcagtaagagttccggcacccctcaatgggtggaggggaagaataatcccctcaacaaactgcgctgggacaactggatagccacatgcaaaagaaggcccctggacccctacctcacatcatgtaaagaattaattcaaaatggatcacagatctaaatgtaagggctgaaactataaaactctaagaagaaaacggagatgtaactttgcacgaccttggattaggcaacagctccttcagtatgacaccaaaggcaaagccacagatatcttttcatttggcaagttggactacatccaaatgtaaatcttttgggcaacaaagggctctatccagaaagtgaatgggagaaacatttgcaagtcacatatctgataagagtctattttccagaatatatgaataagttttagaagcccacagccaaaatacaatcaaccgaattaaaaaatgggcaaagggcttgaatagacattcctccaaagcagaggtacagagggccaagaagcacatgaaaagatgtcttagtctgttttctgttgccataattgaatacccgacactgaacaatttataaagaaaagaaatttatttcttaccgttctggggactgggaagtgacccggcatctggggacggcagagggtatcacacggcgagagggcaagagcgtgtatgtcgtttcaggcctctcttcctattcttataaagccaccagtcgcatcctgggggtctcaccccgatgaccttatctaatcctaattaccgtctcagaggctgcgcctccaatcaacatgtgaatttggggattaagtttccaagacacacaatttgggggatgcactcaaaccacagcaacatcattagccatttgggaaatacgaatgaaaaccaccatgagatagcacttgacacccagtaggatggctactgtaaacaaaacaaaatgaggcaaacagaaaacaggttttgatgaggctgtgaagaaattgggactctcatgcactactgttgggaatgcgaaagattacagctgctgtggaaatcagtttggtggttcctcaataagttaaacagaattaccacacgagccagcagtttgactgctagaaatagacccaaaagaactgaaaagagatattcaaagaaaaacctgtagagagatggtcatggcagtgccactcacaatagccagaagggggaaataacctgtccatcaactgacgagtgggtaaacaaaatgtggcctcctattcatacaacagaatcgtactcagtcattcaaaggaaggaagtagtgattcatgcctctacatggatgcaccctgatgaaaccattacgctaagtgaaagcagccagacacacacggcctcacatttggtcgtataattccatctataggaaatctccagaacaggctaacctctatggacagaaagcagatggactaggggttgccagggactatcgggaacgtgtgtatgggcgggggcagggggtgtgtgtgggagggtgtgggggctggtagtggtggtgtggaaggaggcgtgcggcaagtgactgcttataggtacaggggtttcggtttcttttcggggtgttgaaaacgttttggaactaggtggtcgtgatggatgtgcaacattgtgaaggcgtggtacccgtcctcccctcgcccacccctttgtctttcccacggtgttcccatccagtagaaagggaaagttcccactggcaaagagagggtcaccagcgcgattccccctgccccgccccaccccacccccacggccctccagccacttctaggcccaggcctgctccctcgaggccaatgggaaagtgatgaggtcacctgacggacgtgtgtcccttgtgaggggccgtcaccacatgcgtgcccgtcgccggatgtgcgtgcccattggtctcggctccctagccaatgaggggctgggccctggtcgctaggatacacagtactggacgcggtaactgtcctcttgagagccatcttgcctagctgggccaagccgagatagcacactcaacgcccagcatgccgaggaggaggagacgccgagggtcctccggtgctggcggccgggggcggacctgctctcgcaccgtccgagcggagctttcgttttcagtgagccaggtggagcgcagtctacgggagggccactacgctcagcgcctgagtcgcacggcgccggtctacctcgctgcggttattgagtacctgacggccaaggtcccggagctggcgggcaacgaggcccagaacagcggagagcggaacatcactcccctgctgctggacatggtggttcacaacgacaggctactgagcacccttttcaacacgaccaccatctctcaagtggcccctggcgaggactagcttctgacacccggcccctgggacctgacaggtccactcgtccacccacccggccccaaatcccccggcctgaacccccggccttaaacaccctccccccacaacccaggccccaaagtcttgggccttcattaattctgtcaataaaatgtttcaaggaagccatctgcccgcttcagtcactttgccttggggtgggggtgggggggcggtgagatgggttggggggttgtgagacctccacagctggagggatggagaggtggtgggggtctggggttgggtgggagccagggatggcacagaggagcagtctctccgggtgacagtgcaggggagtggccctgggtgggaaggggacacccccgctggttctgagcaagtcagggcctgcccgggaaagtcctcagcatgatggtgttcgttggggcgggtgggcctcaagaccatgactgcagtgttgcgacaggacggacttctaaggcaaccggggtggggacggagaggtggacccggtgcttggcaaggggccctggaccggaagacggaggactgagtagtcggggcggggggggggggggacaacagtctagaaatgcgcagacatggaattagggtcacgagtttcgtttgggtcatgttcagatggagaggctgtgggatgcctttagcaacctagaccacttgcattgcagccgagctagcagcagctggtgccccgccaggccccgcgtaccttcccagggtcttggatccgcatccccgagaccctcgatttgcatacgccgctcacagcccggccaggccccgcctccgatcccgctctttgcacctcatcagggcaaggggcaggctcgggctggggagccggcgcgggcacggcggcagcccgccgagggggacgcagggcacgtcgccccgccccggcccgcccgccagctgcggcggcgcgtcgggaagtgcttggggcggcgagcatggcggcagcggctgcaggcctgggcggcggcggcgccggcccgggacccgaggccggggacttcctggcccgctaccggctggtatcgaacaagctgaagaagcggttcctgcggaagccgaacgtggcggaggccggcgagcagttcggacagctgggccgggagctgcgcgcccaggagtgtctgccctacgcggcctggtgccagctggcggtggcgcgctgccagcaggcgctcttccacgggcccggggaggcgctggccctcaccgaggccgcccgcctcttcctgcggcaggagcgcgacgcgcgccagcgcctggtctgccccgccgcctacggggagccgctgcaggccgccgccagcgccctgggcgccgcggtgcgtctgcacctcgagctgggccagccggccgccgccgccgccctctgcctcgagctggccgccgccctgcgcgacctgggccagccggccgccgccgccggtcacttccagcgcgccgcccagctccagctgccccagctgcccctggccgcgctgcaggcgcttggcgaggccgcctcctgccagctgctggcgcgcgactacaccggcgccctggcggtcttcacgcgcatgcagcgcctggcgcgggagcacggcagccacccggtgcagtcactgccgccgcccccgccgccggcaccccagcccgggcccggggcgacgcccgccctaccggccgcgctgcttcctccgaactccggctcggcggcgccctctcccgccgccctgggcgccttctcggacgtgctggtccgctgcgaggtgtcccgcgtgctgctgctgctcctcctgcaaccaccgcccgccaagctgctgccggagcacgcccagaccctggagaagtactcctgggaggcttttgacagccacgggcaggagagcagcggccagcttcccgaggagctctttctgctgctccagtctttggtcatggctacccacgaaaaggacacggaagccatcaagtcgctgcaggtggagatgtggccactgttgactgctgagcagaaccacctccttcacctcgttctgcaagaaaccatctccccctcaggacagggagtctgatccatcccattcacccagtgacttctttttgcccaggcctggactttttgcatcagtcacgttaaccagatgactttgcctgttaccaaacctcatgcatccacgtttgcgtctggggaggaataaaaagacatcgttcccgcttctgcgttttgttattcctactgccgccataggaattatttcgttggctgaacgttaccagcaccccgagaacacattttgatagaatcagagtagaggacatggctgtcttctaaaaagccacgacatgaaaatgacaatccctttcgtctccttcctccgctgcttccacctaacgcagcctcctgcctccgcctttgtttcatagtgaggattttattttgcacggcgccctccctctaaatacctaccctagatgatttcatcctgcccctcacttcttaacatattcctgtgtctttgtaatggccaaatttctccttccactcgtccgcacggtacgtcttcatgggagtcattttattccttacagcttccttgtaaccacagccctaaatccatgataaagctactcttgtactcctcatgtgtggttttggtgtccgtcgtctataaaatgtgactctcttacctacttgtcaggaggccagcagcagaaccagatagctgtttgggctccaggatgtattcgttcctttgaaatttgcgctatgcctcctatgtgggcaacgaacctgcagagatcatctatgatgtgctccgtactcgggtgactgcaatgcagatacatccagtgcagcgggtctggtgccgatgcatcgatttgcattggaattcacggttctggttccattcgcagaggtatatgcagtctggatcacaacagcttttatttgtaatagggattttttttttttttttttttttttttccccccgagatggagtctcactctgtcgcccaggcaggagcgcagtggcgtgatctcggctcactgcaacctccgcctcctgggttcaagcgattctcctacctcaacctccagggtgcctgggattacaggcgtgcaccaccacgctgggctaatttttgtatttttaatagagatggggtctcaccatgttggccaagctggtctccaactcctgacctcaaatgatccaccctcctcggcctcccaaagtgctgggattacaggcatgagccaccacgcctggcctgtaatagggattttgctgcaacttttagttaagtaggtgaaatcagagtgcgtggccctttggtgttgtgcgatcacgtgactgcaaggcagcctccgtgttcccccaaagcaggatggcgttccgtttgagaacacttaagtttccaaggctttctggctcaaatggagcatgccccccaactacgctgttttcttatttattgcgtctttttaatccttttgatggtgacaacaagaactcttcagaatatagcctctttctcaaactttcaaccctggggaaatgcatcctttgggccgaagttgcacacaatcctgatcttcggggctgagatgtaaggacacagtttggagtaggtgtttttgttttgcgtctttttgcaggggagaggtgtggagggttgtcactgtgagttgagtgcctccaaatgggtgggacttgtagggtgttcttttctgcttctatttctatttcgacagtgtggaagtaatgggaagcacaggagaggcccattccaccatcattcctctttctctcacttggctgccaggaagggtcctacggagccctgaacgcctagcccaaattattgtaaaagcggttgaagggctcatgctcctttgctctttggctctttcctggtatgctcctcttaacccgggctgcagacctggccggctggcttcttgtcaggttcaggagttacggagcatgactggtgaccagtttgggatttgggcttcaggagaagcctccttaggcctctggtccaaactccttgcgtcagggaggtgaggggaaggataaccagacggtcaggtagtgggtatctgagcataattctaggaaacactaaaactcctcgttttccatttgccgtgggctcattcatgtatctccctcagaagcttaagagcagtgataactgggccgaggccagatttcagcagttttgagaattccctcgtaatgtatcacatcagtatcaaaagtcaacactgatttctagcatgccaaaagcaaatactttcagaggacatgattagtttgctttttaacttgaaaacaattccaaattcacacttaaaacagtgtaaaccgtcggaaatggtggcagcgaagcagtgaacccttaaaggctgttggggttccccttctccccattgtgaggtattcccaaaaggataaatgttgcttatgaaagaatattttatacgtgaatagtacaaagacaaagacgtttgagaaccgctacgccggaggaaggtggtcaagactgaaattagcgtgttaggcaagatctggttcctaggtgctgaggattctggtgccaaggattaatgttaaccgtgcaggcatctctaccaccgttagaggagaccagcagcccacagactctttctgtcaagggcgggatagaaatgtgttagtctttacagaccacaggtggtctctgttgcacagtcttctttgtttctttgtatgtttgtctttgcaatcctttcaacgtgtaaaaactattcttaactcacagtccgtacaaaagcaggctatgggccaaattctggggctatagtttgcccacccctgaattagaacccaggacatagtagttgctcagtgactgttcaaggaatgaacctcatgagagtagttaataactgtaagtaatttatccttatcgttaaaatacaaagattgaagaataagtgaactaagcattcacctccagattgtaggaaacaaaccaaaagaaaggaaaatagaatttttaaagttttgaacagagattgatgaactagaaacagctctttcaaaaccacgtttgggtttaaaactgagctgattctttgaaaaattaatagaatagacaaacacttgccaactcttgatacagaagggaaaaaaggagaaaagacatatgtgtgtatacagatatagatgtatggcacaggaagggatatatgactctaatgtgcacatttgcagacattaactcaaggcaacacaaatgagaatagcaataatcatataacgattggaaaatatagcctagtatctctcactaaataaagcacatggctcatatggctttttcatttactctcattaaatactggattcctacattaaataagctattctagagcaatagtcttcatggaaaaaaatggaagctttcccactttattttcaagtttaatataaccctcatgccaaaacctggtaagtagagctactgaaaaagctaaacccatttcattcatgaatatagatatagaaattataaatgaaatgttggcaaattggatccagctaagttttaaataactaacacactatgactgacgaaagttttcccagaaatggagcacagtagtgctcttgcactggtctgtgagagccaattgtaagtaagcatctcttcccatccctggggccaggcatgatgggagtagtatttatgtcagggaaatctgccaatgctataaatcaaggcctttacttcttaacctcttctcactttgctcccctgtgggttgttaatttcttgtcagcacactattgaatgttaagtataatttgacaacacaaaagagaaatgtgaccatgtcaaagatgctggaaaagcatttgataaaattcagttgccattgcaaataaaatagggataggagaaaactttttaaacatcataaaaagtatttgaaactaacagtgaacattatattaaacagtgaaacacaggttacattctcattaaagtcaagagcaagacaggcttatttgttatgtgtttaccagatcctgtcagcataatgtcatcagtgtaatggacaggcattgtgcttgtgggatgtaaagatgtttgaggtcccttgagtctatattatgatagaaaacaagagagctaacattgccctgatgcatgggcagtaaacttaatactcttgttcctacttggtaaattcaaatgtattctgattttactaatgtatggaaatgaagaaaaaacattctctaggtcaatacttccatatcaggtgcctggggctgtgtaaatttgcttcaacagagatatgatatctggaattgcaattgttttttggcatcaccacctgattaaatttgtgatctgctgtcattttctgtgactcgcctggctttcgtagtgtccaaacagggtctctaaggagaatagtcactggtttgtgaggcacctatctcagttatagccactgaaaggcttttacacaaaagagggatgactgcttcagagactggggagtggttgcctcctcaggcaaaggaggttcaggggaatttggaggtttgcaattctcagcctcatccatgtctgcctaaatgcctccatctcaggcctcagagtttcactccttcccaccggtactcttaccacagcataatagatctggtggagttaagcatttaattgtcactgcagctctgcaacttatgctcagcccctaagtcgtatctgcctacaaccacaggatacggagtattcctcaaaagctctatgcatgcatcctgattttccatgtatgttcatcagtgttcttattttgtatatattcataacatttcatttctttttccatgtgtatgccctctagggctgtaagaagacagaccactctacaatcaggtaatgctacgtttgttgccacagtgactaaatgccactgtcatttaatctccccagtgtcttacttgccatctgcaactcatcccatagtatcactggtgataatctgagaaactataatactaacacatgtcatggattccctaactgctcattttcttccttggcaaatatgttatctctgtgtttcttgaatatattagcaacataaccttagaattgcattttgaaaatctgtttcctggggtttcttctagcaccaattactgtatgaaacaagggatccagcaaggaacagaaaacatggaaattaggataatttgtggaaggtttaataaagatactagttaggagggtgggaacagagtattaccatcctgtaaacccaaaataaaattctaatcccccctcctttcggcaaagggccttccaaagttaacctgaaaaacgttcaggccatgatgggaaagtggggatcaaatatgccttattatacccgcctcccttttggaattcagaaaaatctgaccagcattaacatcaacacagaccttcagactgatagaacagactctttaagtctgataagaaacatttacaatctattctctctgaagcctgctacctggaggcttcatctgcatgacagaaccttggtcttcacaaccccttatcttaaccccgatgttcctctctattgattctaagtctttacacaataacttaactctttcaaccaattgccaatcagaaaatctttgaatctacctacgacctggaagccccgcctcgcttccagttgtcctgcctttccaaactcaatgaatgtacatcttccatctattgatttcggtcttatgtctccctaaaatgcgtaaaaccaagttgtagccagaccaccttgagcacatgttctcaggatctcctgagggctgtgtcacaggccattggtctctcatatttggctcataataaatctcttcaagtattttacagggtttaactttttgtttgttgacaatccctaaacctgaaaggatcagaagagagaaacatcctgaaagagagaattggatagattattgtagtggctttaaaaaatgaccaccaattatttaacatttctcccattaaaaattagggtctatgtctcttccccttgaatctgggtggatatgcgatttgcttataaccaatagaatgtattgaaagtgaggactaaactctgatttttttttatcttgcccaaattcctatctaaggggtctggggagtcatgccctacaaatcataaattctcatcagatgggttttatttaaccttatatgtcatgatttactttccaaccttactctggcataacattatgagacaaggaagaaaatcaaaatattttaccccaaaacatgtttttttgccatattttgaaatggccctgcaaagctgttctttgtggagggaaatttgcaactgtaaagaatctctattaacatagctagatctttttctcccagcccctcccaatcctaaagagattaactaagatctgaatacaaaacatttgtcatctattgtctctaaggggagccactataagacttcaaaagaactttggtctccacaatgtttatcttaacctgaacattccctttctatcaatcccaggtcttcagacaaactcaaccaattgtcaaccagaaaatgtttaaattcacctatagcccggaagcccccaggttgagttgtcccgcctttctggaccaaatcagtgtatttcttaaatgtatttgattgatgtctcaagcctctctaaaatgtataaaaccaagctgtgccctgaccatcttgggcacatgttctcaggacctcctgagggctgtgtcatgggccatactcactcatatttggctcagaataaatctcttcaaatattttatagagttcaacactttttgtcaacaaaagtgatgctacataacttagaagactcggtcagaaaaggttatgtagtcttcaccttgttaactgtaacactcacacttggaggccctaaaatgacgtgtaagaagtccaactacaggccgggtgcctgtaatcccagcactttgggaggctgaggtgggcggatcacctgaggtcaggagttcaagaccagcctggtcaacatggcaaaaccctgtctctactaaaaatacaaaaattagctgggtgtggtggcatgagcccgtagtcccagctactcagcaggctgaggcaggagaatcacttgagcccgggaggcagaggttgcagtgagccgagatcacaccagtgcactccagcctgggcaacagagtgagactctgtcctccccccaccttcctaccccccctcaaaaagaagtccaactaccttgaaacatgctgtaaggaaggccaggcctcagggataatccatgtaaagttacatcagtcaacaaccccagattctgtcctagctgacagtcagtaccaaccaccagaaaagcaagagaaggaacttccagatgattccagcacccagctgttaaataatcctaactgaggctccagaaaccacccatccccactgtgtcccagtcttgatctacagaatctgtgagcaaaacataatggttattgttatgacagcaagttttgaagtggcttggtacacagcaatagtagctagtacaggtagaaaaagccactctgagggaaacagtgaccttaagtggggagatacagtgaactcctctgcaaggagaaagtcagaagaataaatatgccaatcttttgccagtgctccctgttggtgaaatccaaccaaaagctggaggacaaggtaacctgttgatgtattctatacaagctcacctcacagaacaagaagcagggtagagaagcaggaaaatggatctaaaggggcaaacaaaagttatcttgcttggggtcatttgaagactttgaactttattctaaagacaatgggaagacattgaaaagttttaggcaggcgactgatgattatcctgaaaatgatgtgcagcttttatcggagaacagattagaaacgggggaagactagttaggaatgtaatacaatagatcaagtgtgaggtgatgggaccctgggctgtggcaacagcggtataaatggaaacagaagaaagagatgtgagaggcattgcaaataaaggattgaccagatttgtgggcataaaaatgagggaagagtagacaataacgctgaggttttaagcctttaagggtcttgagctcacctctagagaattcatcaattcccaaagtttcacccatccttttatgtggaagtcatgaatcttcatctccatccatggttttgccccctaaacttgtctttcacctactgcctgctggacatttcaacctgattgtcctactataacctcaaacctaggatatccataagcaagctcacaatcatcaatccacacagtcctgaatcacatatttctatcaatacagcatctcttcatttctatcatctatgagccttgacactactacatttttgctgatatgtccgtaataactctattgctcataagtgaaaaattattttttggaattaagtttgtggaagctaagagtgtttgtccaatatctgaaatctgccaaaattctttaaagtattcaggcattccctttaaatgactaattacataccattaaggttccagtggaatttcctcgataagtctgccacttcttcccatcaagactatacatgatgataaactgagagatgtagaggctggagaacttctgacgggcaccctgggtcttgatgccgtgaataatcattggtgccaacagatccacctaccaattaaaataacactttattttaacctatttttaaatgtatgtgctacctcctgaaactaattattagcttaggaagaatctacattgctacaggtgtgtccatcattaccttaggtgtgcaagtgaagcagtcaccaatgttgaaatgtgcatgtgtgtgtgaagctgtgggatacacagtagaaatgaatggaaagatgcttattgagttcccagcctgcttcttgacaaaccaaaccactaccaaatcattgagcccccatttcgtacacacacacacacacacacacacacacacatacacacaaacacacacacaccttttgtggactcacataagctaatggacccacataagctaatgctttgcccacacctcagcctcagaccaaagccaatttcctcccctctcctgaaaccagacccaccccaacatcactgtcagtgatgaactgctacacctccttcaagtgttagttcagaaactatttttcctggttagccttctctgactcacccagacaaatttagtgctgcttcttctatgcttctacttcactttgtatataacttcattatagcaaattattgcaccatattataaggttgctttgcttttctgctttccttattagactgagatccttaaggcagtgaacccatttgagtcacctaactttctgtgtctcaacttatctgtaaagtgaagataatattagtttttatctcaaagggctgccataggggttaaagagttaatacatgtaatgtgctgagttcagggcctggcgcatactaaacactcaatcaatgttagcttttatattctctctagccccagcacctaatatggtatctggtataatactgctgtatagcaaatgctttggaatgaatgagtgaataatgggaaagtagtacagaatggacacttcttaaagaagaggtcatgggctgcaagaacattagaagtatcagttactgtcctaataagcaagtcaaatttagcacgttttcacacatgcctgacacacacaattggactggtcatcactcttatgcttaataactgtctccttcagctgactgtaagttccattcatacactcattcaaagaatattttttagcacttgctatgtgccaagcactgttttagatacagggaatagagtagtaaacaagaaagaaagccctgccctcatggaacttacagttgagtaggagaaatagaccttatatcatatatgtttttatttgtttatagcatcaagtagtgataagcgcaggagaaaaatgaagcagggtaacaggacagagtgtcaaggtcttcagaagttgcagccctgtcttttcccagatagatggtattcccaatcaaagacacttcattttaacctcttggtattgtggcataaaaaagtgaaagcaccaggcacaaaaatcatgatttctactgaattgacttttactgtttcttcatatagatagagtataagagttctttcttggaccagtgattattgtattttccagcagccttgctagaataaagctgcaatagaaccaggctacaataaagccttggcagcctacctacattctgcaactgacaaatgcttgacaactgatgaatgcttgacaaactgccaggcttatccacttcatcttcttgtgcctcttctacattataattggcacctgggagcagtttgacaattacagactcaacagcttcacctatgtgcccagccaggtgtttcagtgtaactacaagacacatctctctactaggaagtaagcaaggtggtaatgagtttcactgtataaaagtacaaacactgcagctgcgtatctccatggggcctgctgacttccccctgtgcattgcctggtcttggtcacctggtgctcctcaagccagcccagtgctcttgtgtcttggggccaggctgttgtgcactcttcaggccttctcacgagaatagatgccttctccaactcccttccttgtcagcaccccctttcaactccatctccatggtttattttataaagttacgag

SEQ ID NO: 11 - DNA, 231325 bp, Mus musculus
aggtagcacatacatgttatcctagcacttaagaggttgaagcaggaattttaggccagcctgggttatataatgagaccttgtcccatgcaaattgtttttacagtaatgatattctaagagtgacatagaatatagtttttgtctcactgctccaagttctttgttatcataaagctttttatactgctaagataattatatatcctgttttctacacaaaactgcctgtacttttcatatattaaatctgaacaaaacaagtcttacctcctcagctttgctcttgacctcagttggtatttgcttattcttacgaattttcaactgctctttggctttcttcatgtctttttctactctttgccagtcaactttgatgtatccagtatggtttgccagctacaaatttaacagtaataaaaaagtaataaggaacatggtctttggcatttctttttgtcaagataaatcttgcaaataggtaatcaaaactcttttgacttacattattggagaaattagttatttttgtgacttttgggcaaaatgtacatactacattcaatgttccatatttggtaatagaaataaagaactgtcttcaactgttggcaatcatttaatgtatacactgagttttacaaagttttacataaaatttaaaaataagatgttaaaatgaaagccaaagtagtaagttcaatgtaaataatttttcatggaaatgtggacagaataaaatcgattcaagtatgttgtttctgataaattagggttatccataacaccatcaaccaattagttacccaaataaattagagaacacatgtatatgtaaagtaaaacattagcacttataaacagtgaagttgttatagaagtcaataagaaaaaaaaaattagccggagagatagttcagtggttaagacactagctactcttccaaagaatccaagtttgattctcagcaaccacgtggtggctcttaacagtataaacatgaaataaaatgtgactaggaattaagatttcactcaaatgattagtagcattgaaaaatagcacacaaaaacaattacattatattttaatgtaatatatccaaggctacaatttctcacaatatgttaatgagcaggtagaatttccaaacacctagaaaaacttaacagacaaacctgaaggagaaagaatccacctcctacagctgttgcagccaattttccaaccttctggaatacgaaaccagtgcacctatgaaaccaaaccaagatcggacgtgacacgctgtcagatgcacacaagcacaaacttctaacaatatcctacttactttgaaatgatttagctccttcttacaatgtatagaaacagaagctcatgttagcctctaggctcctagagtccctattcatgagtacccattatacatttcaaagtccacattagcatcctagcccatttcacctccacccctaccccaaaccccgagtttgtttcagttaacaggtttcctttcccccagacccactttattctctgtatagaccaggtaccccctcccccgaattctcactatttccactgttctctcactaccattcccactactctatctcttgctattccctgctattctcccttgttttgcagatatggctatgtccagtctgattctttttctcttggctctggactttttcagatggccttggatgttctttctctctcttatccacaataaaaatttcttcccacttctaaccatggagcatccatttcgggtttttttttttttaactaggccccttgcatataccaagaatacatgcatgtaccaccctatatgaagcttgtcaacaaaaagtgtatatgcaagctggccatagtaatgcatgtctttaatcttgacattcattcaggaggcagaggccagtgtggtctacatagagagttccagatagctagggctatgtagagagaccctgcctcaagaaattatacacaaagagtctaaacactctcttcaaaaggaagatagttctttttttttctttttaaggaagatatttcaaactggaattttaagagaaggaggctgaggagatagtgtagtgaacaaagtacttactgtgtaagcatgaggactaaaggtcaaatccatataaaactgggtgctttaaaaaagtaaaatctatctataagttatatacaagaaatccactttatatagaagactctataaaagacaagtagaaaatccatttatgtgtttcttctggctgctgtcctgtgtgtatcttttcttgcctgattttgttatgaagttgtaactgtgagtaaaacagctctgagttctaggaatcatcctaacgcagtggctctcagccttcctaatgctgcgaccctttactacagctcctcatgttgtgctgacccccaactataacattattttcattgatacttcataactgtcattttgctactgttatgagtcataatataaatatctgtgtatacaacagcacttgggacacagagataggaggatcacaagttctgaaccatgcttgaagggacttctcagactcaggcctaccaaacatggtactggcagcatcttgccctttccccttccctctcacatagattgcatccctgaggaatgcgtctagcataagaacatgtccaaataagggaagagaccttgatggctagcactaaggatgtaatctatggtttacatgggagaaggaagagggcattaccatgtttgccaggcctggccctgctaagtttcttcattgctgagccaaagactccattgcaaaacaaaactaaacaaaacaaaaccaacatacacacacaacatacacacacacacactcaaaactcttaaaaatgaatactacaaaaaatgacaatttcagagggggaaaacatggaatttaataaaagacaagtctaagtagtaaataaatacatataaaagccttcagtttttacccctacttggaaaaaatgcaaacaaaatctcaatgagaaaaacactacttgtaaaggctagcaagaaattaccagtatggcaacaacaaatatggtcaaggatgtagtgtaacagaaacacttggtccttggtggcaatgtaaccacttttaggcatcagcctgacactatctcatgaaggtaaagacgtatacacccaataatttagtgactactaggtacagacaccaaggaagtaatgtacccattcacaataggaaatttgcataataatttcatatcatcattgtctacattatttaaaaattgaaaatggtcaactgggaaaatatcctatggtatattagtacagtggaattctaaatacaaatgacaatgaagaagctagagcttcatatgatatggttgaatacagaaaacatttttaaaagcaagaatcaagccaggcagtgctagtgtatgtctttaatcccagcactcgggaagcagaggtgggtgggtctctgtgagtttgaggccaacctgttatatagtatgagttctaggacacccagaactacaaataaatcctgtctcagaaaaacaaaacaacaacaaagaagcaataatcaaaagaattcatagtgattgtgtttatccaaagttcaaaaccaaattgactgcactaaattattaaaattaagtaaagaagcaactccccaacaacttttagagttctgggggacactagccatattttttagcctcagtggttgttatatgggaatttgttctccaactattccttatagatagctgttctgtgtatttgcattacaataacatttttcaaacggactttctgagattgatgaattcattactcactcactgaattggctctaaacattttatacacatcaacaaatgaaaactgcaacattaacatctggcacagctaatataaatggttaacatcttaatctaccacttactatgttgccttgacctagaatctagataaactttctgagcctcaatttctacaaaatggacatagatattacaattaccaagtcattttaagaaggagatgagatacctatatataagctttaaatagtgcctgcctatatgcaaggtttttggcaccagacattccatggtacagttaagggggtgatttttattgtagatatgagagagagagcagccagaggtatctggaagagtccagagcagaaagaggagtaaattacacatagtcagcagtctggacatgggcatcttaggagagaatagccaggttatatgaagtgtgagtagctgtgaggagagaaagtccaatgctagggctttgaaatgtataacaagtacttgtgaatagggactttagggagcctgaaaactagcatggaccttaatatgctgatatgtgttaattggagagccatatatctctttttccagagataagggaatgactccttttgacagaagagaatctttcaaaagttcttaaggaatgttgacttttcatctaaccaccagaaatcctcttatagtccaggttgagcttatttctggatatttggagtgtcttttgggggggggtgaagtttcttttggacctgacagtacatgcataaatatcaaatagtactttaatttgatggtccactacatattgaacaatttcagtaaagtcagtgtgttttcattaattagagtagacagtttctataactatgctactaaatcaggcacaaaaaactacaaatctttaacactacttaccatccagtaacacccccaattaccagctgggttgctacactatatttttcagctgatggcccagattcctgcccaaacagcttacgccaccatggttgttttttagttaattctgcaagatccagtgcttcaaattttccatcaaagtttcctataaaagaatgaagatatgtagttactggttactgccaaaggagtagacattttcttcagtggtatggtaaggtgcctatgggctagtaaacaatctctcacacatgttcctataaataagcctaatgaaactcaatgggtcatcaaaaaaaagtatagtgaagacaagacaacaattgaaggggatcagaaggaatagggaaggacaaaagtaaatatgattaaaacacattgtataaatgtataaaaatcataataaaatccatcatggtgtatgattagtatatgcaaataaaaaactaaaaaaagaactaagaaaataagaaaatatttactttcataatagttttccactattcctaacaagattaagagatttttaaagcagacaggtaactattttaaatagtaaaatatctctgaaattctggattggaattttagaaattctgactaaaataaataaatttgaatatatgtattgtagcaccttgaaaacttaggcttagtctgctattgtttttcctctcaaatttaaaaacaattgaactgacatagggaaaaacagtgctatggaataaaagcattctaaatatgtatttttaaattcccctctttaggagccacctacaaaccaattttctgtattatatagatctccaatgaataagtaaacaatatttgaccgggtgctttttactagacaatgtacttagtaacaaactatttaattaaatgcacaggaaaagataggtactacttattaatcccattttgtaatcaggaaacaaagctttggaatgggaaacaagctaacaaaatgtataatgtcccaggcagtggtggcgcagtagtggtgcagcctttaattccagcacttgggaggcagaggcaggtggatttctgagttcgaggccagcctggtctacagagtaagttccaggatagccagggctacacagagaaaccctgtctcaaaaaaccaaaggggaaaaaaaagtataatgcctggtttgaacaaagatcatcttggatttacctactatgtccaatccttcttccttggaaacatactgcattaagataacaaatgttaaaaactcagcatgtaagactgtttacaaacaaaagaaaaacccaagaattgtcattttaaaaaaagaatagaaaatagaggcagaatcagaaatgatcaagaaattacatgaggggctggagagatggctcagcagttaagagcactggctgttcttctagaagtcctgaattcaattcctagaaaccacatggtggctcacaaccatctgtaatgggatctgatgccctcttctggtgtgtctgaacacaactacagtgtactcatatacattattaaataaataaatacataaataaataatttttataaaattaaacaaagcaaaaattttcagaatatttcacacatatataattggagtccaagaagattaccagaataagagagaaataacattcaagaggcaaactgatgtaactcaaccaagaaatgctaagtagaactctagaaatgaacaagggaatgaagagtacttgaatgaatatccaggctgctatctaaatgaatgctattgtacaaaacaatacctaaattatcttgtaaaactttatatatatataaaattaagcaggtgctttctaaatattagcaggcaaaagaaaaaaatgataaactatagagcactcccctcctaaatttaaggggattaaaaagctaagcctgtgagctagattcctacctgagtttcaatattaagatgttcattctcattattatataatccttagcaaaaccaaaatgtcctttacaggttaaggcagtggttctcaacatgtgtatccagactcctttggggttaaacatcagctaccctgcatatcagatatgtacattacaatttataatagtagcaaaattacaattatgaagtagcaacaaaacaattctatgcttggtgtttctacaacatgataaactgcattaaaggggcatagcattaggaaggttgaaaaccactgggttaagggattttaaaatgtatatagacaggcaaagaaccaaaaatagtgttgaagttataatagctgtacaacaaattgctcaaacatcatgaaacaaagttattttgtctattatctctggttggttctgtgcatgtggaattcaatcacaccattaaggcttctctgtcattttgtgatatctgaggcttcagctagaaaacttacagggcagggtctggaataatataataataaataataatctaaaaagtctacagttgcatatacagactatttttctcagaggctagagtggacttccttaataccattgaagctaagtttaagaggtgactgtctcaagtgaaggaaaggtcaaggacctagaaaaaactgtcatcattttaagttctggcctcagaagctattgaattttgctaccactaaactggcctagagtagttcccatccagattaaagaagagagaatatatattccaattcttactgggatgggaatatcaaagtcccactgaaaacagaccatatgagaaaagtcaatcttctatatgataaacggcaaaaaaaaaaaaacccaaaaaaacaaaaaaacaaaaacaaaaacaaaaaaaacttaggaagaaagtttaagagtgttcaaactttcaaaactacagtataatttagagccacctaaattaaaggtttttggggctgggagcagtgaaacaaagtttctctgtggagccccagaattaaccagactggtctcaagctcacagggatccacccacccctgcctccccagtgctggaattaaaggtgagtgccaacactgcctggctaagttcaagattcaaaaggctatagtattcaataagatgttgcattgatccagacattattgtcgatgccaaaaagtgcttgctgacaggagcctgatataactgtctcctgagaggctctgccagtgcctgacaaatacagaggtggatgctcttgaccaaatattggactgagcacaggatcccccaatggaagagctagagaaaggaccgaaggagctgaaggagcttgcaggcccataggaggaacaacaatatgaaccaaccagtactcccagggactaaaccaccaaccaaagagtacacatggagggacatggctccagctgcatatgtagcagaggatggccttgtctgtcatcaatgagaggagaggcccttggtcctgtgagggctagatgccccagtgtaggggaatgccaggaccaggaagagagagtgggtgggttggtgagcaggggaaggggggatgggatagggggttttcagaggggaaaccaggaaaggggataacattttaaatgtaaataaagaaaatatctaataaaaaaaaaaagaagaagaaaaagccaggcagtggtggtgcatgcccggcagaggcaggcggatttcttagtttgaggccagcctggtctatagattgagttccaggacagacagggctacacaaagaaaccctgtctcaaaaaacagagagagagagagagagagagagagagagagagagagagagaggatgttgaattgacctaagtatacacaaaattagttgaataagaagtatagaaatacatttacatatactattatatcattttcctatcaaggtactcaggtaactccacagtacaaagcaagtcctttcaatagtgttagaagcactagatattcatatatatatatttaaaaaccatatacaatacattcaacgtatggctctagtcaaaagtgggatttagttgggtatagttccacgcactctagaggctgaaacacaaggatagctgagtttgaggccagactggactacaccaaattatctgttgatggtgggtgagatgggatggataacaattagagtccgctcattaaacactggtaaacaacatttacaagccttgtctataggcccaggaaaacaacgataattattgtaagcactacaattatgtaagacaagatttctcagaaatttctaggtattctgctcagcaattgcatcaagtgtaatgactgtgagcttaatgaattgactgacttaacgtaactaaagaaaagaaaagaaaacggacaaaaagaaagaaaaaaagtgctccactgggattttattttgagtgggccgactatatctcctactgttttcaaaacaatcaattaggaaagtaccaatgaaaatgaggactgtaggtgtttgagaggcagtaagagacaaaaacactcctgtcagggagccagatcgcttctgagaacagtaactggatctccctagggacacctcggtaggggcggcactgaaaggctagaagagctaggcagagataacatccctgggtaactcaaaagccagcttaagtatgaccttggccagatcccagaacacccgccagaaaagtctccgcgctgccctatccaggtgctattgaagctccctggggagggaggaacccagcaagcgactcagcatgcaaccagcagtacttcactctaagcgacaaaggtgattccacccctggcccttgcgcgcgtgctcccgcctttaccttgactgttagcggccatttcgggggcgcgggggggggggggaccctagtatcgcgatgacacagcttcagaccacgagaccaggaacaggcgttagtcatccgcagctggcttccggcagggggtgggggggcagatatttccagtcccttggcagtcggagacagcggggcctggtcccattagacatctttcctgtcctggagcagctgctacaaccacctcagctgcagccccacacttgcgcagaggaatgaatgcttgctacgtgtgcagaaagcttctctgccttggtggtgacagagtttatctcacctttattttttttaatttattttagattttgcatatttatgtaaacaatgaacttatgttaattctgacattaatttcaaggctgtttaagttcaggaaaacacatcttacactttttaaaagcattccaaccacttaataatgtacacttgtattatgactgctgcttcttccgctttaaagttttttttttaactttgtgtatatgagtatttgcatgtgtttgagtacagcacgtgtacgcagtacctgaggccaaacaggacttccgatcccttgggactggagaggggagtgatacaaatatctcaattagaattgagcactttattgcctcttatcctctgtacatatactagttgtgagtctattagaaaaaagaagattcttagatgaggagtgaaagatcccctattttatcggtataatagtaaaaaaaattgggaggagacagtttatttttgtgtccatttaggaaagcagttcttccctatgacttaggcagccatggggttttggctttctaacaggtatcggttctatcctgtggagtgggccttaaatacaaacatgaagtgattagttactcctactatatttatgccactaccatagcaatgaggctattttgacatatcagtcattatatagtacctcacagggttcttagatgctttgtaagactgtcaataacttgtcaccccaaatagcacacatgtaaccttccagcactgtgaaatcttgtcagtgccagcttgatttccccatgttttatgactcaactatgttgtgtcatcagcaatacgatcttaaccatgaagttctgtagattgccaaaaaattggcagtaccttataatgtttgggggtttatggagccaacaaactccaaaagaggtgacccattcctggcactgggctttatatttgttaccctgcagtgtttagtagggacattgtcatcctgatgtaggggtaactccatttaaattcttatatatgtatacatgtatattttatttaaaaagcttctacagtagtaggttttcatatttttttcaagtatctttagtgttaataatcactacccatactcacttctctctcctgccctcctatccttaccccacgtaacccttcaacttctcctgttcccttttcatatcaactgcagtatatcccatttcccttgaaatctgccttcccttgttggccccttgctagtttcctgatctctatggatactccaatttaagacagatatctaaagattcagagttagcattcacatgtgagagagaatctgaggcatttgtttttctgggtctaggttaccttatggagaatgattatttccagctctatccatttacctgcaaatttaatttcatttttctttacagctgagtaataaatattccattgtgtgaatgtaccacattttcattatccattcttcagttggtggatgttggctctttcctttttcattcaattatgaattgaatggcaatgaatatggatatacaagtatctctatagtggaatgtacaatccttttagatgtatgcccaagagtgatatagctgggtcatatgataagtttgtttccagctttttgaggagggagggtgtcttagttaaagtttctctggctgtaataaaacaccatgaccaaaagcaacagggtttatttcaacttatacttccatgtaataaacaattcactaatcaatttcactgatggaaatgaggacagaatctcaaaagggcaggaacctgggtgccagaactgaatcagagatcatggaggaacattgcttactgactgatcattatgtcttgatccgcctattttcttatacaattcaagaacacctgtccaagagtagctctgcctatgactacctggggcctcccatagtaatcattaataaaaaagcaacagcaaataaaacatatggtacaggtatcctatctggatctctaggccatgtgggcagctggaaagtttctgcggagaaagtaggctggaatctggtgaatcccaaagtggaagcttttacattccatgcagactccagaatcttcactatctagagtttctttgctacaggtaccaaggaacagtcttttagaataggctaggaatttaaatacacctgaacgcccctcctcagtattctgttccttttcttaaggattcaaacttgttaggatgcacccagcaggaaatgggttaagccttagctcagccactcttcctattccagttttcctgtgcctgcttcctactacccaaaaggaagtaatcctttcagatctgttttgtgctaatgctactttcactcacagtagataaacttccagaaaatgctctgcaaaatatttaggactttttactaaatcattacattttctttttgttcttaaaagctaaagttattttagagaagagttaaattttcatttctttagttgaacattttctagtaataaaagccatgcaaatagcactcttcgcttgcttctttctgagccttttcaatttctgctctagtgccatcagaagatactaccttggtgcagtggaattgtcctggaactatattcagagtgatctgctcagtgtgctgcatacagactcaaggtaaaaatcctctgtcaagtgcaacattgtgaagatgtgattttgactgtgtttatttgtatgacccaactcatacatatattacaaatgatgaattaaggttgtttctactgacatggagaaaagtctactaggtgtttcttagtgtaaaagcatataaattatgtataatattccatttttataaaattaataattactaatcaaaactctgtgtgtgtttgtttgtgtgtatgtgtgtgagagggtggtagggaaaagacattctaagcaattagactgcgtagactaaggggtccagtcagtaatttttaacttttacaatgttgttgttacacacattatttctacacaaaagtacacatctacacaaaaaaaataaacacattcatctcattaccatttggaatggagagggtctttatcatatattgttatgtactgtgttcattaactcaccaattcactcattttgtggtacttcgggtctcctgttttatttatgaatgctttatcattgagataaaatcccagacacattactgttattttagtgaatagattatctggtggtatcttgctggaacaaaggacatagttctgttttagttttttcttttgttttgtctttatatctctggctggcctgggactcactatgaagaccagaatggcccagaactccaaaatatccacttgcctctgcttcctaagtttgggattaaaggtatgagccaccacaatcagctgttttagtttaaatttttagaacgttcaagactcttcatgcattttgatcttcagagcatgggattatacttacctctgcatttgcatcaggaataagtctaacattattgcttaattttttccagtcttataagcatagaatattgtatctttaattgtaatattttatttgtaatgagattcatcatcttttaaaatgcgtgttggctatcagagttaatttttcagactttactttttttatgtttcacccatatttctttggggtcttccattttttttagctgcaaaaacacttattacatgtattcattatcctttatttatattataatttctcctaagattatctatctcttgccttactttataacttacttatgaaaacacttaatttttatagtcaaatattaatttttcacatccttagttttgacagtgttggttaaaatgtctttcacacctcaaggttatatgtatgtccttctagattttgttgtaagaatttagtatttttgactctaatttatcttgacatttattttgaatggtatctagagagtgatctatttagcttgacttccatctgtgtaaatagcctatcataattgcaccaccacattcacctctctagctttatttttaatcatcattagtgagttttggtattaaagtttggtttaatttatcatataaattggtgagtattccatccttttctatagaattctctgttatttaaaaattaggcaagacttacttatgattccatttgtccccagtgagatttaggatagtgttgataacatttccagtggaaagctcttttagttttaacaattgctttgctacagtgttttactttttcatgaatctttaaattgtctgtagttacacgcccttaaattcctgtgtctttgctagttatttgtgaataagcttgccaaaaatttccctgttttgtttgtggtagttctttaaaagaatgaatttggaggttttattttatttgagacaggattgcatgtagcccatattggcttccaacttattatgtagatgataaagatgactttgaacttctgatcctcatgtctctacctcttgagttctgaaataacaggtatgcaccacaaaatttaacatttctgagttgttttttaatttgaggattttatacatgagtaaattttatttgcatcatttttaccccctatttgcccttccgactttctcatgcacccccaaatatttcctctcaaatttatgtgtccattggtacagaatgcctgttctgcccagaagacactatcccaaaacagtcattctggtccttagtctcttataatctttctgtctacttttccattatgtttcctaagtcctagatatactttattacagatttcccatttgggtctggtccccatggccacctattctctacattttgactagttgtggctctctctaatagactctgtctcttgcacaaagaagcttgagatatcagagctgtacttacctatggtataaggatgggtatttagaaggcagatggaaactatattactttagtggtagggtagtagtagatcttcctgtagggcctgttatctctttagccagaggttcttggcaaggcaatgaattcccttcaactgaacagattttagatctagttagacagctgttgtttacctctaagacacaagtgctactattaaactattgaggcatcttgctggtctcatcattgttgtggttcttgggctttacattgggtagaactgataacttatccctgttggtagcttgcatagcaccttctgacactatgaatgctaacccacaaggagggggtttccaggttagtactagctgaattcctctcaacttctatgaccaaagcatgtgatgtcttcaacaatagtatgttatcttcataatttggcctgtagccaagagcaatgacaatagcctatattgttttggggcttctcttagagtcctcccaactaacaactagaaagcctcccctccagtttttctttaccactatgttctgccatccctatttctagagctccttctgtcccccttccccagtggtctctgtttattttttggcttcctcagatagtccaagttacagaatcaaacctaaagattcagagctaagatccacaaataagagagaacatgtgacatttctctttctgtgttccatcttcatccatttacttgtaactttcatggttttgttttgtttttctttacagttaaattgaattccattgtatatattgaaagactctggccagccttggcatggcaaacatgactctggcaggccttgcccttgtctcccattccctctgccttactaaaagctattagcttacattcctaaagctagtcatcaaggtctatttccttatttggccacttcctcttcctgaggctgactaccaaggttcagccttcaaagtattgaagtccagcgatcaaaatccccctttggctcacctaattaacatgcccaattaaaattaagcacctcatcctaacacagggtttcccattttacctttatgaactgccctttgcctatgtgccacatgtgtctcctctatccagcagcagtccttgtccacccataattccaggacaaatacatcttaaacctctcccatgtttctttccccttctaccttctcctctatctcctgtcttgtctttcgttccctgctctttgtccttctggggaaaataaagatcctttgtgctgagaatttggtcttggggtgtccagagctcatatagttccttgcatatacacactacattttcattatccattcatcatttgattgctatctaggttaattccatttctttggtattgtgaataaagcagtaatgggcatggatatgcaaaacctccatagtagaatatggagttttttaggcatatatctagtagtggcatacctggctcatattgtagttctgtttgtagctttgtgaaaacctccacactgatttccaaagtggcttcaccagtttacactccataaataagggttcctcttttcccacatcctcaccagaacttattgtccatttatttatttatttatttacttattttgatggtaatagtcattctaattgggatgagaaggaatctcaaagtaattttcattttcatttctctagttgctaataatgttaaacacttttaaaagtgtttattagcttttttatttcttctcatgagaactctgttcacttccacagccttcttttaaaattgggttgtttattttttaagagatattatgtacttattttatatatgtgagtgcactgtagctgttttcagacacactagagaagggtatcgaatcccattacagatggttgtgaggttgctgggaattgaacgcagcacttctggaaaatcagtcagtgctctgaactgctgagccatctctccagtcctgttcatattcttttttttttaaagacctacttttaaactttctttgattctaatatggttacaacatttcttccttccctttcctccatctaaattctccattatattgttctttcaaatttatagcctattttttaattaattttcattgcttagatatatgtgtgtgtgtgtatgtatatatatatatatatatataaaacctcagtctgtatgtatgttttcagggctaaccattggatagttagtgtgttcttttctaggaaagactatttctacctctctcagcattccttagttacttgtagtaattagtgtagtggtaagacctcctgagcgtttccccatccactttggcatatgtattggtatcacccttgttcagcttacatttgagaggttatgttggtgatattactaggggacacagtctcacagcaaagtccatgatcctctggctcttgcaatctttctactactaggctagttgtcctgggttctctaagaaagcaggctgagcaagccagaaaaagtatgctagtatgcagaactcctctatggcttctgcagcagctcctgctccaagttcctgccctagttgagttcctgttgtaacttaattcaataatgaatagtgttgtggaaatgtaagccaaataaatttcttccccccccaagttattttggatcatggtgtttcatcatgttaataaaaaccctaactaagatattggtaccaggattgtggggcattcctgtgacagacctgactgttgttctgggtaggatcatggaaggactttggaactttggtctagaaaagtcactgagtgttcagaccttggtaaactgttctctgggactgtgaaagttaagtatgttaagagaaatgcagcaggtggaggcctggattataaagatccagaggaaaatttaagagtcatttaaagactctatcaagctgttacacattttgaattaagaatctggttctggtcagctagagctgaagagaccagcatcattaaagtgaaacctttgtgttactgagaaattggtgctggttagctggagatgagaaattggtgattaggaagagattcatcattaaggtaaaaatcatgtgggaaatatttcctcagagtcagcacatagaagctgtgctccataggaagccaagattgtaccccatacaggcagctgaacttggtagtgaaagagtttcccgggtagtactagttttaaagacataaagggttcatggatgcagcctcagtagcagttggaggcacaggattaaaggggtcatgcagagaagttgaggcatagcaccctgaagaaagtccaaaagaggctatatatttgtgtaccgtgtgtgtgtgtgtgtgtgtgtgtgtgtgtgtatgtgtgtgtgtgtgtgtgtgtgtgttatataatggcaatctagtggcctggcacaacgaataatactttgactataaaattgaattgaggagggttgagaaatgactgaaacattaaagcactttctttacaaacatgaagaactgagttcatatcactagcaaccacgtaaaagattctagcactggggaagcagaggcagacagatccctggaactttaccatatagtcagcctatctgaatcagtaagctccaggttcagtgtcaaaaaataaggtcgaatcctgagagatgactcagtgctttagttgtttctgctcttggacaggacccacgttcagtttccagcactcacatgatggctcacagccacctgtggctctaggtcttagggatgcaaagctgtcttctggtttctgcaagtacctgcacttatgtagcatatactcacacagatacaaacacataataaagattttttaaaaaggtatagagataaagaaaacaccaaacaacaaattctgacttccatattcacacacagagtggagggcagggagaaggagagaaggagagagggagatagtacacacatatattacacactcttaaagtgaatcccatatagtaaataattcattagctttttattatgcaggaagtcacatgtatttaccagaaaaaaatgagaatttttgttttaataatacaattttataatctaagttattttgacaacaggataagctgactctaaacacatcctgacggactctgccaaagtttgaaataaacagctaaggggattcaaatttatattatctgttcctgcagctgctcagcctcttctaagcaagagtcagaaaatataatgggttttccagctggttttagataaaaaagtgaaacaacaattcatgtcaggaataattattgccaagtacattttggcagaattatatatcaaattccaagggaagcacaaaagttaggaggaaacaaaatttgtgaaccttggaacactgccacttactgtcactgaagctgaggctagcaagtaaatcctgtttcggttacagtgggaaatactctgagaatgtctcaggctggggagctatatgttgtctggtacagacttatcctagaactcagtaactcattctgataatacttaatacatatctactatgtcactttaaatagaattctaaattgaaccacagcttgcttgtcctggaactttcattttttctagcttcttcagagaaggaaaaagtgtttcttctgcgtgcttttgatttttgctttgtgtgctcatctaagagctttccctagaaaactttctctgtatattttcttatcttttttttttccttgtattttcttaagacagggtctcattttggttgtcctgaatgtcctggaacaatggaaattaggctggttgtaaactcccagtgatcttcctgcttttgactcctaaatgctgagattataatcatggaccatcacacacacacactcacacacagctctcttgtgtatccatcttttgtcttaaaagtcagaaatgtttaaaataaaagcaccgtggtagttacctatctctggatatggatgtgagaattcttcacaaacatcaaaatatttgaagaaaataggtagaacatacttagtagaactaagaaaatgaaatagaaaaaaagataaaggtaacaaactagagatgtgttgtcgagtatgaaagagcatgcaagggagtaaagagaatgaactagagggagaataaactcaatgatacagacatataatagtgacagaaatacacatagccaagaccaatgctgtggaaaatttttagagatgaataagattagagtatgcttaggtgtacccttctttgttgctcaagatacttgcagagggtaagtattgaaggcattcatcctctgacttgctggttcttcctttcacaagtattagctataaattctcaagcagctggcttagcttctatttcattagggtacttgaagttttggtacagggacctttgaacccacttggcttactgtgtcagagaggagaattataaattccataggtggatcactgggggtctggtgaatcaaggggaatgtaccccctccccctttaccattctatcagcacagagaccagcttccatgctagatcttcatctttgtcttttgacagattcttcatggggagagttaaacagaactagtagataccttgaccattagcttgccaacacatttccttgtatgaacaatgtttccttggtgtgactttacattctagactctaattctctgtaaggcttcagatagtcatgtgagtggagacactacacataagaaaggctaacaaatacctagataatttgtgtctgattatcagaatgaagtatggtcatttctagcatggaatggatccaaagtagttaatgtgatatggagaagcaggttggtctccatggtaatcagacatattaggaactcagtataggtttctgttgctggcatattaggaataggtggcaacagtaaataggctagcctatagcatggattgtatgatattttgtctatgttgttttgtgcttcttcaacaatggaaattttcgtatagcactgacatgtggtatgaagatctttctacttttggaacactcactagtatgtctctattccagaaatctttgtcactgatcttttaatcctttctactaggctactgacaagaaaacaaaggcatttcttgctgaacatagtcttttttttctccttgttttgttttttgagacagggtttctctgtatattcctggctgtcctggaactcactttgtagaccaggctggcctcgaactcagaaatccacctgtctcagcctcccaagtgctgggattaaaggcatgcgccaccatgcccggcttgaacataatcttatatagcagccatatagtctgtatataactgaatcctgagcaatttctctttcagtatactaaatagtaactggttaaggttcggcccatttgaggcattttttcctctaccactatataccaatgccaccaacaaatgggttgtggtatattaatagtcaatttttatcttataccagtgtatgatgttgacccgtctgtaagcccaggggagtgcctctacccagaaactggtcatcatctggtatctcctgcaaggctacaagtatgatgaggcaaaagtggatgagagggtccctggcccctgtaacttttacacttagtttagacctctgacccatgtagttctaccatgcatttttcttcaaagaaactctatttactggaagagcttccttatcaaccctgggcctttggcccacagccagtatagaatgtcttttgtcaaggccttctgttcacagagccagtcaactggctctcaggtatcctggaaactctggagtggagtgaaatttggggctaagtggaagagcaggccagtagaatatgatagaagtgaggtaagctccatctttccctgattggtcagtgtccttgacagaggtctctgaaaaacagagtatcagttcagacatttgactgctagatcctaacagaggactgttaaggtcttcctttgtgactggatttgtgactatgaattattcttctagcaggttttttttctttatgtgaatggaaccaaagatggtcatcacttgtgagatcccttctagatgttttgttttgtttttcaagacagatttttctctgtagccctggctatcatgtaacttactctgtagaacaggctggcctcaaacttagagatctgcctgcctctgcctcccaagtgctgggattaaagtcatgtgccactaccaccacccagttaggtatttcttatgaaatctgcctctttctttcagctactccttccaacctttacttctacatttacttccctctgaaagggtgcagccttctgtccagtgtctcagactctctcctttctactgctcatttcttatgattcatgttttagatgactacaaaggacctgcacacacatgtgtggcagggaaggacagaatttgctctattggcagacagacacagttctatgttttgctaaaagaattaagacatcacatttctcatccatactgtatgttacatcttttagggaacaaatacagggacctactgggtagctctgtcatggtatgtgcccagatggattttcccatggtcaccatagtgtctccatggtttaggtgtctacatgtttcacaaaggttattttattttattttatttcatatgtatgagtgttttgcctgaatgtatatgtatatttaccacatgtatgcagaagttagaagagactattggatcctctggaactggagttacagacaattgagaggtggttatgtgagtgctgggaattgaacttgctctgacaaagcaacaagtgctcttaatctctgagctatttctcctaccctccacccccagtggaagaggtcttataaccttgttcctaacctttatatgtaatgcacttgtttcatttaagttttcagatttataagcaggtctctgcccaagtttagaggttagtgtttttatgcatttatagcttgtaggcataatctttttgtgcactgtgtaaagattatccttgtattactcaaatgctaatttctctgcccccacaccttgttgcaatctagacatggcattgtaatgcttatcccaaatatctcctatttcaagtttgtgtaaacaatactcaccatttattttctgcattgtcaataaaagctgatcagctaatggttgggcagaggagagagtagggtgggacttctgacattcaggggagggagagagggagaagaaggggtattcagacatggagagggtgagagggtacatgctgggagaacacatttgaaacccaaagggcaagaccaataataaaatgcaagcatctcagggattttggctgggaggtagctagagaatagatcaaggttttgtgctgtaaagcttgtttaaataagtagaagtctcagtcttattcatttgggagctagccagggatatagagaaatactgccactttaaaaaatacatttacaatagctgatattaaattgtccaaaccaaattagacaaaaaatactttcaagtaacattgctcaaatactgatagcttttgttcctctttatgtgacttttatggctttggatggataaaggtcttgatttatgcagtaaatgcttgagcaaaagctgaccttgattttacagttttgaaacaaacacacaaaaaattactgaattttcctcacttttgttctttcttttgcatgcagaaaattgttatggagaggcagggtaatatctgaatcaataattatagggaagaaaaggaagaaatttcaggatgtatttgcaagttctaatttgtttatggatattagaagagaatgggatgaaaaaatgggtttccatctgatttttgaagtggaatcaaagtccttcaaaatgaataacattttcttttctttatccagatttcttcctagaatgtcaacatcttttccattcaacacctccatcatgtataaaaagactgtgtttgtagagtacaaggaccagcttttcaacattgccaagcccaggccaccctggatgggtaatgaaaacaatattgagtgctaattatgatactaggcaccgcatttcctagtaaggatccttaacctcaggcaggactgcacttacagagggtggttaccaaaggttatattctttaaccaggtatctttaactaccttcagggaaataaactggcagtattttctgtctccactgcttggcttcaacaagcttggtcttggattatttccttctctttccctcttcaatccagttttatcttctacagttttgtagctttaaattttcatatatgttctaataactgcacttctatatttatttgactctttctctaaatatcaactgtttatctccacttaaatgtcaaataaacttgtagcatgatcttaagatattttttgcattaggaatgttttttatcaatggtagagatccaacccaggaccttgcacatgttaaacaagtgttctaatactgagtaacaccattattacctgccttagaattgttgctgagaaactttatatgccccagtacaggggaatgccagggccaaaaagggggagtgggtgggtaggggagtgggggtggggtgggtatgggggacttttgggatagcattggaaatgtaaatgaggaaaatacctaataaaaattttttaaaaaaggagctgagtgcaaatggaaaggacaatttaaagtaccctttatggaaatgatcatcagagaacacaaataaaagaccacaggagaaaaaaaaagaattgttgctgagaattgtaggaaagaaatactctcaattctaaagagctgtctctttagaattaagccttttttcatgtagtagccacaaactggttcatcaacctttggcccatgactcctctgcaatctgtatgaaagaaggctactaatatataagatttacttttgagaatttatttgtaagacattcttagtatgttccctactccaagatgggagggaggccacttgagaaggaaaaccattaccacctattaatactggatgattactagagacttggtcaaagttcaagaaagagaaattccacagaatacagttaaaaactgtgtcatcttggaaaaacaaaggtatttcatagttttactccactgtctttagttcattcaataaaccatttagaggcatcttataaaaatatccacagactataactcttaatttcttcttgatttctgtgtcatgaactaacttgtgataatctagatgcaatcataggaatcacctatgatctttctacttttttttcctttccccctcacataagtaaggtcctacatattatgttccctgtatacttctataatcttattttctattctaccaatcatttatgttaattcagccattttattaaacgatgccaaatttatttatttattgagacttttgaatttgttttatttgcttttaatgctgttcttctagatagttaaattaatgaatacattgaaaggtttgtcagaaatagttcctcagaacaaccctgaggctaaacttgggttaatggaaaacataactgctgttcatcagcttctgctgtgacttttttttttatgacatctttttatttttatttctttatttatttattattaggtactttcttcattcacatctccagtgctatcccaaaagtcccccccacacccccccactcccccacccacccactcccacttcccggccctggcattcccctgcactgagacatataaagtttgcatgaccaatgggcctctctttccactgatggctgactaggccatcctctgatacatatgcagttagggacacgagctccggggcggcactggttagttcagaatgttgttccacccatagggttttctgctgtgactttaacccttacttttataatgacaggatttctggtatgtcattcttcaagtaacctttgagggatatcttattttaacaggtttgctaggtcctaccatttggactgaggttcatgacacagtggtcattacacttaaaaacatggcttctcatcctgtcagtcttcatgctgttggtgtgtcctactggaaagcttctgagggtaagtcaaattctctcctattgccctgccattctagttgtagaacaataagaagtatgttcttgataataagggcatgttactccattttggattactataaaataaaatacttagttggatcccttacaaagtcagaggattatttaattaatagttctaagttctaagagcatcaactatagtgactactccatgtaatataatataataagtgatcatagatgtaaacatttggaacaatgagccaaaattaacctttctttcttaaatatctcaatactgttacactgggacaaagtctccatcataagaaactgagagacatgattaaatcatagcaatgtcataccttgaattctatccattcttttgtatataagtattcaaatttaataacagtatcagcaataattacttatatgttcaagaccatgtgcttgccagtagtggaatcaggtccacaagtagacccagccaaccctaaaacttaaactctgaaacactgttctactgtgcagggatttgtataggtaatgttgaattttgtttatataactggaaatttccatgaagtaaacttggtgtggctgggtccaagtgatacgttcgcatcattttttttctcacaatttcactctatatttctttctcttttactgtcatttctgggtagacttctttaacattatgggaaagccactgaaaactcaagatttgctttgatttttacataaggtgatgataataaggaaatatctttcaaaaatatttattgatattgtaaactatggaagagctatatggggaagaggagcaccaaccttattttatctgcctatgaaaaggtcttgtcacacaagaaagagttttactaatataaatttatataaggagttcacaagaaaggcaaagacacaagaagcaaactaatctttaattgaggcattcatcattcatggtttctgatattagttttacagtttgtacctcaaagatactagaatgtaaatatttcaaaataggttcattgtgtacatttgttgtttccgtagtatataacataatacctagcatgtagtcactgttccatataagaacaaaagtataaaaaacgccatttgctttttcttcctaaaattatatgttcctcacccattagacatatttttatgaggcctgaagtatagcttagtgatagaatacttgtctaacatgttttattttttacattgggaccatggaagcaccaaagcattgctaataaagatttatagtacacacctctaatttcagcactcaggaggatcactataaattataggccaacctgagctataaagtgagatcctatattaaaaaaaaatgccccttcagggctggagagatggctcggctgttaagagcactgagttcaattcccagcaaccacatgttggctcacaaccatctataatgtgatttgatgccctcttctggtttatctaaagaagagtgacagtgtactcacatacataaaataaatacagacatctttttttttaatgccccttctaaatatatttcaaacaggatgtgccactttttaaaagtctgatcctctgtggtcacagtgttggtccagagatgaacagtttatctattaatgctgtcttttggttgtagttgattggcctagaggtgagtatcttgcctaactaagctatgccaaaggaaaaaagttccctcctttaggactttgaaatttttgagaaaagatctactattaccagataaccctgtaacttttaggacaaagtcaaattattacttggtggatttcttgtgaccctcctcccaatgagaaatgtcttggaaagtgggagtgggtggaatgctgctatttttattctaagcccctgtgttctcccttgtggaatcaggctgagaatcctaaaaaacctatcatgtcagccatcctttgcccaaataattttctaggggagattatgtctcatcaaatgaagatgaatttgatttttaaggaaaggacttttaatagttcctcatctccttattatcacatgctaatagctgtttagcagattaagatgaggtcattaaaataacatatttgaccatgggctccactctagctagtttctgcttaacctcataatataggaaagaggtgaatgggttgccagttgactccaatactgtcaaaatagtctatagcatttacaaataaaggaaatcattagtaaattattggaacacatagtctatattatataccctaagttgtctgggctggagagatggctcagcagttaagagcactgattaatcttcagaaggtcctaagttcaaatccccgcaaccacatgatggctcacaaccatccataatgagatgtgacgccctcttctggtgtgtctgaagacagctacagtgtacatagatataataataaataaaatgaaataaaataaaataaatcacacctataagttgtcattctgaagtggaaaggtcttaacttgggaattttcaaactaatgtggccaaatagcaaacaaacttcctactctttggaatttcctaatgaaagaggtggaatatgagaagactctttaatattaagagatattaaagagagatgactgttgcttcttgatatgtttgtttttgtaggtgactttatgtgcttgtggttctctcctttttggttttgttgtaagatgcttaatatcttgtcctttctttggtgcaaatacctaccttttgttggagttttccttctaggatcctctgtatggctggatagatagatagatagatagatatatagatagatagatagatagatagatagatagatactgtttgaatttggtttttttctggaaaacaaaattttggtttctccatctatgttgattgagagttttgctgggtatagtatactgggttggcatttgtgttttcttagagtctgcatgacctctgatcaggctcttctggctttcataatctctgttgagaagtctggtgtaattctgataggtctacctatttatgttacttgaccattttcccttgaagcttttaatatttttctttattctgtgcatttagtgttttgattattatgtgatgagaggattttcttttctggtcccatttatttggtgttctataggcttcttgtacctttatggccatctattcctgtaggttggggaaggtttttttttttgacatttaaatttttatttattaactattttctgttggtgcagtcttacaatttttgacatagttaaatcctacttttccattgcatagtatggtatataacagggaaataatagggaaaggaaggaatggctttaaagaatatcagaaaacatgtatgatattcttttatccagtccatttgcaacatgtatttttggggtaaaagtatttattagtgttagaattagcattgtagctaagtttctcaatttgctgtctgataggatttggtctccctattatccaagctcattatctgaattttaatgactaggacaagcagcctaatttaattgggagctatttcacaaagtattttctactcattagacatgactttccttgttaaactgtaaatcccacacttatctaaatgactaagttgtgttaagacccacaatcttttcttctataactagaaataacgacttacaatacaggtatgtatatatatatatatatatatatatatatatatatatatatatatatatattatattaaacccagctgtaactgtttaggaaccattttttttcctttttaaagaacttttttttccattttttattaggtatttagctcatttacatttccaatgctataccaaaagtcccccatacccacccacccccactcccctacccacccactccccctttttggccctggcgttcccctgtactggggcatacaaagtttgcctgtccaatgggcctctctttccagtgatggccgactaggccatcttttgatacatatgcagctagagtcaagagctccggggtactgcttagttcataatgttgttccacctatagggttgcagatccctttagctccttgggttctttctctagctcctccattgggagccctgtgatccatccattagctgactgtgagcatccacttctgtgtttgctaggccccggcatagtctcacaagagatagctacatctgggtcctttcaataaaatcatgctagggtatgcaatggtgtcagcgtttggatgctgattatggggtggatccctggctatggcagtctctacatggtccatcctttcatctcagctccaaactttgtctctgtaactccttccatgggtgttttgttcccaattctaaggaggggcatagtgtccacacttcagtcttcattcttcttgagtttcatgtgtttagcaaattgtaccttatatcttgggaatcctaggtttggggctaatatccacttatcagtgagtacatattgtgtgagttcctttgtgaatgtgttacctcactcaggatgatgccctccaggtccatccatttggctaggaatttcataaattcattctttttaatagctgagtagtactccattgtgtagatgtaccacattttctgtatccattcctctgttgaggggcatctgggttctttccagcttctggctattataaataaggctgctatgaacatagtggagcatgtgtccttcttaccagttggggcatcttctggatatatgcccagaagaggtattgctggatcctccggtagtactatgtccaattttctgaggaaccgccagactgatttccagagtggttgtataagcctgcaatcccaccaaaaatggaggagtgttcctctttctccacatccacgccagcatctgctgtcacctgaatttttgatcttagccattctgactggtgtgaggtggaatctcagggttgttttgatttgcatttccctgatgattaaggatgttgaacattttttcaggtgcttctctgccattcagtattcctcaggtgagaattctttgttcagttctgagccccattttttaatggggttgttcgattttctgaagtctaccttcttgagttcttttttttttttttttttatttttatttatttttttttccattttttattaggtatttaactcatttacatttccaatgctataccaaaagtcccccatatccacccacccccactcccctgcccacccactccccctttttggccctggtattcccctgtactggggcatataaagtttgcaagtccaatgggcctctctttccagtgatggccgactaggccatcttttgatatatatgcagctagagtcaagagctccggggtactggttagctcataatgttattccacctatagggttgcagatccctttagctccttggctactttctctagctcctccattgggagccctatgatccatccattagctgactgtgagcatccacttctgtgtttgctgggccccggcatagtctcacaagagacagctacatctgcgtcctttcaataaaatcttgctagtgtatgcaatggtgtcagcgtttggatgctgattatggggtggatccctggctatggcagtctctacatggtccatcctttcatctcagctccaaactccgtctctgtaactccttccatgggtgttttgttcccaaatctaaggaggggcatagtgtccacacttcagtcttcattctccttgagtttcatgtgtttagcaaattatatcttatatcttgggtatcctaggtttggggctaagatccacttatcagtgaatacatattgtgtgagtttctttgtgaatgtgttacctcactcaggatgatgccctccaggtccatccatttggctaggaatttcataaattcattctttttaatagctgagtagtactccattgtgtagatgtaccacattttctgtatccattcctctgttgaggggcatctgggttctttccagcttctggctattataaataaggctgctatgaacatagtggagcatgtgtccttcttaccagttggggcatcttctggatatatgcccagaagaggtattgctggatcctccggtagtactatgtccaattttctgaggaaccgccagactgatttccagagtggttgtataagcctgcaatcccaccaaaaatggaggagtgttcctctttctccacatccacgccagcatctgctgtcacctgaatttttgatcttagccattctgactggtgtgaggtggaatctcagggttgttttgatttgcatttccctgatgattaaggatgttgaacattttttcaggtgcttctctgccattcagtattcctcaggtgagaattctttgttcagttctgagccccattttttaatggggttgttcgattttctgaagtctaccttcttgagttcttttttttttttttttttatttttatttatttttttttccattttttattaggtatttaactcatttacatttccaatgctataccaaaagtcccccatatccacccacccccactcccctgcccacccactccccctttttggccctggtattcccctgtactggggcatataaagtttgcaagtccaatgggcctctctttccagtgatggccgactaggccatcttttgatatatatgcagctagagtcaagagctccggggtactggttagctcataatgttattccacctatagggttgcagatccctttagctccttggctactttctctagctcctccattgggagccctatgatccatccattagctgactgtgagcatccacttctgtgtttgctgggccccggcatagtctcacaagagacagctacatctgcgtcctttcaataaaatcttgctagtgtatgcaatggtgtcagcgtttggatgctgattatggggtggatccctggctatggcagtctctacatggtccatcctttcatctcagctccaaactttgtctctgtaactccttccatgggtgttttgttcccaattctaaggaggggcatagtgtccacacttcagtcttcattcttcttgagtttcatgtgtttagcaaattgtaccttatatcttgggtatcctaggtttggggctaagatccacttatcagtgaatacatattgtgtgagtttctttgtgaatgtgttacctcactcaggatgatgccctccaggtccatccatttggctaggaatttcataaattcattctttttaatagctgagtagtactccattgtgtagatgtaccacattttctgtatccattcctctgttgaggggcatctaggttctttccagcttctggctattataaataaggctgctatgaacatagtggagcatgtgtccttcttacctgttggggcatcttctggatatatgcccaggagaggtattgctggatcctccggtagtactatgtccagttttctgaggaaccgccagactgatttccagagtggttgtacaagcctgcactcccaccaacaatggaggagtgttcctctttctccacatcctcgccagcatctgctgtcacctgaatttttgatcttagccattctgactggtgtgaggtggaatctcagggttgttttgatttgcatttccctgatgattaaggatgttgaacattttttcaggtgcttctcagccattcggtattcctcaggtgagaattctttgttcagttctgagccccattttttaatggggttatttgattttctgaagtccaccttcttgagttctttatatatgttggatattagtctcctatctgatttaggataggtaaagatcctttcccaatctgttggtggtctttttgtcttattgacggtgtcttttgccttgcagaaactttggagtttcattaggtcccatttgtcgattctcgatcttacagcacaagccattgctgttctgttcaggaatttttcccctgtgcccatatcttcaaggcttttccccactttctcctctataagtttcagtgtctctggttttatgtgaagttccttgatccacttagatttgaccttagtacaaggagataagtatggatcgattcgcattcttctacacgataacagccagttgtgccagcaccaattgttgaaaatgctgtctttcttccactggatggttttagctcccttgtcgaagatcaagtgaccataggtgtgtgggttcatttctgggtcttcaattctattccattggtctacttgtctgtttctataccagtaccatgcagtttttatcacaattgctctgtagtaaagctttaggtcaggcatggtgattccaccagaggttcttttatccttgagaagagtttttgctatcctaggtttttttgttattccagatgaatttgcaaattgctccttctaattcgttgaagaattgagttggaattttgatggggattgcattgaatctgtagattgcttttggcaagatagacatttttacaatgttgatcctgccaatccatgagcatgggagatctttccatcttctgagatcttctttaatttctttcttcagagatttgaagtttttatcatacagatctttcacctccttagttagagttacgccaagatattttatactatttgtgactattgagaagggtgttgtttccctaattgggaagttttcttctttgattttgttgaagacattttcaggtcctttgaactgagaatcttcattctcttctaatccagtttttcttatatttggtcttttcattgtgttctgcatttcttgtatgctttgggttaggagttttttatgttttgaattttctttgacacatgtgtcaatctcttctacagtttcttttacacctgagattctctcttctatctcttgtattctgttggtgatacttacatctgtaattcctgacctctttcctaggtttccttttccaggtttacctccattttgttttctttttgtttattttaagatatatttatttattattatacataaatacactgtagctgacttcagacgcaccagaagagggtgtcagatcacattatgagtggttgtgagccattatgtggttgctgggatttgaactcaagacctttggaagatcagtcattgctcttacctgctgagccatctctctctccacaaaactacattttaactgtttaccaatctagtgtctgtaaaataccaaatatattgttctaatattacaaagtttggctgtcagcaagaaaatttcttgtatatgaatgcatgaagatgcagttttaatgtgtcaattaagaaacattgttttaaactttatcttttataagtctggtttttaggataggaattacataaaaatattatcctaatttaaaagtattcttagagacctgtttggctcagccatgtgttgttgcccaaaatggctttaacccttagtcatttatttttacaccaactttctgttatcaatattacagattttaaccatacatcataatttataagccaatattttatgactaatacatagagaccataataaacttatacatttttaaaatttaatttaatttttttacgtattcattttatatcctgctcactaaccccctcctgaatgtgtaagctaggcctaattaaatgttgtctcttaaaagagttgccttggtgatgatgccttttcacagtaatggaaacataactaagacagaaattggtaccaggagtgcagtattgctgtgataggcctgaccatattttttgtttggaagaatgtggatttggggactttggatttggaaaaaggtagaatgctttaattggggccttaatgggccatcctattagaattaaggaacccattggtgctgagggtgatttgaaccatgagagcctggctaaagagttttcaaaggagaagaattttagtatgtggtctagagactgttcttatgatattttagagaataatgtggctgctttttgcccttgtctaaagtaaatattcagattaattgtattgacaaaagaagttttaaaaaagcctagtgtagactttatcctgtggttcagtcttatgaagagcatttttaccaagcataggatgcttaaaaagaaaaaatacagaatgtatagttcaaagaataaaggggcaccaggaagtagaatacaactgaatcctatgttcaaggaagtaaacaaattaaaggagaggtgaaagttggagctgagacaaaaggatggaccatctagagactgccatatccagggatccatcccataattagcctccaaacgatgacaccattgtatacactagcaagcgttggatgaaaggaccctgatatagctgtctcttgtgagactaggccggggcctagcaaacacagaagtggatgctcacagtcagctattggatggatcacagggcccccagtggaggagctagagaacatatccaaggagctaaagagatctgcaaccctgtaggtgcaacaacattatgaactaaccagtaccccagagctcttgactctagctgcatatgtatcaaaagatggcctagtcggccatcactggaaagagaggcccattggacaggcaaactttatatgccccagtacaggggaatgccagggccaaaaaatgggaatgggtgggtagggaagtggtggggagggtatgggggactttggggatagcattctaaatgtaattgaggaaaatacataataataaaaatatttaaaaaaaaaaagaaagaggaaagttgtagaagaattttaatccaggaacacagttgctctggcaaggagtatccaaagatactatccagctagaatgcaaacatgccctggattacagtatggtgtggctagaatacagacacacccttagtacatacatttaattcctaacaatgaagttgaggttatttttaaaagaaagcaaccatgtttgaatgtgatgtctaattgcagggcagtccaactgatgaatcagagaaagatttaactgaatatgtcagatataggatatgcccaactcacattagaacagaaaggaaatagaggctactcaaaggtaatgagagagaactgggtggtgtgtgtgtatggcagttttgctagaacagttttacagatgcaggttgcagagagaataagcaatacacaggtgaagacagaatgcattagacaatagtaaggaggcagaagattagaacatattaccaaagttagtatgaagctaagtacaacaatttaatgagaagctaagagaagccagattgaatcagtctggaagatagattgtacagaggctagaagcttccagaactaagtctaggggtagttagaacgaatcagtcagtctggaagatagattgtacagaggctagaagcttccagaactaagtctaggggtagttagaacagggaaagaaatgttcgggctctgcctaagccatgtattcacacagctttagtatatggttctcatcttatctctttatcagaggaaataaaagcaaaatttataggtaatagaaacaaaaagagcaattttataccttctttttttaggagatgaatatgaagatcagacaagccaaatggagaaggaagatgataaagttttccctggtgaaagtcatacttatgtttggcaagtcctgaaagagaatggtccaatggcctctgaccctccatgtctcacttactcatatatgtctcatgtggatctggtgaaagatttgaattcaggcctcattggagctctgctagtatgtaaagaaggtaattatactaaaaaatggaattgagataagacagaggaagacaaaaacaacagaatccattgataactgtgagtctttgaactctttgttctgaaaagggcttcttttccctggaattatactcacagaaaggagaataatccacttttgaaggcagtgatatccatcctacataatccaagtgaacactagttttagaatatccaagatctacaataagatctctgtttccaaataattgctgcatttcacctgaaatcggtgggctatctcagcagggtttcttctctcctttgcttttcaaaaacttggctttaaaagtttcatggaggaaaacgcatttgtgtgtgtgaacagtgacatattaactaattcaagtgtgtactttgtcagcaaatgacatacacaaatctgagaaatctccatttactcatattttgttattctaaagataatcttgtttatctgctatttaatttatagtttaataccataaacttataaagaagtaaatttattataattttattttaattattttgtgtggaaaatcagcttcattataactctttgagttatctattgttcaataattacataatttggtggaatgaaacaaaataatatgttatttctcatggttttcttgagtgtcatggaatttggaactgtctatgaatgcatgatttatagtcaaaacagtggtcagagatgatatcacctcaaaggtatttcatatgacttaaatctatgattagaagacttaactgagatcatctctacttgatgtcttcagcttaggcaataaagaagagctagacattttatatggtcttaagagccatataaatggtttatattgtccattggaagctgcactacaacttctaatcacttctgtttcattctattatgtcatataattaaaactcatccattgtaggaggatagacaaagaatctaaaatgtatcgtttctgaataataatgagtttcagaagaggggaagaagactaaggtttataattacttgattatgacgtaattttattctttttctttgtggataaataaaataaaattatatatatatatatatatatatatatatatatatatatatatatggaaagatctctcacaaccataaatatatttataaaatctcaatttgccttcaattcacatatacttatgtaaaagacagtaaaagcgtaagtatgcagttttaatgccgagaagaaccaataaaatattatataaaaatatataataaaattaaaatagagaaattaagacattaaaatgaggcataaaaagagaaaaaggaacaaaaatgcacaaaaaagtataaaatgatgataaatttaggtctaaaaataagtaattatctaaatatagtaaaaccaaaaactatcatactgtatatgaaaacaaaaaacttttatattttatctacaaaaaatatatttcaccttctggtcggcaccagcactgggtcaccttgggcgcagagtcagcagacacccccaaagtccctagaggactctccatgcgatcttaggacctctggtgagtggaacacaacttctgccaggaggcaggtccaaacgtgagatatctgggcaccttccctacaagaggagagcgagcctgcagagagtgctctgaccactgacactgaggagagagctagtctcccaggtctgctgatagaggctaacaaaatcacaagaggaacaagctctaaccagagacaactataacaactaactccagagaataccagatggtgaaaggcaaatgtaagaatcttactaacagaaaccaagaccactcaccatcatcagaacccagcactcccacctcagccagtcctgggcaccccaacacacccgaaaagatagacccggatttaaaagcatatctcataatgatggtggaggacatcaagacggaatttaataactcacttaaagaaatacaggagaacactgctaaagagttacaagtccttaaagaaaaacaggaaaacacaaccaaacaggtagaagtccttaaagaaaaacaggaaaacacatctaaacaggtgatggaaatggacaaaaccatactagacctaaaaagggaagtagacacaataaagaaaacacaaagtgagtcaacgctggagatagaaaccctaggaaagaaatctggaaccatagatgtgagcatcagcaacagaatacaagagatggaagagagaatctcagatgcagaagattccatagagaacatcagcacaacaatgaaagacaatggaaaatgcaaaaagatcctaactcaaaacattcaggaaatccaggacacaatgagatgaccaaacctatggataataggagtagatgagaatgaagattttcaacgtaaagggccagcaaatatcttcaacaaaattatagaagaaaacttcccaaatctaaagaaagagatgtccatgaacatacaagaagcctacagaactccaaatagactggaccagaaaagaaattcctcctgacacataataatcagaacaacaaatgcactaaataaagatagaatattaaaagcagtaagggaaaaaggtcaagtaacatataaaggcaggcctatcagaattacaccagacttttcaacagagactatgaaagccagaagagcctggacagatgttatactgacactaagagaacacaaatgccagcccaggctactatacccagccaaactctcaattaccatagatggagaaaccaaagtattccacgacaaaaccaaattcacacattatctttccacaaatccagcccttcaaaggataataacagcaaaaaaccaatacaaggacagaaaccacgcccgagaaaaagcaagaaagtaatccttcaacaaacctaaaagaggacagccacaagaacagaatgctaactctaacaacaaaaaataacaggaagcaacaattacttttccttaatatctcttaatatcaatggactcaattcccccaataaaaagacatagactaagagactggctacacaaacaggacccaacattttgctgcttagaggaaatccatctcagggaaaaagacagacactacctcagagtgaaagactggaaaacaattttccaagcaaatggtctgaagaaacaagctggtgtagccattctaatatcgaataaaatcgacttccaacccaaagttatcaaaaaaaaaaaaaaaaaaagacaagaagggacacttcatactcatcaaagataaaatcttccaagaggaactctcaattctgaatatctatgatccaaatacaagggcagccacattcattaaaaaaaaaaaacttattgaagctcaaagcacacattgcacctcacacaataatagtgggatacttcaacacacaactttcatcaatggacagatcgtggaaacagaaactaaacagggacacagtgaaactaacagaataactgctgaaacaaatggatttaacagatatatacagaacattttatcctaaaacaaaaggatataccttcttctcagcacctcatgataccttctccaaaactgaccatataattggtcacaaagcaggcctcaacagatacaaaaatattgaaattgtcccatgcaccctatgagatcaccacggactaaggctgatcttcattaacaacataaataatagaaagccaacactcacgtggaaactgaacaacacacttttcaatgataccttggtcaaggcaggaataaagaaagaaattaaagacttcttagaatttaatgaaaatgaaaccacaacatacccatacttatgggatacaatgaaagcattactaagagggaaactcatagctctgattgcctccaaaaagaaactagagagagcacacactagcagcttgacaacacacctaaaagctctagaaaaaaaggaatcaaattcacccaagagaagtaaagggcaggaaataatcaaactcaggggcgaaatcaaccaagtggatacaagaagaaccattcaaagaatcaaccaaatgaggagctggttctttgagaaaatcaacaagatagatacacctttagccatactcactagagggcacagggacagcatcctaagtaacaaaatcagaaatgaaaagggagacataacaacagatcctgaagaaatccaaaacaccatcagatccttctacaaaagtctatactcaacaaaactgaaaaacctggatgaaatggacaaatttctagacaggtaccaggtaccaaagttaaatcaggatcaagttaatgatctaaacagtcctatatcccctaaagaaatagaatcagtcattacttgtctcccaaccaaaaaaagcccaggaccaaatgggtttagtgcagagttctatcagaccttcaaagaagacctaattccagttcttcacaaactattccacaaaatagaagcagaaggtactctacccaactcattctatgaagccacaattgctctgatacctaaaccaaacaaatatccaacaaagatagagaacttaagaccaatttcccttatgaatatcaatgcaaaaatactcaataaaatcatcgctaaccgaatccaagaacacattaaaacaatcatccatcctgaaccagtaggttttattccagggacgcagggatggtttaatatacggatatccatcaacgtgatacattacataaacaaactcaaagacaaaagccacatgatcatctccatagattcggagaaagcatttgacaaaatccaacacccattcatgataaaagtcttggaaagatcagaaattcaagtcccatacctaaacatgataaaagcaatttacagcaaaccagtaagtttatatccagctacttcaccgaagctgtttatcaggtttaggagttctctggtggaatttttagggtcacttatatatactatcataacatctgcaaaaagtgatattttgactttttcctttccaatttttatccctttgatccccttttgttgtcgaattcctctgctaggacttcatgtacaatgttgaataggtagggagaaagtgggcagccttgtctagtccctgattttagtgggattgcttccagcttctcaccatttactttgatgttggctactggtttgctgtagattgcttttatcatctttaggtatgggccttgaattcctgatcatcccaagacttttatcatgaatgggtgttggattttgtcaaatgctttctccgaatctaaggagatgatcatgtggtttttgtctttgagtttgtttatataatggattacgttgatgattttccgtatgttaaaccatccctgcatccctggaataaaacctacttggtcagggtggatgatttttttgatgtgtttttggattcagttagcgagaattttattgagtatttttgcattgataatcataagggaaattagtctgaagttctctaactttgttggatatttgtgtggtttaagtatcagagtaattgtggcttcatggaatgagttgggtagagtaccttctgcttctattttatggaatagtttgttaagaactggaattagatcttctttgaaggtctgatagaactctgcactaaacccatctggtcctgggctttttttggttgggagacaagtaatgactgattctatttccttagggaatataggactgtttagatcattaacttgatcctgatttaactttggtacctggtacctgtctagaaatttgtccatttcatccaggtttttcagttttgttgagtatagacttttgtagaaggatctgatggtgttttggatttcttcaggatctgttgttatgtctcccttttcatttctgattttgttacttaggatgctgtccctgtgccctctagtgagtatggctaaaggtgtatctatcttgttgattttctcaaagtaccagctcctcatttggttgattctttgaatggttcttcttgtttccacttggttgatttcacccttgagtttgattatttcctacagtctactcctcttgcttcctttttttctagagcttttaggtgtgttgtcaagctgctagtgtgtgctctctctagtttctttttggaggcaatcagagctatgagtttccctattagaagtgctttcattgtgtcccataagtttggatatgttgttggttcattttcattaagctctaagaagtctttaatttctttctttattcctgccttgaccaaggtatcattgagaagagtgttgttcagtttccacgtgaatgttggcttttcattatttatgctgttattgaagatcagccttagtccatggtggtctgataggatgcatgggacaatttcaatatttttgtatctgttgaggcctgttttgtgaccaattatatggtcaattttggagaaggtaccatgaggtgctgagaagaaggtatatccttttgttttaggataaaatgttctgtagatatctgttaagtccatttgtttcataacttctgttagttccactgtgtccctgtttagtttctgtttccacgatctgtccattgatgaaagtggggtgttgaagtctcccactattattgtgtgaggtgcaatgtgtgctttgagctttactaaagtttctttaatgaatgtggctgcccttgcatttggagcatagatattcagaattgagagttcctcttggaggattttccctttgatgagtatcaagtgtccctccttgtcttttttgataactttgtgttggaagtcgattttattcgatattagaatggctactccagcttgtttcttcagaccatttgcttggaaaattgttttccagtctttcactctgaggtagtgtctgtctttttccctgagatgggtttcctgtaagcagcaaaatgttgggtcctgtttgtgtagccagtctactggactatgtctttttattgggggaattgagtccattgatattaagagatattaaggaaaagtaattgttgcctcctattatttttgttgttagagttggcattctgttattgtggctgtcttctttttggtttttgaaggattactttcttgctttttctagggcatcattttcgttcttgtattgtttttttctgttattaatctttgaaggacttgattcgtggacagataatgtgtaaatttggttttgtcatgaaatactttggtttctccatctatggtaattgagagtttggatgggtatagtagcctgggctggcgtttgtgttctcttagtgtctgtataacatcttctggctttcatagtctctgttgaaaagtctggtgtaattctaataggcctgcctttatattttacttgacctttttcacttactgcttttaatattctatctttatttagtgcatttgttgttctgattattatgtgtcaggaggaatttcttttctgttccaatctatttggagttctgtagacttcttgtatgttcatgggcatgtctttctttaggtttgggaagttttcttctataattttgttgaagatatttgctggccctttaagttgaaaatcttcattctcatctactcctattatccataggtttggtcatctcattgtgtcctggatttcctgcatgttttgagttaggatctttttgcatttcccattttctttgattgttgtgctgatgttctctatggaatcatcttcacctgagattctttcttccatctcttgtattctattgctgatgcttgcatccatggttccagatttctttcctagggtttctatctccagcgttgactcactttgtgttttcttttgtgtctactcccctttttaggtcttggatggttttattcaattctatcacctgtttggtcgtgttttcctgcaattctttaagggatttttgtgcttcctctttaaggtcttctacctgtttagcagtgttctcctgcatttctttaagtgagttattaaattccttctttatgtcctctaccatcatcatgagatatgcttttaaatccgggtctaacttttccagtatgttggggtgcccaggactttgtggggtgggagtgctgcgttctgatgatgttgagtgttcttggtttctgttagtaagattcttcagtttgcctttcgccatctggtaatctctggagttagttgttatagttgtctctggttagagcttgttcctccagtgattctgttagcctctatcagcagacctgggagactagctctcttctgagtttcagtggtcagagtactctctgcaggcaagctctcctccttcagggaaggtgcccagatatctggtgttcggacctgcctcctggcagaagttgtattccactcatcagagttcctaagatcccgtggaaagtcctctggggactttgggggtttccgccgactctgcgcccaaggtgtgttggtgctggcaccgaccggaagggacttgtgaccctggtcaggccgggttttctgtttccctacgtaatcctgtctcgggtcccacacgattggattggagcagcagttgtgttccactcaccagaggtcccaagatcccatggagtgtcctgtggggacctagaaagaaacttcttaatctgaaaatatctttttaaaaaaaaatcccaaaaaactccaggttaaaccaggagtgctgttgcattcctataagcccaatattcagaaggtagaagcaggcagatcaggaataggtggcatccttatgacacagcaagttcaaggccagcctaaaatacatgaaccttgtctcaaatgaaattctaaaaaagcagcagcaatatacagttaatcttacagtgatgaaaaactaaatgttttcacattaagacttggaacaatactctctattcttacttgataaaacattggaagtcttccactaacataatattaaacataaattgcaatttcattgtcataaaacatttttagaaaacatagttgatcatgtataaaagtccaagagaatttttaaataaaactactataaataacagtataggcgatttgcaggactcaagatcaacataaaaatcagttgtattcaacagactatcaaagaataattagaatcaaaaatataaaaccttaacaaaacaaaacatgtaattgcatgtaaaatcaaaaccacaaaatataggtgaaagaaatcaagaagactcaagagaagaaacacactatgctctcattggatatactgattagttttttttgtcaacttgagatgaactagggtcatacaagagaaggaagcacaatagagaaaatgccttcataaggatggactgtagagcattttcttgattaaagattaatatgggaggacctaacccattgtgtgtggtacaacccctggtggtcctaggtgctatgggaaagtggctgcacaaggtatagggatcaagccagtatgcactgttcttctatgctgctgcctgtttcagtttctgcctcgatgtattttgccttgagttcctgccctgactttcttcagtgatggactacaactgtaagctgactaccctacctacttttgatcattgtgtatatcatagcaatagaaaacaaattgtaacagtgggctaaaagattcaacatactaacgatatttgttctccccaatgtacacatataatgcaattacatgtgtacattagcttaagtatagcttttgttaatatacacaaattgactctaaaacttttacagaaggtcaattgctaagttagttgaatatattttgcaaaagaatagtttattaatcactcaacccaaatttataactttctatacagctacactattatgacacatttgtcaaaagttatgaaacagaatagataggagagtagatctacaaaaaaatatgccaaaatggattggtataactttctgtacagctacactattatgacacatttgtcaaaagttatgaaacagaatagataaaatagatctacaaaaaatatgccaaaatggattggtataaaatacaatcaatggagaaaggggaacttctataaatggtgttagaataactagatagccatacacaaaaaaatgaaccagaacctaaaccatactccttatacaggtattaattcacaagatattagtcttttttatttctttattcactttatatctcgaccgtagacccctcctgtccttcctgtcccaccctcccataagtatcaaccctccctggcatatcaagccacagcaggagtaaactcatcctatcccactgaggccagacaagacagtccagctagaggaaggagagccagaggcaggcaacagaattagagacagcccctgctctaatggttaggggacctacatgatgaccaacctacacatatgctacatatgtcctgggggacctaggtccagtccatgcgtgctttttggttgatggttcagtctccatgagaccccatgggcctaggttagttggctctgtaagtctttttgtagtgtccttgaccactccagttccctcaatccttcccctgactcttccacaagtttccacaaagtctgcctgatggttggctgtgggtctctgcatctgtttccatcagctactgaatgaagcctctcagaagacacttatgctagtcctgtctacaagcatagcagagtgtcattagtagtgtcaggggttgactttctcctatgggatggatctcaagttgggccagacattggctggccaatccctcaatttctgctccaactttatccctatatatcttgtgagcaggacaaattttgagttgaagatatataggtgggttggtgtccttatcactcttctggaagtctcccttgagtacaggaaatgaccacatcagtctccaatttcccaactgctaggagtttcagctagttctctgccatagattcctgaaagcatcccctgtcccacgtctccagctcatcctacagatgccccccatttctgttctttttcccagccctcacctgactcccccatgtctgagctccaccccaggtctcctccccacctgctctatcacccagttcccttcctccttccacctccaatgtctattttatatccctttctgagtgagattcattcatcctcatttcagctttccctatcacttaggttcctagggtctgtgcattgtagcagggttatcctatactttatggcaatagccacttaaaattgagtacatacatgcctgtctttctagatctaagttacctcagttagggtgatattttatagttccatctatttatctgcaaaactctggatgtcctcattcttaaaagctgagtagtattccatcatgtaaatgaaccacattttctgtatccattcttcagttgagggacatctaggttcttttgtttcttttttattattctttagtctttttttatagtccagtctttatccccttcccagtctgccctctgactgttctatatcctatacctccttcccaccacccctggccccagtctccaagaagatgtcctcccacgcccaccccatcagactgactcactccctgggacttcaagtatcttgggggttaggtgcaccttctctcactgagtccagacacagatttcctctgctgtatatgtgttggaggcctcatatcacctggttggtgggccagtgtctgagaggtcccgggagtctaagttagttgagaatgctggtcttcatatagggtcaacctccacctcaaacttcctccatctttttcctaattcaactacaggggtcaccagcttctatccattgcttgggtgtaaatatctgcatctgactcttagctgcttgttgggtcttcctgaggagagtcatgataggcccctgtttgtaagcacaccatagcatcagtattagtgtcaggccttggggcctccccctgagttggatcccaatttgggcctatcactggacttccttttcctcagtttcttctccatttttgcccctgctgttctttcagacaggaacaattctaggtcagagtttttggctctgagatggcaatcccatccctccagttgatgccctgtctttctattggaggtggtctctacaagttccctttcctcactttagggcatttcatctaaggtccctccctttgagtcctaagagtctctcaccttccaggtctctggcacattctagagggtccacccacctcctacctcccatggttgcctgtttccatttttctgctggccccctcagggcttctgtcctgcctctccccccaaatacctaatcatattcccctcttaagtggttctcagacattagaggttcctctactgagaattctgtttaattctgtaccccattttaaaaaaatggattatttggtttgttgttgttgttgtataatttcctgtgttctttatatatttggatagtagtcctttgatagatgtagggttgatgaatatcttttcctaatcaagaggctgacattttgtcctattgatggtgtatttatccttacagaaggttttcagtttcatgaagtccagtttattaattgttgaccttagtgcctgagctactggtgttaagtttaggaaggtgtcttctgtaacagtgtattcaacccagtttgccactttcttttctattagattgagtgtatctgcttttatgttgaggtctttgatccacttggatttgagttttgtgtagtgtgatagatatgagtttatttgctttcttctacatgcagacctacagttagactggaaccatttcttgaagatgatttctttttccagtgtatggtattggcttctttgtcaaaaatcaactgtccatgggtatatgaggttatttctggatcttaaatgctttttcattgatcaacctgtccgtttttatgccaatagcatgtggtttgaattgccattactccatagtacagcttgaaatcagggatggtgatagctccagatagttaataaaagaatacagaagttattttattgtatggaattgtacaattaaaaaattagctatccttgagtttttgtttttcaatatgaatttgtgcatggctccttcaaggtctgtaaagaaatatgttgaaattttgatgggaattgcattgaatctgtagattgctttcggtaagatgaccatttctactatgttaatcctacccatccatgagcatgggagatctttccatcttctgatatctttattaatttatgtcttcagagacttgatgtttttgtcatacaagtcgttgacttgcttggccagagttacagcaagatattttatattatttatagctataatgaagggtattgtctccttattttctttctcactccatttttcaattgtttaaagcaaggctactgattttttttttagttaattttgtatctatcccctttgctgaaggtgtttatcagcaataggaattctgtagtagaatttttggggtcgcttatgtatactatcgtttcatctgcaaatggcgatactttgagattgctctttcaaagtctataaaacattgtgttagaatttttatgggtattgcattgaatctatatcttgtttttggtgagatggccattttcaccatgttaatcctacgtattcatgaacataatgtctttaatgtactcctgggttcagtttgcaagtattttattgagcattttgcatcaatgttcataagggaaattggtctgaagttccctttctttattgagtctttgtgtagttcagatatcagaatgactatggcttcatagaataagtttggcaatctttgctttgtttctattttgtggaacagtttgagaagtattggtattagctcttctttgaaagtctggtagaattctgtacttttctcagccctttactccgaggtaacgtctgactttgttgctggggtgtgtttcttgtgtgcaacaaaatgaaggatcctgttttcatatcagttttgttagcctgtgtctttttattggggaattgattccattgatgttgagaaatgttaatgactagctgtaaattcctgttattttgatgttggtggtgagtggtgtgtgtgtgtgtgtgtgtgtgtgtgtgtgtgtgtgtgtgtgtattagggttaaggtcaattcaggtgtcttaggatattcagtgattgatgtagcaggatagctgacctctggtggtgccatattgccctggcccttgttgattgtgttcttatgctgtcctttagccatctggttgttcctggtattagatgaatattccttatgtcagcaggtctcctcaggaggcaggtgcagtgccttatatctgaaaatggatctcaaggaacagcaagctgctcacctctgctggctgtgtctcaggtggacctgaatattcctggggaccccacaagcctctttaggaaggcaagcaaagccatgtgcaataagatgaaggtcaggggacagtgagcagcttacctctgttggttgtgccccaagtggtcctggcaggccggggattggttggggaggcatctagcctggatattcttggggccctgaaggcctcctcaggaaggttgacagggccatgggccagaagatggacacagctcacctatggtagcttttccgcatgtggacccaaatgacagtcttaaaatgtaaaatgtaatgctttaaaacttttacaaaatatagcagaaagtttttattattgtggataggagaaaggtatataaatctgactccaaaaaagccatgaaaattcaaggaggcgggcttcttgcgaacaacggtttcagtagcagacataggatgagaatggggtaattgtgggaaaaaaattactaacatcatttcatacatgtataaaactgtcaacaaattttaaaatgggaatgtataagtgggctatgttaaaataagtaacttttactttgtaaaataagctgcaaggagaatgggggggaaagctgggcacagaaattcatctgctctcacatagaaatgtgcacacaatataagactatataaacacaatttttaaactatattaataaattttcaaaatgtgaccttagttgtttgttttcttcacatataatgtttactacttgcaattacataagtaaaagttataatggcaatagaagttccctacattaattatccatatacacatttcattgacaatatttactatttttgttattttctcctgttaaaacctatctatatatctatccacatatccatttgtgtgttttattttgatttgttttttgtttgtttgttttttgttttgttttgttttactttaaattccatttcccagaaattcagggttttttatttaaaaaaataaataaatttctagaagaaattggaaacttacattagtaaccatttactcccaatagttttagaaataccaatttaaaggcccttacaccaaagaaaaaagttaaaattaggcaaagtatttcattttttatactcaaacggtctgtgaagaaatttgtccttattgtggcaattttctacaagggcattttaaattgacaataaatgctttctcttctctttcaggcagtctctccaaagaaagaacacagatgttgtaccaatttgtactgctttttgctgtatttgatgaaggttagcaaatttcaatcgattaaacatttgaattcctaaatgacaacaaatatgtaacatctagtgttggagaatttaggctgcttatgttcagaaaaagtgatgttgattataggaagaccacaactatattactattcaggagagaagtaagtggggaacaaaaatgattctaagacaaaaatgcaacctaatctaatatccaaaattcataaagaactcaagaagttagacaccaacaactcaaataactgaattttaaaaatagggctcagagccaaacagggaattctcaacggaggaatctcaaatggccaagaaacacttaaagaaatgttcaaatgatataaaataccttggtgtgactctaactaaggaagtgaaagatctgtatgacaagaacttcaagactctgaagaaagaaattggcaggatcaatatagtaaaaatggccatgttaccaaaagcaatctatagattcagtgcaatccccatcaaaatttaaactcaattcttcatagacttagaaagagcaatcctcaaattcatttggaataacaaaaaacctagggtagcaaaaactattctcaacaataaaaaaaaatttctggagaatcaccatcccagacctcaagctatacgatagagcaatagtgataaaaactgcatggtattggtacagaaacaggcaagtagatcaatggaaaagaattgaggacccagaaatgaacccgcacctatggttacttgatctttgacaaagaagctaaaaccattcagtggaaaacaaacagcattttcaacaaatggtgctggttctactggtgatctgcatgtagaagaatacaaattgatccatacctatcaccttgcacaaagctcaagtacaagtggatgaaagacctccacataaaatcagaaacactgaaagtaatagaagagaaagtggggaagagcctcaaatacttgggcatgggggaaaacttactgaagagaacaccaatggcttattctttaagagcaacaatcagcaaatgggacttcataaaattgaaatgcttctttaaagcaagggacactatcaacaagacaaaatggcaacccgcagattagggaaagatatttaccaaccctacgtcccatagagggctaatatccaaaatatacaaagaactcaagaaggcaggctccggaggaccaaataaccatattaaaaagtggagtacagagctaaataccgaggaatctcaaatggctcagaaacacttcaattgttcaatatccttagtcatcaaggaaatgcaaatcaagatgaccctaagatttcacttcataccagtcagaatggctaagatcaaaaattcaagtgacagcagatgttggtgaggatgtggaagaagaggaacattcctccattgctggtgggattgcaagctggtacaaccactctggaaatcagtctggcagttcctcatacaattggacatagtattacctgaggacccaactataccactcttgggcatatacccagaagatgccccaccatctcacaaagacccttgttcatctatgttcatagcagccttatttataatagccagaaactgaaaacaacctaggtgtccctcaaccaaagaacggataaagaaaatgtggtaaagctatgcaatggagtactattcagataataaaaacaaagacatcatgaatttatctattaatggtgtattttgccttacaggagcttttcagtttcttgaggtcccatttaccaattcttggccttagcgcctaagccattgatgttcttttcagaaaggaagttgtctcttgtcccaaatcattcaaggctctttctcacattctcttctattagattcagtgaatctgttgaggttctgatccacttggacttgagctttatgcagggaggtaaaaatgggtctactttcattctcctacatacagaccgccaggtggactagcacatttattaaagatgtgggtttttttcttttctttttttcttttttattagatattttctttatatacatttcaaatgctatcccgaaagttccctatacccccactccgccctgctcccctatccacccactcccgattcttggccctggcattcccctgtactggggcatgtaaagtttgcaataccaaggggccgtgtttttttttttttttctactgtatattttttgtttctttgtcaaagatcaagtgtacgtaggtgtgtggttttacttctgggacttccatgttgaagtttcccactattattgtgtgaggttcaatgtgtgttttgagcttttgtaatgtttcttttacaaatgtgtgtgccgttgcatttggggcatagatgttcagaattgagacttcctcttggtggatttttcatctgattatgaagtgtccttccccaactcttttgataacttttggtttaaagtctatttttattggatattagactggcaactccagcttgtttcttgggaccattacactgttattttctgatttgaggctgtgtcatcttgatcctggcaagtctttctttctttctttctttctttctttctttctttctttctttctttctttcttttttttttttgttttgtttttcatacttgtttttaaaaagtgcctaagtactaacaccttgggactaatagatggaaaccctagcagactgtgagcttccaccaacccagaagttaagatgtcaccatataacatcttgggactatagaaagcttcccccaatctctctgtgcctgcctctctgatgtacccacaaatgtattttaaacttgccttgatttgggactttctttattctgtaaaactatgaaactgtttccacatcagaacttggaatttgtggtaacctaaatgtgtgttactgagctgtagtcactcaaaatagctccagaatacacggttgtgttcattgaaaaaaaaaaagtgcctaagtaattttcagtgcttcagcttttgttagttttggagagtagtttgggaagccttcaactacctggggtttccttgctacaaaaataggctgaggcaaaaatgtcagggcaaggactgactaccctttttaaatctatcatctaacattgcaaaatgaaattcttgtagcttaaactaactagtatttttccttctccttagttatcatttgccattattcctctgtcattatgaacaaatacagggaaagttaattggtttgggaaaaatataatttttttctcagtgactctgagattgtgtctactccactgacaaaaatccagtgtcacaaaaaaggaaaggaaagaaggaaagggggactgtaactcgtgaaacagaccttatttttttctctctcttactagggaagagctggcactcagaaacaaacgactcttatacacagtctatggattctgcatctgctagagactggcctaaaatgcacacagtcaatggctatgtaaacaggtctcttccaggtatgtacacgactgtccaacaattctcagggttttgggacttcaaaatcataagtcttttctacagctttcagagagttctacattcactgaattccaccctctggtttgtttatttatttgtttgttttcatatatgaaagaagaagaattagactggcagtatagtagagcaatatctttaaaagggatccaagggaaagattattttcaaactataatttagagcattagtgaataatagaggatgttatcagccatggaatgccttaggaacaactgaatatatactacagtaaaactaaagagtaaattaaagaaacatattcatgtcatttagcagtatgttagttatttgttgctttggcaagagctgttggtttggaaacttccttggtaactgtttataagttaaggtagcagtaaaatttgtagagttattttatccagcctattctatcaagtacttttaattttacaattcctaattattttccatagctgtctcatttccattttacaggtctgattggatgccataggaaatcagtctactggcacgtgattggaatgggcaccactcctgaaatacactcaatattcctcgaaggtcacacattttttgtgaggaaccaccgtcaagcttcattggagatatcaccaataactttccttactgctcaaacactcttgatagatcttgggcagttcctactattttgtcatatctcttcccataaacatggtactacaatcttggatcttgaaaatgagtaatgtaaaagattccattgtaattttaatgacatgtcctgggcagtgtacatcaatacaatatgttgcaaaaatggcattgtatagttacaattatgttaaacttcaaatgtaacaatttttaccttgaatatagaagaactttattgctagtacaataggattgtggggttttggttaaatgtctgtgatagaaggaggagacatagtttagggatgagtaagaaggaaagatgaaagacagtatgttagtggtttcacagtctgatcccattaactaggcttcagtactagttaatgggatcagactgtgggaagagaaaaagagatgattcaatcaggaatctagggaaatgggtatcatacgaagttttaaaggactatctgatagaggttttgcaaaggagttaagatcctgtgtaaacaaaattgggacaattgtgcctacagtgtcaattcctggtcacatgactttgtaggcagtagctatgcaaattcatattgaataatccttttacttcaattcttcttcttgtacattaactcgttattttttgtcttggagcaacctaataactttttcttggttatgtccatttaaggctgccttagtctgttatattgccagaatagaatatcagaaatagggtaatttataacaaacagaaaattattatctcacacagttcaagagcctaggaaattaaatatcaagattttgtcatttaataggagatttctttctgttatagtataggaaaatgatgcacatggcagacagagaaaagagaaagatgaagagagggaggaaatagagaagcaatatctttctgagataacaagccaattcttgaagtaacagaattagtccatccatgagatggaaacaaaataaacagttccaaagagaaatactcacatattttccaaaatgttatattaatgaattttggagacagttcaaatcatatagaggatagtttgataaaatggcaaaaccacaaactaacagtactataattcatatagaagtgtaacaaaaacagtgctgatttgaaaaagggacacttaagacaaaatatttaaaccataataagaggggaaaatatataacctttaactcaagaaagttaagaacattctttggtttgtctgactgcagatggcatggaagcttatgtcaaagtagatagctgccctgaggaatcccaatggcaaaagaaaaataataatgaggaaatggaagattatgatgatgatctttattcagaaatggatatgttcacattggattatgacagctctccttttatccaaattcgctcggttgctaaaaagtaccctaaaacttggatacattatatttctgctgaggaggaagactgggactatgcaccttcagttcctacctcggataatgggtaaaaacctttggactcttggtactactctcccctgtactcaaatttgtcttacttatttaagccaatgaatccttaaagcatatttaagagttagtatgtcatgggatcaaatgataaggatgttgtagtatctaccattctactactgtgctaaaatacctaaataagtgtggatttataagtgagaaagttttattttgactcgtggatttggaattttcagtctgtgcttgcttgactaccgctttggacttgggacagcacaaaaattcacaataatatgcaaaatggaaggggcctattacatacaagaaccaaagtgagataaaagggacctaagaatccaatatcatccccttcaagggcatgcccccaatgacctaagttcttcccactaagcttcaattctttcctttttttcagggtttcacatttatttcagtagctcagcaaatatctacacacacacacacacacacacacacacacacacacacacacaaacacagccacaggcagtgagatgtaaggcgatgatagtatctctgtcttgcgcatgccacattgcacagcagatgaagcacaggaccagttctcaaatgctcatgccctcagggcctgctcacctgcatccccaatgccagggtcagctctactctcctgcccaggcaaggtgcagggcctgctctcccaaacactgcgtaggctccagctcttaaagattctacctcctctcactagctccatacccttgtgactaagcctttaacgcttgttcattctgtggcaattcatagaacattagatactagaataggtaagcctaagactacttagatttttcttgctctttattttgagtaaatcatattagaagtgggtttttgattccctaaatgtttctgaccttacgcctaatctttttgcctctcaaacagaagttataaaagccagtatctgagcaatggtcctcatcggattggtaggaaatataaaaaagtcagatttatagcatacacagatgaaacctttaagactcgtgaaactattcagcatgaatcaggactcttgggacctttactttatggagaagttggagacacactgttggtaagtaaaggggaaaatatgagattgtttcagatggtggcttatagccatttgtttcactagtctcagggaatgcaaaaggctctgctgacctccatgggtaccagacatatatgtggtacacatacataaatataggcaaacactcatacacataaataaaataaatatttttttaaaagaaaagagtagatggtttgaatttctgtgatccttcaaaattcagccttgtctccaatggacagaatcttttaaaatttataagtattgcacaaataaaattaactcatatctaatgagtatatgggaaaaaaattaatatgaacaatcacacatgcaacctcttttaacttcttactatttagactggtacatacatatcctcccagaacttttttcattaattattttccttcattaacttttaaaatacaaaccataccctcagatctagaggtagtcttcaagcattcagtgctatttttatgttactgctttttattttttaatcttatttaaagctcttataatcggtgtcacctgccacccttgcttgaggctatacattgtcttctagttatacctgcttattaagtgataattcttataacctggatcactatctccttctcaagtattgaagtattaagtgccaagaatacagtaaagctgtccttaacaaacaccaagatttcactttatctgggagatgcaggcaagacttgctaaagcaagtgaaattgaaaaagtgtggcaaacccaagcagctacatgagcttccttttcatgaacagagtgaatatattgagttttattaagagttcacacctataatgtaaatacagtcagcttttgattttctagacctaggttacagttttcttgttaaacctactcatcttaggacttgatctcatctctcacttatattttcagattatttttaagaatcaagcaagccgaccatataacatttaccctcatggaatcactgatgtcagtcctctacatgcaaggagattgccaagaggtaattagtatctcggtttatagatctttctttttctttttttctttcttttttttttgcatttttttctggatttaaatttattctatacaaaggcaatggaaacaagaaaaatccaagttgagtttcaggcattaacgtttcaggaaaaatatgaaaaaaaaaagtaatagattttcaatacaaaagccatgattatattacaggtgaaaagaatgatcattaactgtatcagttgtactgtgagtaatatttgctttcagttaaagcacactattctccagtaagttcttatttatgtatttatttatttacacactatatttcattccttgccctcctatctaccctctatctgctccacatcccacacctcctccccacacccctgtctccacctggatgtccccactccacaccccacctgacctctaaattccctggagcctccagtctcttgagggttaggtgcatcatctctgaatgaacacagacccggcagtcctctactgtatgtgtgttgggggcctcatatcagctggtgtatgctgtctgtttggtggtcaagtgtttgagatatctctgggaaaagggcggctccagattaagactactggtgttcctacagggccacctttctcagcttctttcagccttccctaattcaacaacaggggtcagctgtttctgtccattggttgggtgcaaatatctgcatctgactctttcagttgcttgttgggtcttccagagggcagtcatgataggtccctttttgtgagcactccatagtctcagtaatagtgtcaggccttggggcctccccttgagctggatccaactttgggcctctctctggcccttcctttcttgaggcttttctccatttctatccctacagttcatgcatgtacttttgggtctgagttacctcactcaggatgatattttctagttccatccatttgcctgaaaaactcaggatgtcctcattcttaatagctgagtagtattccatagtgtaaatgaatcacattctctgtatccattcttctgtctgaaacatctgggttatttccagcttcatgctatcacaaataaggccactatgaacatagtggaacccttaaccttgtggcacggtggtgcatcttttgggtttattcccaagagtggtatagctgggtcttcaggtagatctatttccaattttctgaggaacctccagattgatttccagagtggttgtaacagtttgcaaccccaccaccaatggaggagtgttcttctgtctccacatcctctccaacatgtgttgttacctgtggttttgatcttagccattctgattggtgtaaggtggaatctcagggtcgttttgatttgcatttctctgatcaataagaactttgtacatttctttaggtgcttctcaaccattcaagattcctcagttgaaaaatctcagtttagttttatatcccattttttgattgggttgttcaggtttttttttttttttttttttttttgtgtgattcgcttcttgtgttctttatatattttgtatattagccctctatcgatgtggggttagtgaagaatttttcccaatctgtacgatgccgatttttcttctttgcctacagaagctttccagtttcatgaggttccatttgtcaattcttgatcttagagtgtaagccattggagttctgtttaggaaatgtccccttgtgccaatgagttcaaggccctttaccactttctcttctatttgattcagtgtatctggtgttacattgaggtccttaatccacttagacttcagctttgtgcaaggtaacaaatatgggtctgttttcaattttctacatacagaaagtcagttagaccagcaccatttattgaagatgccttcttttttccattgtatatttttggcttctttaccaaagatcaattgcctgtaactatggttttatttctgggtcttcaattctattccattgagcaacatgtctgtctctgtaccaataccatgcagctcataaatcttgaggtcagggatggtgactcccccaactgttcttttattgttaacaattgttttcactattctaggttttttgcctttccagatgaatttcagaattgctctttccatgcctttgaagaattgttctggtattttgatggggattgcattgaatctgtagactgcatttggtaggatgtccatgttaattatgccaatccatgagcatgggagatctctccattttttgagctcttcttgatttctttcttgagagacttgaagttattgtcatacaggtctttcacctgattggttagagttaccccaagatattttgtattatttgtggctattgtgaagggaattgtttccctaatttttttctcagcctggttattatttgtataaagaaaaactactgatttatttgagttaatttttatatccggacactttgctgaagttgtttatcagctggagaagttctctggtagaatttttggggtcgcttatttatactatcatatcatctgcaaatagtgatacctttaattcttctttgacaatttatatccctttgatctatttttcttgtcttatatttctagctagaacttccagtagtatattggacagatacggggagagtgggcatccttgtcttgtcccagatttcaatgagattgcttcaagtatctctccatttaatttgatattggctgttggtttattatgtttagatatggaccttgaattcctgatctctccaatacttttaacatgaaggagtgttggattttgccaaatgctttttcagcacctaaggatatgatcatgtgatatttttttttggagagtgtttatataatggactacgctgatgatggatttttgtatattgaactagccttgcatccctgggatgaagcctacttaatcatggtgaatgatcgttctgatgtgttcttggtttgcaagaattttattgagtatttctgcatcaatattcataagcgagattggtctgaagtcctctttttaggttggatccttgtgtgatttaggtatcagagtaattgtggcttcatagaacgagttaggtagtattcctcctgtttctattttatggaatagtttgaggaaaattggtatcaggttttctttgaaggtctgctggaattctgcactaaatccatctggccctgggctttttttggttgggaggtttttaatgacttctatttctttgtgtgatatgggcctttttagatagtttacctgatcttgatttaagtttggtatgtggtatctgtctagaaaaccatccatttcatcaagactttccagttttgttgagtatagacttttatagtaggatctgatgatttttttgaatttcctccctttctgtttttatgtctcccttttcatttctgattttattaatttggatactgcctcttggccctttaattggtttggctaaggctttatctattttgttgattttctcaaagagccatcttttggttttgttgattctttgtattgatttctttgtttctatttggttgctttctgccttgagtttgactatttcctacctctactcctcttgggtggtttgcttcgttttgttatagagctctcaggtattgggttatgttgctagtgtaagatctctcaagtttctttaccagggcacttagtgctatgaattttcctcttagcactgctttcattgtgtcctataggtttgaatatgatgcgtcaacattttcattaaattccaggaagtctttaattttttctttcttcccctgaccaagttatcattgagtagagaattgttaagtttccatgggtatttgagttatctgttgtttttgttctcattgaagaccagccttagtccatggtgatctgataggatgcatggaattatttcagtcttcttgtgtctgttgagacctgttttgtgcccaattacatggttgattttgtagaaggtaccatgaggtgctgagaagaaggtgtattcttttgttttagggtgaaatgttctgtagatatctgttaaatccatttggttcataacctctattagtttcactgtgtctctgtttagtttctgtttcaatgacctgtccattggtgaaagtggagtgttgaagtttcccactattattgtgtggggttagatgtgtgttttgagctttagtaaagtttctttcatgaatgtgggttctcttgcatttggggcatagatgttcagaattgagactttctcttggtggattttccctttgatgtgtatgaagtgtccttcctcataacgcttcataaccttaggttgaaagtctattttattgtatattaggatgtcaactccagcttgtgtcttggaaccatttgcttggaaccattttccatccttttactttgagatagtgtctgtctttgttattgagatgtgtttcttgtatgcagcaaaatgctggatcttgtttgtgtatccagtctgttagcttatgtctttttgtaggtgagttgagtccattaatattgagagatattaaagagagatgactgttgcttcctgatatgcttgtttttatagatggctttatgtgccggtggttctctcctcttggttttgttgtgagatgctcaatttctttctttggtgcaggtacctaccttttgttggagtttttcttctaggatcctctgtagggttggatagatagatagataaatacatactgtttgaatttggttttgtcctggaaaaccaaattttggtttctccatctatgttgattgagagttttgctgagtataatatcctgggatggcatttgtgttttcttagagtctgcatggcctctgatcaggctcttctggctttcataatctctgttgagaagtctggtgtaattctgataggtaggtctacctatttatgttacttgacccttttcccttgaagcttttaatatttattctttgttctgtgcatttagtgttttgattattatgtgatgagaggattttcttttctggtctcatttttttggtgttctataggcttcttgtacctttatggccatctattcctgtaggttggggaagttttcttctttgattttgttgaagacattttcaggtcctttgatctgagaatcttccttctcttctaatcaagattttcttgtatttggtcttttcattgtgtcctgaatttcctggatgctttaggttaggaggttgttatgttttgaagtttcattgacagttgtgtcaatctcttctatggcatctcctatatctgatattctctcttctatctcttgtaaattcataccattttattaatgcaaaatcaatttgcaaatatatttaccatacaactaggtaatatactgttgttattttcttgcccacagtcctaatcattttactattaaaataaaatagattatataagaatatacaaatattcttattacttctattatttgtaataagagggacacctttttgaaataatatgttatgaaaagcatagaaagaatcttttataaggaacacctttcatttataaaagctgatggccaatgagctgaggcagaaaataggagatgtgactctgggaggaagagagagtcttctgggaaagagcgaaggaataaagagaaatgaacatatatcatcagatagctgaactctggatagagacaagagattcaagtgagatgctgagtaagatgctgtgagagatgctgaagtagatggtaagaaagaaggagaggtaaactaaccatgtgtaagacatataatagtttacatggattaaatgagttatgagcagctcatggaatgagccacaatttatggcctaggcatttattaataaataattagtttcagagtcatcattatgggaccaggggctcaaaagaagaaaaaaaaaacagatttatatctttatagaaaagtctccttggcccatttttttttaaaggtttatttatttattttatatgagtacactttcactgtcttcagacacaccagaagagggcatcagacctcattacagatgacggtgagccactatgtggttgctgggaattgaactcaggacctctggaagagcagtcagtgctcttaactgctgagccatctctccagccttccttggcccatttctattgtataaaataattgtttgaatcttaaatttgctacaggtgccattttactttctgcttactgaaaaaaattcgcatgcacatggattagtagtctccttgaaataagaactgattattgttaaagggggaactttagatacactgaacttgacataattcatgaattaattttggaccaaaaatgattcagaatacttcagcttaccactgagaggaagagaaccgtatttatagacagagaaccgaaagtgacatagaaatagcctgattaaatgcagacagtggattttttttataaaacattttctcagcttcagcctttaatgagctagaggttcagctgttgtgatatgctaagactcagctccttgttattacaatatacttccaagttaggttaaaaatatccatatactaatttaagttacagtttccatgcagagagaacttgaaatgtatatatagaagccggtttgggtcaaacttaatttaacattacaaaatcttgtgagattatgccggggcctagcaaacacagaagtggatgctcacagtcagctattggatggatcacagggcccccaatggaggagctagagaaagtacccaaggagctaaagggatctgaaatcctataggtggaacaacaatatgaactaaccagtactccccggagctcgtgtctctagctgcatatgaatcagaagatggcctagtcggccatcagtggaaagagaggcccattggtcgtgcaaactttatatgcctcagtacaggggaacgacagggtcaagaagtgggagtaggtggggggggggagcgggtgggggacttttgggatagcattggaaatgtaaatgaaataaatacccaataaaataaataaataaataaaaacaaaatatgtagctcattatactctaatactctgtttctggtttgaatgtggataggtataaagcacgtgaaggatttgccaattcatccaggagagatattcaagtacaagtggacagttacagtagaagatggaccaactaaatcagatccacggtgcctgacccgctattattcaagtttcattaaccctgagagagatctagcttcaggactgattggccctcttctcatctgctacaaagaatctgtagatcaaaggggaaaccaggtgaaatcttttctttccaagtactaaatttgaaagtaaaagtcgaataaaatgcctatgaacttctagatattccctgtattctcttgatatagatacctctataacttatagaaaatattacccaataaaagtgattaaggtgagttccacttagctttcattatattttagttttctgagtaacttgtcttctaagaaacataaaagccaggatcctagattctttctatttaactcagttccaatctgggattttgctccccccgccccaaggagtcttccccgttcttactcatctaattgcacctacatttaaattaccattttttttgagacagggtttcaggtgttccaggcttgcctcgaactctttatgtagttgaagatggtctttgacatctggtcctcttgcctataccttgtgaatactggaattatagtgtgtgacaccatgtccagtttaagcagtactggggatcaggctagtatgttggagaacaagtgtgatggattgtctctgtatattcaattgttaattctgtgtcatcggagtgctaagtgctctcagtatcttggtattgttatttctaagacccatgactggtctcgtattttgtaaatatttgtccttcttcactagcttgaagacaatctataattgtatctgattggctgtaataatgatgtgacatccaatagttggacagatagaggaatcctgggtaaagaaagcaggggagagattcagagagcactctggggaatagacactgcattggagcagagacaagataggttaaattagatgagctacctcggagactaatgaaggcctaaactttaaactatattagaaccctccctatctttatttatactgctggcaggtttgagaaagtcaagctatacccatggctttgtgcatgctaggcaaactaccaactgaaatacatcctgacctctacaaattttaaaaactacaaaattatgcctacaacctgtttctttcctggacatctcattatggatgaatcaaaagcaccttaaaattagccatgttgattgtacatgccttcaatctaagtacaggggagactgagttaggtgagtgttttcaaggcctgcttggaaaacataggaagttctaggccagcctgtcatgtgagcaaaaccctgtcagaaaataaaagtaacatatttcaataaaaaaattcgaatacggtctaggaaaaaaaagtaacatatttctaacatctacaacattatgtgacatttagtaaagaaccaatatttgttcaacaaaatagaggaaaatataaaatggtctcagattgtggttagaacttaaactatttctactgttttagaaaattatctgagtaagaaaattttagttatttataaaaatctcaattcttggatccagaacaacttgctgccatattttgaggcttgaatatgaattcattttgactttttagaatacataaatttctactagttagaatgtatagcatacaaatccagagtgtaggactttcaactaatatttggatatgacaaaatatctctcctaagaatatttccgaattatacttttccacaagcttctgaaagatggctgaaatatatattctctaattaccttttcagcagtttggcttttgtaactaatgggtcatataaaatgaaatttacacatatgaagtttagatattaaatcttatactccagataccaggtaccaaagttaaatcaggatcagattaatgatctaaacagtcccatatcccctaaagaaataaaaactgtcattaatagtctcccaacaacaacaacaaaaaaagcccaggaccagatgggtttagtgcagagttctttcagaccttcaaagaagacctaattccaattctcctcaaactattccacaaaatagaaacagcaggtactctacccaattcattctatgaagccacaattactctgatacctaaaccacacaaagacccaagaaagaaagagaactccagaccaatttcccttatgaatatcaatgcaaaaatactcaataaaattcttgcaaacagaatccaaaaacacatgaaaaggatcatccatcatgatcaagtaggcttcatcccagggatgtagggattgttcaatatacagaaatcattcaacataatcctctatataaacaaactcaaagaaaaaaatcatatgatcatctcattagatgctgagaaagcatgtgacaaaatccaatgcctgttcaagataaaagtcctggagagatcaggaattcaagacccatatctaaacatagtaaaagcaatctacagcaaaccagtagccaacatcaaactaaatggagagaaactcgaagcaattccactaaattcagggactagacaaggctgcccactcttttcctacctatccaaaatagtatttgaagtcctaaccagagcaattagacaacaaaaggaaatcaaagggataaaaattggaaagaaagaagtcaaaatatcactatttgcagatgatatgatagcatatataagtgaccccaaaaattccaccagagaactcctaaacttgataaacagcttcagtgcagtagctggatataaaattaaacaaatcaatggccttcccctacacaaaggataaagaggctgagaaagaaattagggaaacaacacacttcacaatagtcacaaataatataaaatactttggtgtgactctaactaagcaaatgaaagatctgtatgataagaacttcaagcctctgaagaaagaaatcaaagaagatctcagaagatgaaaagatctcccatgctcatggatttccaggattagtatagtaaaaaatggccatcttgccaaaagctatctacttattcaatgcaatccccatcaaaatttcaactcaattcttcatagatttagaaagagcaatttccaaattcatttggaataacaacaacaacaaaaagtagtgaaaactattctcaactataaaagaacttctgggggaatcaatatccctgacctcaagctgtactacacagcaattgtgataaaatctgcatggtactggtacagcaaaagacaggtagatcaatggaatagaactgaagacctagaaatgaacccacacacctatggtcacttgatcttttaacaaaggagctaaaaccatccagtggaaaaaagacagcattttcaacaaatggtgctggctcaagtggcagttagcatgtagaagaaggcaaatcaatccattcttatctccttgtacaaagctcaagtccaagtggatcaaggactttcacataaaaccagatacattgaaacttaaagaagagaaagtggggatgagccttgaacatatgggcacaggggaaaaaatccaaacagaacaccaatggcttgtgatgtaagatcaagaatcaacaaatgagacctcataaaattggaaagcttctcagtgagtgcatatcatgtatgttcttttgtgattgggttacctcattcagaatgatatcctccagatccatccatttgcctaagaatttcataaattcattgtttttaatagctgagtagtactccactgtgtaaatataccacattttctgtatccattcctctgttgagggacatctaggttctttccaccttctggctattataaataaggctgctatgaacatagtggagcatgtgtccttattacaagttggaacatcttctgggtatatgcccaggagaggaattggtagtactatgtctaattttctgaggaaccaccggactgatttccagagtgtttgtaccagcttgcaatcccaccaacaatggagaagtgttcctctttctccacatcctcccagggtctgcaacgctataggaggaacaacaaaatggactaaccagtacccccaagaactgtgtctctagttgcatatgtagcagaggatggcctagtccggccatcaatggggggagaggccactggtctttcggagatcatatgccccagtacaggggaatgccaggttcaggaagtgggagtgggtgggttggggagcagggtgaggggagggtatagagagctttggggatagcatttgaaatgtaaatgaagaaattatctaataaaaaatttaaatggtgaaaaaattgcaaagcttctgtaaggcaaatgacactgttaataggacaaaacagcaaccaacagattgggaaaagatctttaccaatcctacacccaatagagggctaatatccaatatatacaaagaactctagaaggtagactgcagagaaccaaatcaccctattcaaaaatggagtatagagctaaacaaataattctcaactgaggaatactgaatgactgagaagcacctaaaaagatgtccaacatccttagtcatcagggaaattcaaatcgaaacaacccacctcataacagtcagaatggctaaaataaaaaactcaggggacagcagatgctggtgaggatgtagagaaaaagtaatactcctctattgctggtgggattgcaaactggtacaaccactctggaaatcagtttggcagttcctcagaaaattggacatagtactacctgaggacccagcaataccactcctgggcatatacccagaagatgctccaacatttaataaggacacatgctccactatgttcatagaagccttatgtacaatggccagaagctggaaagaacccagaggtccctcaacagaggaatggatacagaaaatgtggtatatttacacagtggagtactactcagctattaaaaacaatgaatttatgaaattcttaggcaaatggatggatctggaggatatcattctgagtgaggcaacccaatcataaaacaactcatgtgatatacactcactgataagtggatattaccccagaagcccagaagctcagaatacccaagatacaattcataaactacatgaaactcaagaagaaggaaaaccatagtgtggatatttctatccttcttagaagcatggaacaaagcacccatgaaaggagttacagagacaaagtgtggagtagagactgaagaaatgaccatccactcacctggggatcatctcatatacaatcaccaaacccagacactgttgcagatgccaagaagtgcttcccgagaggagcctgatataactgtctcctgagaggctctgccagtgcctgacaaatacagaagtggatgctcacagccatccgttggactgagcatagggcccccaatgaaggagctagaaaaaggacctaaggaactgaaggggtttgcagccccctaggaggaacaacaatatgaactagccagtacccccagagctccctgggactaaaccaccaaccaaagaggacatatggtggaactcatggccctaggtgcatatgcagcagaggatggtctagtcggaaatcaatgggaggagaaaccctttgtcctatgaaggctctatgccccagtgtaggggaataccagggccaggaatcaggagtgggtggattggtaagcaggaggagggagggagggagggagggagggagggagggaatagggggaggctgttttttggaggggaaaccaggaaaggggataacattttgatatgtaaataaagaaaatatccaacaaaaaaaaaaaaggaaaaaaaaatcttatactcaattagcaggtgaatcaaaagagaatttagttcattatataaagtgctattctaagatcctgggggatttttttgaacaaaatctttatggcattattcagtgttcatcctgacatatcttatttccttttatttttttttaatttcctataagctggtagccttatataaaggtatttgcaagataagaattcagaatggtattgattttatttgatttggatgttcttttaagatctacatttctctactttaaacatatgaaaagcaaaaacactggcacaaactataccagtatatgatcttcggtccagaaggaatgaaatttactagatctagttaccttcctaccttgaggtttcattagttctgaacatacattcatcactcaaaatgcccatccctcttccagtacatggatttaatagtatactctatgctatctctttattctgggctgctagcttctacctatagtatgagtgacatttccttctcctttttaatatatgttattaacagatgatgtcagacaaaagaaatgtcatcctgttttctatatttgatgagaaccaaagctggtacatcacagagaacatgcaacgcttcctccccaatgcagctaaaacacagccccaggaccctgggttccaggcctccaacatcatgcacagtaagtgaagaataacttggattcattgcatatctagtaaagagaaaattgatgcccccaacttatgtctagtaacatctcttatatagagactataataagtatgtaactgtaactacataatatatattttaaaaacccactgactacttttcttttgctaccctgtccctttaatttgtattttatgtcctatattattccttattaccaactactccataccaagataactcgtttcaaaatattttattatataatcatatactataaacatgatatttatcttcctaaagtattagatttatcttctcacagtgttaaaaggtagtttaagctgggcagtggtggcacacgcctttaatcccagcacttgggaggcagagacaggcggatttctgagttcgagaccagcctggtctacagagtgagttccaggacagccaaggctacacagagaaaccctgtctcgaaaacaaacaaacaaacaaaagtttaagatcaatgtgtcagaagatttaatttcttcttcaatctctctttagcttttagatgttgacgtgtccctgtacccttgtatggtcttccctctatacctttctatattgtagtcatctcttattataaagaacttagggtctgcactagtaaccttattttaactaattttctctttaaaacccatctctaaatccagccacatttggaagtattggagtttgaagcatcagcaagaaaacagggggaacccaattcagcatataaaatatgtatgtgttatttatatataaacacagatctgaatagcaaaagcataataaaaatttaatcttaatatcctactagaaaaagactatcagtgattcagataacatggttgtcttagtcagggtttctattcctgcacaaacatcatgaccaagaagcaagttcaggaggaaagggtttattcggcttacatttccatgttgttgttcatcaccaaaggaagtcaggactggaactgaagcaggtcaggaagaaggagctgatgcagaggccatggaggggtgtttcttactggcttgcttctcctggcttgctcaggttgctctcttatagaacccaagaccaccagcccagagatggtcccatctacaaggagccctccacccttgatcactaattgagaaaatgccccacagctgaatcttatggaggaatttccccaactgaagctcctttctctgtgataactcctgtgtcaacttgacacacaaaaccagccagtacaatgacatatttatcaaactggaaaaattataagaccattattactagtaggtttgggtaaaagggcactgttatacagtacaagtaggaaacactatagttcttttgaagattaccttgcttattacattttttaaaagatttatttatttattatatgtaactacactgtagctgtcttcagacactccagaagagggtgccagatcttgttatggatggttgtgagccaccatgtcgttgctgggaattgaactcatgactttcggaagagcagtcagtgctcttaaccactgagccatctctccagccctgcttattacatttttaaatatatgcttttgaagttctggtccttgttgggatgggataagcacacattaccctgttagtttcatataatgtgactaaaattcaaatcatagaaaatcacagaaaaattgcctaagaacagaaccctgaaaagttatattttaggacattctaagatgtgccttctatcagaattctatgccctttgtcttataatattagtcctccacttcaagtcaacctgagcctcacatttaatttggacttctggtaatacttgcctattttaatctagagtcataatactttactctctgttctaaaatttttaatgtttaaattcccttcggttgcatttacatttttcatataaatatgtatataaacatatgtaattcatatgtttcaaagacatagcttattttgccaagaggctgatttgtagtagttaattcagatggcccatatttttttctcctttgttaccttttggtcaggatttcgttgttgattttttttcccacctaacaatattgcactttattatttccttagtgtaatataaactagatatctatgattttattattctatccatcatttctccatttcctaatacagcttgtttcaaatactagaataagcatctctagtatttgaacatacattattttaatagagacattgtttaaaacaaaagagagatcgttacgtggaatctaaaacaaagtgaaacacatgtactagacagggttctttagaataacagaagttacagtatagatagatagatagatagatagatagatattgatatatgtcaatatagatatagataaagtagatttattacaatgacttacaggatgcagttcagctaatccaacaatggctggctgtgaacagaaattccaataatcttgtagtttctcagtcaacaaggttaggatgtttcagctcgtcttcaatatgtggtggaatccagaagaagtaggctttaacaccagtgaagtaatggatgtgttagcaaagcaaggaaaggcaggcaaaaagccaaacctttcttcttccattgtcttatatagttttccagcagaacgtgtggcccagattaaagttatgttttccagccttaagatctgatttaaaggtgtatctttgcccatctcaaaagatctagaccttttggcatgtgtctttctatttcaaagattcagattagaagtggatcttcttacttcagagtaagcaaaaggtcccttacaggtgtgtcctctatttggggattttagttccagatatagttaagttgacaaccaagaatagccatcacaatacataaaaacagagagtaaagtagtggttaccaaagtctgagtagctcgctttcttgttcatgcttacctaattttttatacatcctagaactgcctgcctgaggaatcatgatgcctagagtggaatgggccctcctacattaattaataatcaaaacaattcctcacagacatgtccactgtattaattaggattctctaaaggaatagaacatattaaatgattatatataaagaggatttattagaatggctcgcaggctgtggtccagctagttcaacaatggctgtctatcaagggaaggtccaaggatccagtacctattaagtccataagactggatgtctcagttggtcttaagtatacaccataatcccaaaaaagtgggctctaatgccagtgacagaatggacttgccaagaaggcttcctttttgcatgtcccttatgtagactgtcagcagaagatgtggcccaaattaaaggtagatcttcccattgcaaaagagctagattaaaaagtttatcttcccagctcagaagatctggactaaaactgggtctttctacttaaaataactgctttaagaaaaagtccctcacaggtgtatccagcctcttgagttatagttaagttcagaagtagtcaagttgacaaccaataatagctatcacacccacaaaccaacctgatttaggcaattcctcaattgcggtttctcttggatgactctgtcaggttgacaattaaagctaaagaaaacaattgctcagcagtaaagatggtatacttttctttcagagtacccgagtctgagtcctagcacccatgttgggcaactcagaactgcttgtaattccagctccaatggatctgacatctttaggcaactgcactcatgcacacatctcacgcataccccaattcacatacacgtaatttttaaaaatctttaaaagtggtacattttataatgtattttgtatgtatgtgtctatgagagaaaggaaaaagagaaaaacagagacagagagagatagagagaaaaggagaatttcaaattttctgaggaacctccagactgattcagagtggttgtaccagttttcaatcccaccaccaatggaggagtgttcctctttctccacatcctcgacaacaggtgctgtcacctgaggttttgatcttagccattctgactggtgtgaggtggaatctcaggatcattttgatttgcatttctctgatcactacagactttgaacatttctttaggtgtttctcagccattcaagattcctctgttgtgaattctcggtctagttctataccccattttttgactgggttgtttggtttttttgatggttagcttcttgagttccttatatattttagatattagccctctatcgatgtggggttagtgaagatttttttcccaatctgtagtttgccaatttgtcttattggctatgtcactggccttatataagctttccagtttcatgaggttccacttatcaattcttgatcttagagcatgagccgttggagttctgtttaggaactttccccctgtgccaatcagttcaaggctctttcccactttctcttctattagattcagtgtatcaggttttatgttgaggtccttgatccacttggacttgagctttgtgcaaggtagcaaatacgggttctaatttcattcttctacatatcaacagtcagttagaccatttgttgaagatgctttctttttttccattgtatattttggcttctttgtcaaatatcaagtgtccataagtgtgtggttttatttctggttcttcagttctattccatggatcaacctgtctgtctctgtaccagtaccatgcagttattatcactattgctctgtagagcttgaggtcagggatggtgattcctccagctattcttttattgttaagtactcttttaggtattctgtttttgttttgtgttgtttttctctttctttctttctttctttctttctttctttctttcttcttcttcttttttttttttttttgcattttcagatgaatttaagaattccatgtctttgaagaactatgttgggattttgatggggattacactgaatctatagattgcccttggtagaagggccatttttaccatgttaattctgccagtccatgagcatggaagacctctccattttctgagatctcctttgatttctttcttgagagacttgaagtttttgtcatacagatcttttacttgtttggttagagttaccccaagatattttatattatttgtggctattgttgggggagttatttccctaatttctttctaagcctgtttatcatttgtataaaggaaagctactgatttatttgagttaattttatatgcaactattttgctgaagttgtttatccactgaagaagttctctggtagaatttttggggttgctaatgtatactatcatatcatctgcaaatagtgctacctttatttcttctttggcaatttatatccccttgatctctctttgttgtcttattgttgtagctagcacttcaagtactatattggatacatatggggaaagtgggcatccttgtccccgatttaatgggattgcttcaagtatctctccatttaatttgatattggctgttggtatgctgtatattgctttttaaaaaaggtgatccagagtgggaatccctcaaagctccatttccaccagacacatacaagctgatctgatccatcccagagttccagctctataaatggttgtattggtgaaccctcttatcttagttagggttttactgttgtgaacagacaccatgactaaggcaacccttataaggacaacatttaattggggctagcttacaggttcagaggttcagtccactatgaagacagaaacatggcagcatccaggcagtcatgttgcaggagttgctgaaagttctacatcttcatctcaagatttctagtagaatattggctttcaggcacctagagggtcttaaaagtccatatacccacagtgacacacctattccagcaaagtcacacctactcaaagtcacacctactccaacagggctacaccctctaataatgccacttcctgggctgggcagatacaaactatcatattacattccctggcccccataggcttgttcaaacatatgagtctatgggtggtgtttactcaggtaatgtttaagtcattctcagatttttgatggggttgaagactagttttattctcttaatcaaactcaagttgtgtaacatagagattttattgagtggatgacatggttttcaggtggcaaacacaggctaaaatctaaacataatccggggataaaatcataattcttttttttttttttttttttttttttagattgacatttttttttaattaggtatttagctcatttacatttccaatgctataccaaaagtcccccttacccacccacccccactcccctacccacccactccccccctttggccctggcgttcccctgtactggggcacacaaagtctgcgtgtccaatgggcctctctttccagtgatggccgactaggccatcttttgatacatatgcagctagagtcaagagctcaggggtactggttagttcataatgttgttccacctatagggttgaagatccctttagctccttgggtactttctctagctcctccattgggagccctgtgatccatccattagctgactgtgagcatccacttctgtgtttgctaggccccggcatagtctcacaagagacagctacatctgggtcctttcagtaaaatcttgctagtgtatgcaatggtgtcagcatttggaagctgattatggggtggatccctggatatggcagtctctacatggtccatcctttcatctcagctccatactttgtttctgtaactccttccatgggtgttttgttcccacttctaaggaggggcatagtgtccacacttcagtcttcatttttcttgagtttcatgtgtttaggaaattgtatcttatatcgtgggtatcctaggttttgggctagtatccacttatcagtgagtacatattgtgtgagttcctttgtgattgtgttacctcactcaggatgatgctctccaggtccatccatttggctaggaatttcataaattcattctttttaatagctgagtagtactccattgtgtagatgtaccacattttctgtatccattcctctgttgaggggcatctgggttctttccagtttctggctattataaataaggctgttatgaacatagtggagcatgtgtccttcttaccagttggggcttcttctggatatatgcccaggagaggtattgctggatcctccggtagtactatgtccaattttctgaggaaccgccagactgatttccagagtggttgtacaagcctgcaatcccaccaacaatggaggagtgttcctctttctccacatcctcgccagcatctgctgtcacctgaatttttgatcttagccattctcactggtgtgaggtggaatctcagggttgttttgatttgcatttccctgatgattaaggatgttgaacattttttcaggtgcttctctgccattcggtattcctcaggtgagaattctttgttcagttctgagccccattttttaagggggttatttgattttctgaggtccaccttcttgagttctttatatatgttggatattagtcccctatctgatttaggataggtaaagatcctttcccagtctgttggtggtctttttgtcttatagacagtgtcttttgccttgcagaaactttggagtttcattaggtcccatttgtcaattctcgatcttacagcacaagccattgctgttctgttcaggaatttttcccctgtgcccatatcttcaaggcttttccccactttctcctctataagtttcagtgtctctggttttatgtgaagttccttgatccacttagatttgaccttagtacaaggagataagtatggatcgattcgcattcttctacatgataacaaccagttgtgccagcaccaattgttgaaaatgctgtctttcttccactggatggttttggctcccttgtcgaagatcaagtgaccataggtgtgtgggttcatttctgggtcttcaattctattccattggtccacttgtctgtctctataccagtaccatgcagtttttatcacaattgctctgtagtaaagctttaggtcaggcatggtgattccaccagaggttcttttatccttgagaagagtttttgctatcctcggttttttgttattccagatgaatttgcaaattgctccttctaattcgttgaagaattgagttggaattttaatggggattgcattgaatctgtagattgcttttggcaagatagccatttttacaatgttggtcctgccaatccatgagcatgggagatctttccatcttctgagatcttctttaatttctttcttcagggacttgaagtttttatcatacagatctttcacttccttcgttagagtcacgccgagatattttatattatttgtggctattgagaagggtgttgtttccctaatttctttctcagcctgtttattctttgtatacagaaaggccattgacttgtttgagtttattttatatccagctacttcaccgaagctgtttatcaggtttaggagttctctgttggaatttttagggtcacttatatatactatcatatcatctgcaaaaagtgatattttgacttcctcttttccaatttgtatccccttgatctccttttgttgtcgaattgctctggctaatacttcaagtactatgttgaaaaggtagggagaaagtgggcagccttgtctagtccctgattttagtgggattgcttccagcttctctccatttactttgatgttggctactggtttgctgtagattgcttttatcatgtttaggtattggccttgaattcctgatctttccagaacttttatcatgaatgggtgttggatcttgtcaaatgctttttctgcatctaacgagatgatcatgtggtttttgtctttgagtttgtttatataatggattacattgatggattttcgtatattaaaccatccctgcatccctggaataaaacctacttcgtcaggatggatgattgctttaatgtgttcttggattcggttagcgagaattttattaagaatttttgcatcgatgttcataagagaaattggtctgaagttctctatctttgttggatctttctgtggtttaggtatcagagtaatagtggcttcataaaatgagttgggtagaataccttctacttctatcttgtgaaaaagtttgtgcagaactggagttagatcttctttgaaggtctgatagaactctgcactaaacccgtctggtcctgggctttttttggctgggagactattaataactgcttctatttctttaggggatatgggactgtttagaaggtcaacttgatcctgattcaactttggtacctggtatctgtccagaaatttgtccatttcgtccaggttttccagttttgttgagtatagccttttgtagaaggatctgatggtgttttggatttcttcaggatctgttgttatgtctcccttttcatttctgattttgttaattaggattttgtccctgtgccctttagtgagtctagctaagggtttatctatcttgttgattttctcaaagaaccaactcctcgtttggttaattctttgaatagttcttcttgtttccacttggttgatttcacccctgagtttgattatttcctgccgtctactcctcttgggtgaatttgcttcctttttttctagagcttttagatgtgttgtcaagctgctagtatgtgctctctcccgttttttcttgaaggcactcatagctatgagtttccctcttagaaatgctttcattgtgtcccaaaggtttgggtacgttgtggcttcattttcattaaactctaaaaagtctttaatttctttctttattccttccttgaccaaggtatcattgagaagagtgttgttcagtttccatgtgaatgttggctttctgttatttattttgttattgaagatcagccttagtgcatggtgatctgataggatacatgggacaatttcaatatttttgaatctgttgaggcctgatttgtgacctattatgtggtcaattttggagaaggtaccatgaggtgctgagaagaaggtatatccttttgttttaggataaaatgttctgtagatatctgtcagatccatttgtttcatcacttctgttagtttcagtgtgtccctgtttagtttctgtttccatgatctgtccattggtgaaagtggtgtgttgaagtctcccactattattgtgtgaggcgcaatgtgtgctttgagctttactaaagtttctttagtgaatgtggctgctcttgtatttggagcatagatattcagaattgagagttcctcttggaggattttacctttgatgagaatgaagtgtccctccttgtcttttttgatgactttgggttggaagtcaatcttatcagatattaggatggctactcctgcttgtttcttcataccatttgcttggaaaattgttttccagcctttcattctgaggtagtgtctatctttttctctgagatgagtttcctgtaagcagcaaaatgttgggtcttgtttgtgtagccagtttgttagtctatgtctttttattggcgagttgagaccattgatgttaagagatattaaggaaaagtaattgttgcttcctgttattttagttgttaaaggtggcattctgttcttgtggctgtcttcttttaggtttgttgagggattaccttcttgttttttctagggcgttgttcccgttcttgtattggtttttttctgttattatcctttgaagggctggattcgtggagagataatgcgtgaatttggttttgtcgtggaatactttggtttctccctctatgataattgagagtttggctgggtatagtagcctgggctgcagtttgtgttctcttagtgtctgtataacatctgtccaggctcttctggctttcatagtctctggtgaaaaatctggtgtaattctgataggcttgcctttatatgttacttgacctttttcccttactgcttttagtattctatctttatttagtgcatttgatgttctgattattatgtgtcgggaggaatttcttttctggtccagtctatttggagttctgtaggcttcttgtatgttcatatgcatctcattctttagatttgggaagttttcttcaataattttgttgaagatgtttgctggacctttgagttgaaaatcttcattctcatccactcctattatccgtacgtttggtcttcttattgtgtcctggatttcctggatattttgagttaggatctttttgcattttccattttctttgattgttgtgccgatgttctctatggaatcttctgcacctgagattctctcttccatctcttgtattctgttgctgatgctcaaatctatggttccagatttctttcctagggtttctatctctagtgttgcctcgctttgagttttctttattgtgtctacttccctttttaggtctagtatggttttgttcatttccatcacctgtttgtatgttttttcctctttttctgtaaggacttctacctgtttgattgtgttttcctgtttttctttaaggacttgtaactctttagcagtgttctcctgtatttctttaagtgatttattaaagtccttcttgatgtcctctaccatcatcatgagatatgcttttaaatctaggtctaggttctcaggtgtgttggggttccctggactgggcgaagtgggtgtgctgggttctggtgatggtgagtggtcttggttcctgttagtaagattcctccgtttacctttcgccatctggtaatctctggagttagtagttatagttgactctgtttagagattgttcttctggtgattctgttaccgtctatcagcagacctgggagacagattctctcctctgagtttcagtgctcagagcactctctgctggcaagctctcttacagggaaggtgcgcagatatcttgtatttggacctcctcctggccgaagaagaaggcccaaaacaggacctttctcagacagtgtgttgctttggcagttcccaggtggtacagactctcacctaagcagactaaattcctaagttccttggagtcccgggaccaagatggcgaccgctgctgctgtggcttaggccgcctccccagccgggtgggcacctgtcctccggtccggaaggtggccggctgtccccggcccacacagggtgctgcctcagcgcctctgtgcttctgcctgttccagaagctgtcaggttctctggcgcaccctctcacctgttcagactaatttcctaagttcggtgggtctcggaccaagatggcgaccactgctgctgtggcttaggccgcctccccagccgggcgggcacctgtcctccggtccggacggtggctggctgtccccggcccacaaagggtgctgcctcagcgcctctgtgcttccgcctgttccagaagctgtcaggttctctggcgcaccctctcacctgttcagactaatttcctaagttcggcgggtcccggaccaagatggcgaccgctgctgctgtggcttaggtcgcctccccagccgggcgggcacctgtcctccggtccggaaggtggccgcctgtccccggcccacacagggtgctgcctcagcccctctgtgcttctgcctgttccagaggctgtcaggttctctggcgcaccctctcacctgttcagactaatttcctaagttcggcgggtcccggaccaagatggcgaccgctgctgctgtggcttaggccgcctccccagccgggcgggcacctgtcctccggtccggacggtggctggctgtccccggcccacaaagggtgctgcctcagtgcctctgtgcttccgcctgttccagaagctgtcaggttctctggcgcaccctctcacctgttcagactaatttcctaagttcggcgggtcccggaccaagatggcgaccgctgctgctgtggcttaggccgcctccccagctgggtgggcacctgtcctccggtcctgaaggtggccggctgtccccggcccacacagggtgctgcctcagcgcctctgtgcttctgcctgttccagaagctgtcaggttctctggcgcaccctctcacctgttcagactaatttcctaagttcggcgggtctcggaccaagatggcgaccgctgctgctgtggcttaggccgcctccccagccgggcgggcacctgtcctccggtccggacggtggctggctgtccccggcccacaaagggtgctgcctcagcgcctctgtgcttccgcctgttccagaagctgtcaggttctctggcgcaccctctcacctgttcagactaatttcctaagttcggccaaaatcataattctttcagttaggaaatatggtagagcactttgtctaattcacaaattgattggctggatgtcagttgtacctcatggtttgtaatgtacttaattgttatggttttgttcaatttatatctgggagaagaggttgttttttgtttttgttgttttttgattgattgattgtttgtttgttttactggacagaaaaggtgaggtgtagagggaggtgctgatactactaaggtctggttcttgagttgttaataaagaggccaagagccaatttctggacagaatggacaggtggaacttccaggtcccaggaggaaaaggcagatacagggaaagagaggaggcttttcttccatgctttggaactaatatctttcttggcctgtttgtcacttggatactgatttatttgagttaattttatatctggccactttactgaagttgcttatcagctggagaagatctctggtagtgtttttgagggttgcttatgtatactatcatatcatctgcaaatagtgatacctttatttcttctctgccaatttgtatccccttgatttctttctgtagttttacttgttctagctaatacttcgagtactatattggatagatatggggagagtgggcatctttgtcttgtccctgattttagtggaattgcttcaagtaagtcttcatttaagttgacattgcctgttggtttgcagtaaattactttattatgtttaggtatgggccttgaattcctaatctctacaatacttttaacatgaagggatgttgtattttgtcaaatgccaggagcctcctgtcctggggtagggtagaagtgaagtcacagagtcggactctggtgatggctttaaaataaagccagggcattctagctctctaattgtactgaaatgctgatgataatttctaaaaagtcctaacaattttcttgctctttctgagggtaagagactgcaggagtaggtgattaacacctgtagcctagcagaggaggattaagcaatacaacctgtgttctatctcagcaggaaatgctgggctctaactttcaacctgcttgtcatgtcacaggaagagtagacatttagagaagtgattatagagtttattactaagttgtgaaaagtttcctattaaacatttctaagggggaaagttgaaagatcctaagcagggaaagggaaaaattatgtatgtagagaaaaggaaaaacgtcttgtctaagtggggaaaaggcaaaaaagtctcatctataaatcccactcatctttgtcctcagtacttatacatctttcaaaatacatgatcccatgttacaaagttcatcacaagtccacacacacaaaaaacaaatcataaattgaaatagaagtttacaacagtgaatgtttacattcatatccattaggagtaatcacctagctaaacatccatcacttgtctcttcaggttcactgaaggtttaaaaccataactaagtcattagtgaagttttgtatagataaacccagtagatattttatcttctgtcctagcaactataataaatagttagttccaatttatttatttatttatttatttatttatttaggttaattgttttacaaccttttggaatgtgctctgagtagaagaaaggctggttaccatctaagagcaattaactggtgacactttggagactggcagagttctcattgcagctttgattatcagaaaaggatctaatagcagtcccattataaaggagcttaataatcacagatataggaattcttataggatcatcattaagacttatctatttgtctacatagcatcactacaagatagtacatctttgtggatctgcagatacctgctccaaaggtgtgtgctattacttactgattcttatacatgtttaataataacaagaaaagcatattaatagcaggaatctttcctaaaatgagtgcctttcagcaatgcttaatgagggcacacctgttgcaaattacataataacctaaagcaggccacttcaggatgatcacctgctagttattggcttgtcccattatggctcctgagagtaaaatgctttttctgcatctaagaggatgatcatgtgggtttttttttttttgagtttgtttatataatggactacattgatgaaggatttttgtatattgaactagccttacatccctgggatgaagcttacttaatcatggtgaatgatcgttctgatgtgttcttggtttgcaagaattttattgagtatttctgcatcaatattcataagcgagattggtctgaagtcctctttttaggttggatccttgtgtgatttaggtatcagagtaattgtggcttcatagaacgagttaggtagtattcctcctgtttctattttatggaatagtttgaggaaaattggtatcaggttttctttgaaggtctgctggaattctgcactaaatccatctggccctgggctttttttggttgggaggtttttaatgacttctatttctttgtgtgatatgggcctttttagatagtttacctgatcttgatttaagtttggtatgtggtatctgtctagaaaaccatccatttcatcaagactttccagttttgttgagtatagacttttatagtaggatctgatgatttttttgaatttcctccctttctgtttttatgtttcccttttcatttctgattttattaatttggatactgcctcttggccctttaattggtttggctaaggctttatctattttgttgattttctcaaagagccatcttttggttttgttgattctttgtattgatttctttgtttctatttggttgctttctgccttgagtttgactatttcctacctctactcctcttgggtggtttgcttcgttttgttatagagctctcaggtattgggttatgttgctagtgtaagatctctcaagtttctttaccagggcacttagtgctatgaattttcctcttagcactgctttcattgtgtcctataggtttgaatatgatgcgtcaacattttcattaaattccaggaagtctttaattttttctttcttcccctgaccaagttatcattgagtagagaattgttaagtttccatgggtatttgagttatctgttgtttttgttctcattgaagaccagccttagtccatggtgatctgataggatgcatggaattatttcagtcttcttgtgtctgttgagacctgttttgtgcccaattacatggttgattttgtagaaggtaccatgaggtgctgagaagaaggtgtattcttttgttttagggtgaaatgttctgtagatatctgttaaatccatttggttcataacctctattagtttcactgtgtctctgtttagtttctgtttcaatgacctgtccattggtgaaagtggagtgttgaagtttcccactattattgtgtggggttagatgtgtgttttgagctttagtaaagtttctttcatgaatgtgggttctcttgcatttggggcatagatgttcagaattgagactttctcttggtggattttccctttgatgtgtatgaagtgtccttcctcataacgcttcataaccttaggttgaaagtctattttattgtatattaggatgtcaactccagcttgtgtcttggaaccatttgcttggaaccattttccatccttttactttgagatagtgtctgtctttgttattgagatgtgtttcttgtatgcagcaaaatgctggatcttgtttgtgtatccagtctgttagcttatgtctttttgtaggtgagttgagtccattaatattgagagatattaaagagagatgactgttgcttcctgatatgtttgtttttatagatggctttatgtgccggtggttctctcctcttggttttgttgtgagatgctcaatttctttctttggtgcaggtacctaccttttgttggagtttttcttctaggatcctctgtagggctggattggtagatagacagatactgtttgaatttggttttgttctggaaaaccaaattttggtttctccatctatgttgattgagagttttgctgagtataatatcctgggatggcatttgtgttttcttagagtctgcatggcctctgatcaggctcttctggctttcataatctctgttgagaagtctggtgtaattctgataggtctacctatttatgttacttgacccttttcccttggagcttttaatacttattctttgttctgtgcatttagtgttttgattattatgtgatgagaggattttcttttctggtcccatttatttggtgttctataggcttcttgtacctttatggccatctattcctgtaggttggattatcttcatttccttccaatacagtttttcttatatttggttttttcattgtgtcctgaatttcctggatggtttgggttaggaagttgttatgttttgaagtttcattgacagttgtgtcaatctcttctattgcaaggcatgggggaaagaggggagtgggagagaacccctgtcccgccagtgttctggtgctctgggcagacaaacgtgggaggactgtgcatgctttccatgcggctcctggtgggtatctggctgtgggaagccactgaccccacatggtgggtggtggataagaggtagccccaagtaccaggttttcagcctctggcatcccgtgcaggatactgtggaggagctaagaacagaataggggctctggggtagtacttggccctggtaatgaagggaggagagagcagggagatgggggtgctggatggttcctatggtgggagagtccttggtcaggtctgtggcttgagcacaggatagccttctggtgagaggttagaagaggcttcttaggagaaagccaatcccatcgttaggcagcctattttggttgaatggggctttctccggttacccaataaagaaatctacaagggacggaaaggcaagccatgttcccaaaatcaggtgcctgtcacagtcccacattctatggcatcttctatacctgatattttctcttctatctcttgtattctgttggtgatatttacctctgtaactcctgacccctttccttggttttccatttccagatttccctccatttttgttttctttattgttcctacttccacttttaggccttgaactgctttattcatttccttcacctgtttgattgtgttttcctacatttctttaatggacttttttgtttcctccctaagggcttctacctatttatctgtgtttttctgtacttatttcagtgacttatttatatcctccttaaaggactctagtatcttcatgagataagattttaggtcagcttcctgttttcagatgtgttggtgtattcagggcttgctgtggtgggagaactgggttctgatgatgctcatgtatattggcttttgttggttatggtcttgaacttgcctcttaccatctggttatctctggtgtttgctggtttgggtgactctgtctggtatctgcctccttttttgcctgggttgcttcaggtctcctggtaggcctgtgaccctggctgttgcagaccacctgtggggctttccaactaggggctcttcataggggcagagaagctgcattagatctcctaggaggccttcagatggttggatcttcagaagagcagtcaagctgttgtcctgtgtgaagatgttccaccagggggcggggcagcctgtgatttctgtttcactgtgtgcagaactccaggaaagctttcagtctgttgagttagttgtcctgcatgccacagagcctgctagacatcttcagactgtggtatctattgccctgtatacaaaggagctcctgcaatgccttcaagctgtgttgtctttagaggagcaagcaagctgctgatcagttgatcagttgccctgtgtgtagcagatctcctgggatgccagttgccctgtgtggaacaggtctcctgggatgtctcaggctgtggtgtcagtaaccctaagtgcagtggatctcctgggatggcagaaggggagtggtattcagctagcaggggttggggttgggggtgatgggtcctgagtctactgggctcccagtggcaactgtgggacttcgggaggattcttagcaactactctgagtgcagcggatattctgggatggctcaggatttggtgtcttcagggaagaagactagctagcagtctgccccaacagaaaggaccaagcgtaaaggacccaaatctcttcttacatgatgctatatgactctcctcactttaggattggagttgggtgattaaatattaatcaactacctgattggtaactgttctcagtggtgaggtaatagacatagtatatattaatttctaattgtatcctaacaatcatatccaaaatgacaaatccaggttacaacaaaattataccacttattctcaattgcttttgtaggcatcaatggctatgtttttgatagcttggagttgacagtttgtttgcatgaggtggcatactggcacattctcagtgttggagcacagacagacttcttatctatcttcttctctggatatactttcaaacacaaaatggtctatgaagatacacttaccctgttcccattctcaggagaaactgtctttatgtcgatggaaaacccaggttagttatttatattatcctttcactaacaactgtgattgtttcattgttcttttgcctgatccgtcaaatttaagcagacagtaaatatatcaagtgactttgatatgtggctttggtaattgtaaactattttaatgaagaactaagggcttagaacttggttgtggtacagacaataaagacataaacacataagcataagatatttcttctaagttttattagtatgtttttaaataatgctgtcatctgtacctttgcatataatccttatgtataatatgctttcaaatgtatatatttcatttattcttttaagatatttattaaggatcttatatatgccagacactgtagaaaatggtaatataaaaataacagcaccaactcaatattgtggttcagtactacagtgcttgcctagcacacataaattcctggattcaattctctacattgaaaaacaaataaaagcctcaaactagcctttactgtagaaacaatcaaacaaaacccttatttaacataagtcaaattttaagtctttttgttaaatggtactagtggatctattttaccaataagttctaaaccttgacttagattttttcatcaccaaccatgaagttggttactttgctactgaaatactgttttcttctgtcttccgagaaacaatctttggttctgttcatttactgacaccatttttgctggcttcccttaatctggacaccatcaagcattgtttcattctgatttaagtagtttggatagtatgttcagagagacaaacagagatagagagacagacaggcaaatagacaaagatggacatacaaacttgtacatatgtgcacacagaaggccttagtttattttgtgtgattatgtcttacctcattatataatttggtgtgacattaattatgagaaatacttgtcaagctctttaagtactctatctgattctctctatctccctctatagttatatatatgtatatatatatatgtaaatatataattgtatatgtatatatcataaaagaatatatgtatatgtatatgtatatgtatatgtatatgtatatgtatatgtatatgtatatatagtttttcttagttaggattttactgctgtgaagagaccccaatgaccaaagcaactcttataaatgacaacatttaattggggctggtttacaggttcagaggttcagtccattatcatcaaggtagtaagcatggcagtttccaggcaggcatgctgcaggaggagctgagagttctatcttgatctgaagacaaagaggagaggactgtcttccaggcagctaggaggagggtgtaaaagcccaagtatacagtgacacacttcttccaacaaatccacacctactttagcaaggccatacctcctaatagtgtcactccctgggccaagcatatttaaatcatgatttgtttttttacttgttttattgattactattgtcccttctagttttccagtttggttaacttcgaaaatttcacatttcatataattctctctctctctctctctctctctctctctctctctctctctcctctggtttagaaagctcatttcaggccatagttataaaaccactcttggaagaatccttttagtcaaagaaaaagtcttccatgtctgggaaggtgatccttctgagttccaccttgttttctgagacagagtctctcattgaaccttgaattcatttggtcaatgaactctagagaactgcttgtctctatattccaactctatgatattatagacatgtacttttttatattaatttagaatactaatccagaaatactttggttaaatgtggggtgtgttaatgctttcctgcaatccagtattcagaaggcagatttctgaatttgaggccagcttagtctacagactagccagtggttaaaaaaggccagtctcaaaatgagcaagaactggggggaaaggaagagacttttgtacttagttaaataacattgcctgaacttttgtaatacagctttcttcattgcaaatgtgactaaatataaatgtaaaacattataattagctcttatatcttaatccagtagcataaagaatagatactttggcctggtagtggtggtgaatgcctttaatcatagcatgtgagaggcagaagcaggcagatctctatgaattacagactaacctggtctacagagtgagttccaggagaaactgtggtggtttgaatatgctttgcctggggagtggcactattaggaggtatggcctttttggattaggtatggctttgttggagaaattgtgtcactgtgcacttgggcttttacaccctcctcatagctgcctggaagactgtcctctcctctgtcttcagatgaagatgtagaactctcagctcctcctgcagcatgcctgcatgaagactgccatgcgtactgccttgctgataatggactgaacctctgaacctgtaaactagccccagttaaatgttgttctttatatgaattgccttcgtcatggtgtgtcttcatagcaatggataccctaaccaaaacagaatttgataccagggtttgcaatattgcagtgatagatctgaccatgtttttatttgaagaaatgtggatttggacttcagatttggagagtaatgaaatgctttcagtgggacttaatgggccatcctaataggaatatggaagatagtggtgttgaggatgatttgatctatgcagtcctagatctagatgcttcagaaaagaaaacttttagtatgtgacttagagactcttcttgtgatattttggtgaatattgtagctgctttttgcccttgtctgaagagtctgtctgaagctaaggtgaagagattcaccagattaattgcattgacaaaatgtaaaagtcaaccaagtttaaactctgtgctgtggtttactctcatgaatagcattttgatcatgtgtagcaaacttagaaaagaaaaatacaaaatgtatggttcaagtaattagaagccttagagctgaatcctgtgttcaaggagatgaacagattaagggactggtgactttggggcaaaatcccacccagctaagattattgtttgtgtttgccatttaacaaggaatagttatatcatgttagacattattactagttggttattattttcatgtgtacttttaatatggaatgaactacatccagagatggaggacacagacttttgatccagatcttgaggaatagtggatatgaaaagcttagtccaggcatggtagtttacacctttatgagagagacagagagagagagagggagagagagagagagagagagagagagagagagagagagagagagagagagagcagatctctgagttcaaggttacaggacagccaggcttagtccatgaaggaattggaaaggtgttgacaatgtaataataaaacaaggggaggggccatgttccagccccagcaagaagcagaattcagcagcttcagccatgtggctctggccttagagtcaaaaataaaagggactactgtgacaattggtgatggttagctggagcttagacattagcagtgattaagaagagaccaggatcattgaggtgacatcttctgggaagtgttttatgagagaacaaagaagctgagttctagagatagccaaagttgtacctcccgctacagctgtacaaggtaatgggaaagagtcacccaggtggaactggttttgaaggcacaattgggtcatggagagcagctgaggcttggcatggtgagaggccatggaaggccatgagcaaagttgcagccttaattgcagttgatggcctaggactgaaggtgtcatgcaaagaatttgaaacctgtcactatgaagagaacctaaaagactattggtgaggcccaggtgcagcagaataccccagcatattggagatgttggtaccatgggatgaccaccaaaattagcagcaacaatcaaccagactctggaagtgctacagagggcagagctggagaagtgacccaagccttttggaggagactggaagatcatgtgtggatcctagacattggaacaagaaactgtaaagttgaagatgccttagagacccagatatttgaaatgccagagccataggatacctgctgaggaaatttgctaacaggtattggaaccatcccaagggaaagtgttgtgttgcagtcaacaaagatgaaaggaattggacattagacatggaggtacagggtttggagtttgcccagctggtttttggtcttgctttggtctagtatttccacagtatggtattttctaatggtagtgtatgtcctatgatgttggacgcatgtgacctaccttttgattttgattgtacagaagattacagttaagtgattgcatgaatctcagaagaggatttgaactttgtactcttaaacattgatggtactgtggtagactataggtacttttgaagttggactaaatgtatttttacattatgctacggctaggtatagagtcatgtgtttgaagaaggttatgcaggcctatactttattttttttcaaacccctatttttaatgatggttcttaaatactttatcctcccttttagcccaccacccactagaggtagtgacagagaaaggatacaggagaagtggacttgtttagaaaggctctttggagtaactcccacctgtattgtctagaaatcagaatttcagtttatgggttagcagcggcagctcaatccactcgcaaacaccatcagtgtagttcattagagtcaggataccaaacaggaatcagcagccatggcacaacctagcagagacagccaggcctcagccgctgcacaagtaagcaggagcaacttggaggaacactagaagttctcagctatacttctctgagggaagatcagtgaagataactgaacatcagcaaagatcagcgaaggcacaagacccacaagagttgcacagctagctctgtaagcaagactagctcagcctctgtcactgtctggtgagtcctatttataccctccaaacatcagcatcctccatgtgtcttacctcaacatgcatcttgcctctctatatgtgcatctgtctcagctgacatcactctggcaatcagcctgagtccataggagctgcaagaaactgcagcacaccaccagaaatttttcatctatttctctctatggcattccaacaaatggagttcacctatgcaatgtaagatggaccaatacatgtgtgttgttagcaaagaatccttcatcatgtgtccttttacgatcttgctttagcagaacatgtttcctcctgtgtctgcttcagtgaaacgttccttcacgagtctgcctgtgtccactttaggaaaacactccttcatgtgtttgccccagcaaaacaccttctaacacaactgactttcaaaagaacccttaagtttccacttcaggggccaggaagtagaaggtgatggtgttaatatgcttgaactaggagtggcattattaggaggtatggccttggagtaggtttggccatatgggaggaagtgtgtcactgtgggggtgggctttgagaccctcctcctagctgcctgggaaacagtcttttcctgtttgccttttgatcaagctttagatctctcagctcgtctagcaccatgcctgcctggacacaaccatgcttcctgctaagatgataatggactaaacctctgaacctgtaagctacccctaattaaatgttgtcctttttaagagttgccttggtcatagtgtctcttcacagcaatggaaaccccaagacagaatccctgtctcaaaaacaaacaaaacaacaacaaagaacaaagcaatcaaacaaaaatgagatacttttgaccagggagatagattaactagtaaagtacttgtcacatagatcaccagatgaaacccatggaaaaagccaggcatagtagtatatgtcaataattctagagctcctacagaaaggtggaaatccaagacagaagaatcttcagaagttgtagaccatctatcctggcatatgaaaaggcaaacagaaagaccctgtttcaaacaaggtatgaggcaaggcattgatatccaatattgttctctgaccaaaaaacatacagaatggcatgcacacgaacccacaacatacagtgtaagcataatgttattatagtctgaatgttcctaactagacttatgcttaattatcagtttggtacttttctccacctcaggattaaaaccttgttcatggtttctgtaacttgttcactattttattggtaaaagttctataccccttctttgagaatatccacattagaagtaaatatatgcatgttacatcattggacattctaaatgttttattatgttcattactttatcatgagtatgtgtcttagatagggttttactgctgtgagcagacaccatgaccaaggcaagtcttataaaaacaacatttaattggggctggcttacaggttcagtcagaagttctgtccattatcatcaaggtgagagcatggcaggcatggtgcaggaggagctgagagttcttttttttttcaatttttatttttttattaggtattttcctcgtttacattttcaatgctatcccaaaggtcccccatacccacccccccaatcccctacccacccactccccctttttggccctggtgttcccctgtactggggcatataaagtttgcaagtccaatgggcctctctttgcagtgatggccgactaggccatcttttgatacatatgcagctagagacaagagctcccgggtactggttagttcatattgttgttccacctatagggttgcagttccctatagctccttgggaaatttctctagctcctccattaggggccctgtgacccatccaatagctgactgtgatcatccacttctgtgtttgctaggccccggcatagtctcacaagagacagctatatctgggacctttcagcgaaatcttgctagtgtatgcaatggagctgagagttctatgtcttcatccaaaggatgctagtggaagactgacttccaggcaactagggtgaggatcttatacccacacccacagtgacacacccattccaaccaggtcacacctattccaacaaggccacaccttcaaatgatgccactccctggtccaaggatatacaaaccatcacagtatgtatatgtgtcagcaaatatgctatagcacaagtgtagaggttaaaggacaactgcaagactcatttctttccttctactaaatggattctaaggattgcattgaggtcattaggcaaatcgagctctcttcagtgttcctcaatcttcctttcttgtgatcagcaacatgcatagcacagtagcaacaatgtaataatgacttttacctaacattggtgaatatatgttgaagtttaacaaaataacctacaacataacaggcttgactaacttttcttcatttgtctagaagtagaagagaacttccaatacaaaacttacttagaacctgggttatgagtaaccagagttttattctttctcattttcaggtctatgggtcttggggtgtcataattcagactttcggaagagaggtatgacagcattgctgaaagtttctagttgtgacaagagcactagtgattattatgaagaaatatatgaagatattccaacacagttggtgaatgagaacaatgtcattgatcccagaagcttcttccagaatacaaatcatcctaatactaggaaaaagaaattcaaagattccacaattccaaaaaatgatatggagaagattgagcctcagtttgaagagatagcagagatgcttaaagtacagagtgtctcagttagtgacatgttgatgctcttgggacagagtcatcctactccacatggcttatttttatcagatggccaagaagccatctatgaggctattcatgatgatcattcaccaaatgcaatagacagcaatgaaggcccatctaaagtgacccaactcaggccagaatcccatcacagtgagaaaatagtatttactcctcagcccggcctccagttaagatccaataaaagtttggagacaactatagaagtaaagtggaagaaacttggtttgcaagtttctagtttgccaagtaatctaatgactacaacaattctgtcagacaatttgaaagcaacttttgaaaagacagattcttcaggatttccagatatgccagttcactctagtagtaaattaagtactactgcatttggtaagaaagcatattcccttgttgggtctcatgtacctttaaacgtgagtgaagaaaatagtgattccaacatattggattcaactttaatgtatagtcaagaaagtttaccaagagataatatattatcaatggagaatgatagattactcagagagaagaggtttcatggaattgctttattgaccaaagataatactttattcaaagacaatgtctccttaatgaaaacaaacaaaacatataatcattcaacaactaatgaaaaactacacactgagagcccaacatcaattgagaatagtacaacagacttgcaagatgccatattaaaggtcaatagtgagattcaagaagtaacagctttgattcatgatggaacacttttaggcaaaaattctacatatttgagactaaaccatatgctaaatagaactacctcaacaaaaaataaagacatatttcatagaaaagatgaagatcctattccacaagatgaagagaatacaatcatgccattttccaagatgttgttcttgtcagaatcttcaaattggtttaaaaagaccaatggaaataattccttgaactctgagcaagaacatagtccaaagcaattagtatatttaatgtttaaaaaatatgtaaaaaatcaaagtttcttgtcagagaaaaataaagtcacagtagaacaggatggatttacaaagaacataggacttaaagacatggcttttccacataatatgagcatatttcttaccactttgtctaacgtacatgaaaatggtaggcacaatcaagaaaaaaatattcaggaagagatagagaaggaagcactaattgaagagaaagtagttttgccccaggtgcacgaagcaactggctctaagaatttcttgaaagacatattgatactaggcactaggcaaaatataagtttatatgaagtacatgtaccagtacttcaaaacatcacatcaataaacaattcaacaaatacagtacagattcacatggagcatttctttaaaagaaggaaggacaaggaaacaaattcagaaggcttggtaaataaaaccagagaaatggtaaaaaactatccaagccagaagaatattactactcaacgtagtaaacgggctttgggacaattcagactgtcaactcaatggcttaaaaccataaactgttcaacacagtgtatcattaaacagatagaccacagcaaggaaatgaaaaagttcattactaaatcttccttatcagattcttctgtgattaaaagcaccactcagacaaatagttctgactcacacattgtaaaaacatcagcatttccaccaatagatctcaaaaggagtccattccaaaacaaattttctcatgttcaagcatcatcctacatttatgactttaagacaaaaagttcaagaattcaagaaagcaataatttcttaaaagaaaccaaaataaataacccttctttagccattctaccatggaatatgttcatagatcaaggaaaatttacctccccagggaaaagtaacacaaactcagtcacatataagaaacgtgagaacattattttcttgaaaccaactttgcctgaagaatctggcaaaattgaattgcttcctcaagtttccattcaagaggaagaaattttacctacagaaactagccatggatctcctggacacttgaatctcatgaaagaggtctttcttcagaaaatacaggggcctactaaatggaataaagcaaagaggcatggagaaagtataaaaggtaaaacagagagctctaaaaatactcgctcaaaactgctaaatcatcatgcttgggattatcattatgctgcacagataccaaaagatatgtggaaatccaaagagaagtcaccagaaattatatccattaagcaagaggacaccattttgtctctgaggcctcatggaaacagtcattcaataggggcaaatgagaaacaaaattggcctcaaagagaaaccacttgggtaaagcaaggccaaactcaaaggacatgctctcaaatcccaccagtgttgaaacgacatcaaagggaacttagtgcttttcaatcagaacaagaagcaactgactatgatgatgccatcaccattgaaacaatcgaggattttgacatttacagtgaggacataaagcaaggtccccgcagctttcaacagaaaacaaggcactattttattgcagctgtggaacgactctgggactatgggatgagtacatctcatgttctacgaaataggtttgtattattagttattatccttttttattaaatttattccctttacaacccaatatcagcctttcctatgctcccagtaccccttcacaaaacttgtcccccatgtcctcctcccctctcttttgagaaggtgaagccctcctctgggtgtcaaacccccatctgccccaacccccattttccccaccccaccccccactttcacacatcaggtcactgtgagactaggcatatcctctcctactaaggccagacaaggctgtccttttaggcacacaggaaacacaggcaggtgggcaggctggcaggcaacagactcaggaacaggccctgccccagcagtctgggggacccacatgaagaccaaacttctcatcagctacatatgtgcagaaggcctaggtccagcctgtggtcactcactggttggtgattcagtctctggaagctcccaaaggtccaggtaagttgactctatcagtcttcctgtggagtccttgttcttttcaggtccctcagtctttctcctaaattcataagactccttgagctccatctaatatttgggtgtgagtctttgcatctgtttgcattgactgttgggtggagcctctcagaggacagttaagctttgttcctgtcggcaagcataatggaatatcaatagtgtcagagattggtttttgcccatgtatgtgtttcaatttgggccagtcattggttgaccattccctaagtctctactctttgtcccttcacatcttttaggcaggacacattttgggttgaaggttttgtgggtgggctgctgcctttatccttccactgggagtcccacctggctataggaagtgaccacttaaggactcatagcctccgctgctaggactctcagctagtcacccccttagattctctgaggtctctccccatcctaggtctctgacacatcctagaagttgccccctctcaccaatctcccttctctttcccctgctcttcctacgtatgatctccttatatccatctccaatatctattttatttccccttctaagaaggaatcaaacatcctccattgtgctctcctagacttctttgggtctgtgctttatggctaatatccacttatgagtgaatacatgctatgcatgtccttttgagtataggttacctcactcaggatgatattttctaattcgatccatttgcctgcaaaattcactatgtcctcatttttaatagctgaatagtattccactgtgtaaattaaccacattttctgtatccattcttcagttgagggacatttggtttgtttccagtttctgactattacaaataaagttgctatgaacatatttgagcaagtatccttgtgggatggtagaacatcttttgggtatatgcccaggagtggtatatctgggtcttaagatagaactattcttattcttctgagaaccaccaaattgatttccagagattacaaatttgctctcccaccagcaatggaggactgttcctccttctccacatccttgccagcatgtgctatcacttgagtttatgattttagccattctgattacttttggttgaaagtctgtttccttacagattataatggctactccagcttgtttcttgggtccatttgcttggaaaaccttcttccagacctgtatactgagataatgactatctttgttgctgagatgtgtttcttgtatacaacagaatgatggattctgtttacgaatccattctgttagcctgtgtctttttgctgggaaattgaattcattgatgttgagaggtattaatgagcaatgattgttacttcctgttattttgatggtggtggttgagtgtgtgtgtgtgtgtgtgtgtgtgtttctcttctattggccttatggtgtgaaattatgtgggttaaaatggtgacctgcatccggcccagggcttggacactgggtgaagcaggacacaggaagtttgactgcatgtaccccatgccactgctggagaggtgtttgtctgcaagaagccacaggacccctctcagggggtggggaggtgcagtctgaggtcccagagaggcctcctacgagagattagatagccagctctttataggaagacctgctccattgttccctcagtgggtcccaatgagaagaggcagtccatgattttaaggtgtttattgtaatggcagagagttgtgatgaatgaaaccatattccccgttctcagggcaggcctggggtttaaaaaccttttgcagggaggagagtctgagaagaagagcttaattgcataagcccttcaggtctttaagaacctcattaacatggagatctgtcttgaggctacatgatctgtggtcctgtcctctacctgtggagggggttggggtgttgccctatgtgctgatgaccacagacctatggagtggagacctgtaaccttgtatcaggaggctggtgtctaggagcaagtggcaaacacctgtcctcccttgcaggataatctcctgctgggtcaacaggcttaaacctagctcaactagaaaacaggctgcctttcatggtcccacaaaattatttcttgtgttttcttgattatcgttagcctcattgggttggagttttccttgtaataacctctgtagggctaggttagtagagaggaattgtttgaacttactttttcatggaatatcttgtttacaccatctatggtgactgaaatttttattgggtatagtagtctgggctaacatctgtagtctcttagggtctgcaagacctctgcccaggcccttctagcatttagagtctcaggtgagaaattgactgtaattctcataagtctgtctttatgttacttggcctttttcacttcctgcttttaaaattctttctttgttctgtatatttagtgttttgattattacatggcaggaagattttcttttctgttccaatctatttggtattctgtaagcttgttgtatgcatctgtctttaggttagggaaattttctgttgggttagggaaattttcttctataattttgttgaagatgttttctgggcctttgagctggatatcatcttcttcttttattccaattattcttcttttttcttacttttttattatttgaatacattttatacatcaaacatattaataatattgagtattttgagaatcaaataatatgtgaaaatggttcaacttttatattcatatccattcataccctaaaaatatcattaatgaatatttaatactatccataactgaggatcctacatctaatgttgaatactaaattgtttcaaaacatacaaaatattctttaggagttaagcataataaaggagcataaaatattaaaaaaaatcattaagaaatatagtcaaaagcccttatatgataccacctgacatagtgagagagtatttaaaacacattgtatatctgtgtacattgtctaacaatcagttcacataaaaaagattatcagtgtttctaggagaggaattattttatcagtaagtatatatttttttattttttagtatttattttttttatttttttaattggtattttcctcttttacattttcaatgctatcccaaaggtcccccatacccacccccccaatcccctacccacccactccccctttttggccctggcgatcccctgtactggggcatataaagtttgcaagtccaatgggcctctctttgcagtgatggccgactaggccatcttttgatacatatgcagctaaagacaagagctcccgggtactggttagttcatattgttgttccacctatagggttgcagttccctttagctccttgggaaatttctctagctcctccattaggggccgtgtgacccatccaatagctgactgtgatcatccacttctgtgtttgctaggccccggcatagtctcacaagagacagctatatcagggtcctttcagcgaaatcttgctagtgtatgcaatggtgtcagcatttggaagctgattatgggatggatccctgcatatggcaatcactagatggtccatcctttagtcacagctccaaattttgtctctgtaacttcttctatgggtgttttgttcccatttctaagaaagggtaaagtgtccacactttggtcttcgttcttcttgactttcatgcttttggcaagttgtatcttatatcttgggtaacctaagtttctgggctaatatccacttatcagtgagtacatattgtgcaagttcctttgtgattgggttacttcactcaggatgataccctccgggtccatccatttgcctaggaatttcataaattcatttttttaatagctgagtagtattccattgtgtaaatgtaccatattttctgtatccattcctctgttgaggggcatctgggttctttccagcttctggctattataaacaaggctgctatgaacatagtggagcatgtgttcttcttaccggttgggacatcttctggatatatacccaggagaggtattgcgggatcctccggtagtactctgtccaattttctgaggaaccgccagactgatttccagagtggttgtacaagcttgcaatcccaccaacaatggaggagtgttcccctttctccacatcctcgccagcatctgctgtcacctgagtttttgatctttgccattctgactggagtgaagtggaatctcagggttgttttgatttgcatttccctgatgattaaggatgttgaacattttttcaggtgcttctctgccattcggtattcctcaggtgagaattctttgtttagctctgagccccattttttaatggggttatttgattttctggagtccaccttcttgagttctttatatatattggatattagtcccctatccgatttgggataggtaaagatcctttcccaatctgttggtggcctttttgtcttattgacggtgtcttttgctttccagaagctttgcaattttatgaggtcccatttattgattcttgatccagtaagtatattttaaaaatttcaaaatagcaaaaacaatgttaaacattaagaaaatgctactttcaagcacagtgagaaaaattatcaatattttcctgatgtttgtagaacatgattttaatattttcaactcttaatattcaataaacagaataattattttaagttatatttcattgttatgtctcccttttcatttctgattttattaatttgaatactgtctcagtgccctctggttagtctggctaagggtttatctatcttgttgattttctcaaagaacccactcctggttttgttgattctttgtatagttctttttgtttctatttggttgatttcagccctgagtttgatcatttcctgccatctactcctcttgggtgtatttgcttctttttgttatagagctggcaagctgttagtgtaagctctcttcagtttctctttggaggcacttagagctatgactttccctcttaccactgatttcattatgtctgataagttttgatatgtatgatgtgtcctcattttcattaaattctaaaaagcctttaatttccttatttcttccttgatcaagttatcattgagtacagtgttgttcagcttccatgtgtatgtgtgctttctattgttttgttgttgatgaagacaagccttaatctgtggtaatctgataggatgcaagggattatttcaatctacttgtattagttgaggatggtttttgtgactgatcatatggtcaattttagagaagataccatgaggtgctgagaagaagttatattcttatgctttaggatgaaatgttctataagtatctgttagatccatttgcttcataacttgtgttagtttcactgtttaatttctttatttagtttctgtttccatgagctgtccattgctgaggatgggctattgtctcccactattattgtgtggggtgcaatgtgtgctttgagctttagtaaagtttcttttatgaatgtgggtggccttgcatttggagcatagatgttcagaattgagagttcttcttggtagatttttcctttggtgagtatgaagtgtccttccttatcttttttgataacttttggttgaaagttgatattattcgatattagaatggctaatccagcttatttcttcggaccatttgcttggaaaattgttttccagccctttactctgaggaactgtctgcctttgtcactgagttgtgtttcctatatgcagcaatatgctgggtcctgtttacatatccagtttgttagtctgtctttttattggggaattgagtccattgattgttgcttcctgttatttttgttgttagaggtggaattatgtttgtgtggctatcttcttttgagttttactttcttgctttctctaaggtgtagtttccctccttgtgtttgtcttttccatctagtgtcctttgtagggctggatttatggaaagatattttgtaaatttggttttgtcatagaatatcttgttttcttggtctaaattaattgagagttttgctgagtatagtagcctgggctggcattttgtgttctctttgggtctgtatgacatctgctcaggatattctagctttcttagtctctggtgagaagtctgatgtaattctgatacatatgcctttatatgttacatgaccttttccccttacagcttttagtattctttgtttattgcattgaatattttaactgttatgtgatgggaggaatttcttttctggtccagtctatttggagttctgtaggcttcttgtatgttcatgggtatctatttctttacgttagggaagtttccttctatacttttgttgaagatatttattgtctctttaagttgggaatcttcactcttttctatctctttatacctattatccttaggtttggtcttctcattgtgtcctggatttcctggatgttttgggttaggagctttttactttttgcattttctttgatcgttatgtcagtgttttctatggtatcgtctgcacctgagattctctcttctatctcttgtattctgtttgtgatgcttgcatctatgactcctgatctctttcctaggttttctaactctagggttgtctccttttgtgatttctttattgtttctattcccaattttaaatcttggatggggactggtgagatggctcagtgggtaagagcacccgactgctcttgcgaaggtccagagttcaaatcccagcagccacatggtggctcacaaccatctgtaacgagatctgatgccctcttctggtgtgtctgaagacagctacagtgtacttacatgtaataaagaaaccttaaaaaaaatcttggatgattttgttcattttcttcgcctcttttattgtgttttttctgtaattctttaagggattttttttgtttcctctttaagggcttctagctgtttacctgtgttcacctgtatttatttatttattcatttatttccttccttcctttcttcttctttctttctttctcttttttctttctttctctttttctttctttctttctttttgatacagggtttctctgtatagccctggctgtccttaaactcactctgtagaccaggctggcctcgaactctgaaatctgcctacctctgcctcccaaattctgggattaaaggtgtgtgccaccactgaccttctctcctgtatttctttaagggagttgtttttgtccttaaagtcctctatcagaatcactagaagtgatttcagatctaaatcttgcttttccagtgtgatggtgtattctggacttgctatggtgggagaattgggttctgatgatgcaaagtaaccttggtttctgttgcttatgttcttacacttgcctcccaccatctgattatctctagtgctatctgcccttgatatatctgactggagcctgtccttcctgtgatcctggttgtgtcagaaatcctcagagttcagctgtctctgtgatcctctgattctgggatcctgagatcctgggtgtgtcagagctcctaggagtcaagctacctctgggaccctgagatcctgatgtgatcaagctcctgggatcctctgatcctgtggtcctgggcatgttaaagcacctgggagtggagcttcttctgggtgttgtgagactggctgcagagtgataagacccaagggtctgctcagggcacctctgatcctatgatcctgggcatgttagagtgcctgggaattgagctttttcttagtgttgtgggagtggctctaatcctatgattctgggagttttggagcgcctgggattggatcttcctctggatgttgtgggactggctgcagagttcgcacccaagttctgctcagggcaccagcctagaccagaaggaacccatgccactgatctgtcagagttcctggttgcctgtgttccactgatcccagttactccagtgttggggcaaatgttgtgtcctcctcacctctgatcctatgatactgggcatgttagagcgcttgggagtggatcttcctctgggggttgtgggactagctctgatcctatgatcctgggtgtgttagagcacctcggagtggatcttcctctgggtgttgtgtgactggctctgatcctatgatcctgggagtgttggagcacttgggaatggatcttcctctgggggttgtgggactggctgcggagttcatacccaaggtctgctctgggcaccagcccatactagcaggaaccagtaccacagtcaggcagagttcttgggtgccctggtcctgctggtcccagttacttccggtgttggggcagatgttatgtcctccttacctttgatcctatgatcctaggtatgttagagcagcttcctctgggtgttgtgagactgactctgatcctatgatcctctattcttaggtttggtctttgcatagtgtcatagaaactttttaggtttttcttttattgatgtatcaattttttctaatataccttctatgctttagattctgtcttccatctcttgtattctcttgtgaatgtagttcctattctctttcctaggttttccatctccaggattgcctcagtttgtcttttctttattgcttctatttccattttcacatcttgaacagttttattcatgtccttcctgtttgattgtactttcctttgtttctttatatttatttgcttcctctttaagcgcctctacctgtctcattgtattttcctgtatttctttaagggatctattcttatcttctttcaaggcgtctatcatctttttttgtaagtttttttttttttaagatttatttatttatttatttatatgtaagtacactgtagctgtcttcagacgcaccagaagagggcatcagatctcattacgggtggttgtgagccaccatgtggttgctgggatttaaactttggaccttcagaagagcagtctggtgctcttacccactgagccatctcaccagcccggcttctatcatctttataagattgttttagtgtcatctttttgtgcttaggctatgttagaatatccagggcttgctgtagcaggatagcagggctctggtggtgccatattgccctggcccttgttaattgtgttcttatgctgtcctttagtcatctggttgtttctggtgttgaatgaattttcctgatgtcaactggactcattggggaagcagacagagccttgatcctgatggtggaactcagggaacagcaagttcctcacctctgctggctatggcccagattgactctttgctgcctgtgccccaggtggaccttccaggcatgggattgtctgggagaggtttaatctggatgctccttggggcctccacaaagctcctcaggaaggcaaggagagccatgggccaggagacagcacacagctcacctctgctggctgtgcctcagatgggccccaagtggatagggctgttttctaaaatatgggtgatccaaaagaaaaatgggtggtttgattttagaagcgccaaagaacattgaactaggttagagaaagcaaatatagaagaaaggcattagaagaatcagtcaataaatataatggactacctactgtgtgatagattgtttcaggcacttaaatacaatatagcaggagcttaccttctcttagtacaagagataacaactagtaaaaaacatagttaaaggaggattaggaagatggcttagtcaatatagtacttgatgtgagaatataaggacttgagttcagcagaggacccaagttcagttttcagttcctatataattacccataactccagctcccagaaatctgttacattctgccaggctccatgagcacacaccctcatatacatacacacatgcacacatatacaattctcaaaaaaaaataagtcttaaaaaataatgtgatgagggctggacagatggctcagaggtaaagagcactgactgcccttccttaggtcctgagttcaattccctacaacatgatggctcataaacatctataatgagatctggtgccctcttctggcctgcaggcatacatacaggcaggacactgtatacataataaataaatcttgaaaaaaaataatgtggtagcacttaacttataatcctagtgctggaaaggcagaagcaagcagacatgtctgggaaaggggtgtcattagccagcaagcctgacctaattggtgacttccaggtttagtgagagacacctatctttaaaaacaaggtagatggctcctgaggaatgacatccaaggctcattcctgaccttcacaaacatatacatgtatagatacatatataaaaagagaaataagataatttcaagggtgctattcagaaaataatatattttgttacaagtcacttcagctgttatagtaaaaaaaaaaatccttttgaggagctgagacctaaatgataatgaggcaaggtgataaagctcagaaaagacaagagggaaaagacagaggctctaagaatgagcatgtttagaatgttgaggtacagaaataggtattactagagtagagtaaaaagttcaaggtatgcagggtattgaggtggcagaattgggcagctgatgcacaatacaggtcctacagaaagaagagatacccttcgttattctgactcacaaaaaatgataataaatagaccatctatgttcctatataaagcccaccacacaaattttgcactttatctcattcctttacccctcataaaaatgtttctctaagcctgtggttctttttttttttttttaaagatttatttatttattataagtacactgtagctgtcttcagacactccagaagagggcgccagatctcattacggatggttgtgagccaccatgtggttgctgggatttgaactctggaccttcggaagagcagtcgggtgctcttacccactgagccatctcaccagcccaagccagtggttcttaaccttcctaatgttatgacccgttaatacagttactcatgttgtggtgaccctcaacgataaaattattgtgttgctacttcataactgtaattttgctactgttatgaatcataatgtaaatatctgataagcaggatatctgatattcagccccccaaagggtcattacctacaggttaagaactgctgctctagaagttcctttttttttctttcttatacagtcagtttctcactatcaactagactggtgttatccatatcaatcatgctattattttttaaatattttagattattttatgtgtatgaggttttctctgcatgtacaaattgcaccatatatgtgtctgatgcccacagagatcagaaaaagtcagatcccttgaaactagaattccagataattggtaaccatcacatggattctaggacctgaacttgggtcctctggagagtcaccaagtactctaaactgctaagccatctgtctagctcccaatcatgttattattaatggccattccttcatttcatttatttagaccccaaacttaaagttattgcttatctctccttccccactcccagactcacacctaatccatcagaggatcttgttggttatagtatgtttttacaaaccaaattttttttgaaatggactaaatattagcataagatgaaaacataatgaaatgggaagataagaatgactacggatccacaagcttctgccccacatgtgtgaagtactatgatggaaggcaaagggaagaaaaaaattacagaaaagagtccacagacatcacaagcaaataatagatttcataaaaacagtgagtctagttcttcaaagacgttcccaaggaaagctgttaaggaaggtggacctaaagtcacacctgagaactttgagaaaggtgccaaaaaacctggcaggaagggtgtgaagctgttcaagaccaagccacaagggggcaaaggaccgaaggacaactttcagaaggctaataaattcaagtggaaattccagccatacagtgaaagtgatgaatcaacagccaagaaaccccaagtaggatgacttcaaaaagaagaaagagctgaagcaaagcaggcagctcagtgataagaccaactatgacatcatggcagagcacatttggaagagctttagaagaaaagattgtggcaaggaaaaacgggtgaagctcatgagtgatttgcagaagttgattcaagggtaaattaaaactattgcctttgcaactagatccagtacttcattcagtatgggaatgaggagcagaggaagcaggctttccaagaaatacaaggtgacttgcttgaattaagtaaagccaaatattccaggaatattgttaagacatttctcatgtgtggaagtaaaccacaagtttcagagataatcagaagttttaaaggtcatgtgaggaagatgctgtggcattcagaggcatcggccattgtggaatatgcatacaacaacaaagccattttggaacagaggaacatgctgacagaggagctctatgggaacacgtttcagctttacaagtcgcagatcatccaacgctggacaaggtgctggagctgcagccagcaaagctagagcttatcatggacgaaatgaagaagattctgactccgatggcccaaaatggagctgtgattaagtactcactggttcataaaatattcttggacttttttttacctatgcacccccaaaccttcgatcagaactaattgaagccatccgggaagcagtggtgtaccaggcccacacacacgatggcgccagagtggtcatgcactgcctgtggcatgacacacccaaggacaggaaattgatcatgaaaacaatgaagatggacgtggacaaggttgccaatggccaatactctcacttggttctactggcagcgtttgattgtattaatgatactaagcttgtgaagcagataatcatatcagaaatcatcagttccttgctcagcatagttaatgacaaatatggaaggaaagtcctgttatacttgatgacccccagagatcccacccacacaatgccagagataattgagcttctgcagaaaggtgatggcagcgcacacagcaagaaagacactgcaatacaccagcatgagctcttggagtccatctccccagctttgctgagccacctgcaaggatacactcaagaggtggtgctggatgtctgcatgtgtgctaatgtcggacatcctggaatctactactggagatggtcagcctgctatggatgccatcgctggtttggcagcagcagaacagtatcctggtggcaaggacggagagcttcatgttgctgagcatcctgcaggacatctagatctcaaatggctaatagagcaagataaaaagatgaaagaaaatggaaaagaaggttgttttgcaaaaacccttgtagagcatgttggtatgaagaacctcaagtcctgggccagcatcaacggagatgccattattctttccagccttcttcagaggtgtggccaagaagttgtaaacacagtcaaaggtggactgaaaaggtggactgaaaaccctgattcctaccttggaaaaaaacaaaagcactagcagaggcatccagactctgcttgagaagctgactgcataggcatacaggatgagcaagcaggaacccgcttcccaaaggaaaagcgtggaatctatcatgctcaaaactggatgctctatgcatgaatttgttaaaggacctatttatataaaattgtctctaaaagagaaaataaaaaatgactagggataaaatcaggttacaaaacactttataataataataaaatcacaggcttttctattagctgagacttggaaatgacttggcaagtagaggtggactatattctccccactccatttgcatgttgaactctttcctgtctccatttctccttgaactgattcagatgaactattatatagccttaacaataaaggggacttgtctttctagatgaatataagtctgcagtcaatctgaatgtttacagaatgaagtaatagcaatacaaatgaaaaaaaaaaagagagactcaaatgagctgacttctcacatgaaaatgcttccatcagaatcaataaggagaaattctgcctcagcaagcacttgtaacaaagatattagatgaatagatgaagccacaaacatctaagaaagaagaatgtattaatctcagggttggaaaataaaaatgattaattcaagatacaataagaattaatataaaatccatttcattgttttaaaattataaacttggagctgaggagttggctcagcatttaagagaagtttctgcttttgcagaggatctaaatttggttcccagaacccaatggcagttcacaattgcctgtgattcaagttccaagagttctgacaccctttcctggtctctgtggacactgatatgcatgtggcacatacacagagacatgcatgcacataaataaaaagaaatctttaaaaataattaaagtcaatagaattatgaacttgatgtacataaaaagtatgctaaagagaatggagatattagctatagaatggaaaaatacaccactttattgatcatgaaaatgtaaaataaaattacaatgaaacactgctgtgcaaccaccagaatagccaaaagtataaaaatgtagtcaagaatttagagcaaatagaactcccacattttattgttgttaaaaatggaaaatataactgctgatttagaaagcagtgtaccattatctacaaagaataaaatagtcctttccagcaattcaattcctgcatgtgtgaccaaaacaaatacatatatttgttctccaagacatttacctgatggtttcattttaggactatttccaagtcccaatgtacaaatgtagtggtaactcatgtgtgtgtgtgtgtgtgtgtgtgtgtgtgtacatatatgtgaatgtatatatgtatacgtatgtatgtatatatatatatgattagagtatattaatctaataaagtacaatacatagcaaataacagagaatacataagctataattacaacatagatgaatgtctcaactgtaatgcttatgaaagaaaaaactaaatatatgtatactgttgccccttacatacataaaataaaaagcaaaactggactaattattttatgactgtgtggttagaagtgtaaactgatgaaaagcaaagaaataagattattataagcatcagaagagtggttacctttagcagagagatagcaaggtgtgagtagaaagggatatatagttttctgggagatgtctgcatttctgaatgaaagatgtgtatattttagttcagaattttaaagtaatatttttaaaaaaatgagatctaagaaatagaaaccaggctctcttatatttagagtatgttcttaaggtctatatttattcaacactcaccaataatttttttcttgttatagggaagcaggtttctttcttctttaattttatttaatcgttttttacaacccagattttatcatccttctggttcaccctctgactgttccacatcccgtacctccttcccccctctccacgaggatgtcttcactctcccctccctcaccccatccccactccaccagacctccccactcccaggggcctccaatctcttgagggttaggtgcaccttctttgcctgagtccagacccggcaatcctttgctgtatatgtgttggagagcctcatatcagctggtgtatgctgcctggttggtgggccagtgtctgagagatctcagggccaggttagttgagactgctggtcttcctctagggtcttcctcctcctcagcttcttccagcttttccccaattcaaccacaggggtcagctgcttctgtccattgtttgagtgcaaatatctgcatctgactctttcagttgcttgttgggtcttttggagggcagtcatgataggcccctttttttgagtgctccatagcctcagtaatagtgtcaggccttggggcctccccttgagctggatcccaatttgagcctggcactggacctccttttcctcgggatcttctgcatttttgttcctgcagttctttcagacaggaaccaataaattttttaaagatatatttatttaatgagtgtatgagtcttctatctgcatgtacaccagcatgacagaagagggtatcagatcctgttacagatggttctaaaccactatgtggttgctgggaattgaactcagaacctctggaaaatcagtcagtgctcttaaacactgagccttctctccagctgtcaataataaattttgagtatgtgcctcgtattagataatgttctgacttctgggaatgaagcagtagaaaaaatagacaaaacttccatcttttaaagaacttacatagtagtaaagtctgaagacaatatttcaaagggcaacaaattatttgttagctatctaataaaataaggatacaaattttgtggacttctgacctctagctatttggcatttgccaatttagtttatacaagtgttttgtgtactgaaaccaaaatctacccttccttcctttcttctccttccttccttccttccttccttccttccttccttccttccttccttccttcctccctttttgtaaaagagtctcaggtacctaaggctattctcaaactttctatgtcccccattctggcttaaagcttgtagtgtttctcttgtttcaggcttctgggtgctggagttacagccaccataactagtttatgctgcactagaaatggaagtcagagatccctgcatgttgggaagcactacaaactgagccacatcgctagcccctgaaaattatctttcatctctttccttcctgcctgcaccattatatttatcatttatcatgaatttttcttaagtatatctcaaataaagggaaaacaaaagtgtgagatatccctcctcatggatccacaaagtgctgattttcttctgctttttctccaggtatcaaagtgacaatgtacctcagttcaagaaagtagttttccaggaatttactgatggctcctttagtcagcccttatatcgtggagaattaaatgaacacctggggttgttgggcccatatataagagcagaagttgaagacaacattatggtaaattaaaggcaattgaattccaaaaaacaattctgtatatttagtttgcttctaattataaaaatattatatgtacatatgacaaaattagaagttaaatagtctagactagtggttctcaaccctttgagaggataaggtgaccctttaataagggtcatgaatcagatatcctacatatcagatatttacattaccattcatcacagtagcaaaattacaattttgaagtagcaatgaaaataattttatggctggggtcaccacaacatgtggaactatattaaagggttgtagtagtaggaagtttgagaactactggtctaggcctaacataacagcctgcaaaacacatgcaaccaaatatagatatgtgtgtcctagcacaaaattacaaacttactttgaatgattttttgaaactcaattgaataattcttcagtgtgaatatcagtagaaaacatcatgtcacagtatgagaagactgatttgtggaaacaaaaggaagtaatgtgagagaggaggaagagaaagagtagtaaaggagtatataaggaatatattcaagctgcatcgtgcacatgaatgaaaatatcctaggtaatatagtaacacaatgaatatatatcaatgggaaaaataaagtattctcccatctgaaaaaataaagtgcataaaattaaaaagttgaaaataatcctatagttattttgttgtgtatttctcatctgttgcctgacttttttatgtattagaaattataacatatataattctgcttctttttaattatgtattatgtaataaacattttatatcattaaacactttataagtaagaaaggaaggactgtggctgggtgtagtagcacatgcctttctttaatcctcttcccaactccccaccttacctcccatccatgcactctggaggcagagttagaggcctgtggatctctgagtttgatttcagcctcatctatgtagggaattcaaggatggtcaggacaatcttgagagagactctgtctataaaaacaaaacaggaaaaaagaatgactacataataatctattatatgaattgttggaaccataggttccttaaccatgtactttgaagaacctttgaaatcatctcctttttccttttatttctttgagacagcaatttacaatgtagccttgacctgcaacttggagaaatcttatctttgcctctagagtgctgtgattaaaggtgaatgccatcacacccagcttccctcttttctattttataaataattattttcctttaactaggataaaactccagaactgtactatacatgaattatgaattctctgttaatatcctttgtaaatttgtctttttagaggggataattttattaatattaccttacatattagggtttttttttggttttttttgtttgtttgtttgtttgtttgttttgtttttttagtttttcaaggcagggtttctctgtcctggaactcactctgtagaccaggctggcctcgagctcagagatctgcctgcctctgcctcccaagtgctgggattaaaggcatgtgccaccactgcccggctacatattagatattaaccagtgacaattttaactaaaagtatttaaatacaaaattgtgctataaaagaaaatatttaaaagccttatgggtagagagaaattttttataaatataaaagcagtgaaattgtcaaagtggaatgttttatgagttacaacctaaaaaactattttatttttttaagaaaatcttatgaaattaagagacagtaaacttagggaaatacttttttaaggaaaatacttttattactcaactatatctcattaagtcctacaaaatgtaagtaatttttggtgcattttaagaaaaagatcaaagttattttattttattccaaaaatattcattcattttttccaactgactgctaataaacatagaagcctctaaagctatgggattatagatacattttttctaacttggaatttattttactttgcatatattttatgataaatgtgcatacttttaaaaaaagatttatttattattttatatataagtacattgtagctgtcttcagacgcaccagaagagggcatcagatctcattacaggtggttgtaagccaccatgtggttgctgggatttgaactcaggaccttcagaagagcactcagtgctcttacccgctgaaccatctctccagccccatactttttttttaatctaaaaagaaaacattttttaaaaggacacaaagtaggtgagtagggatgtagggtttgatcttcgagaaaaagtagagatgaatttaatcaagttacagtttggaattctcaaagaactgattaaaataaataaaaaatttaaaagataatatatatccatcttggaatttgttataagaaaccttaaatagtcactcttcaagatatagtgagattttctgtttacttttaggtgtttaataattttctcctctgtaattttcatcttataaaactagaatccaaatttttctcataactttctttttaaagtctaagttaataaaaattggatagagaccaaaagatagagggatacagatataaaaccttaggattttaatattctaaaaaattattctcctggattttttttcctcttcaggtaactttcaaaaaccaggcctcccgtccctactccttctattctagcctcatttcttataaagaagatcagagaggagaagaacctagaagaaactttgtcaagcctaatgaaaccaaaatttatttttggaaagtacaacatcatatggcacccacagaagatgagtttgactgcaaggcctgggcttatttctctgatgttgatcttgtaagccgttctttattgggatatccatattctcacttaaaaaaaggtctttattatttcttttttggaatttttaatgagtattggtgttttgcctgtgtttatatctgtgcatcatgtgtatgcctattgccctcaaagaccataaggaggctttggatcccctggaactggagttaaaaacagttgtgagctgaaatgtgggtactgggaataaaacacagatcttctggaagagcagccagtgctcttaaccattgagctatcttttccagcctgatttttatcttctatggtaagcattttggtatttatcctaagcacagtgagaattttaagcaagggaagtgatatcacttttctatgttagaaatattactctggaatctactacatagaatgagtagtactttggcatgcaagttgataagagagaacttacactaatacaattaatgccctcctgggaactctaggaaagagatatgcactcgggattaattggaccccttctgatttgccacgcgaacacactgaatcctgctcatgggagacaagtgtcagtacaggaatttgctctgcttttcactatctttgatgagaccaagagctggtacttcactgaaaacgtgaaaaggaactgcaagacaccctgcaatttccagatggaagaccccactttgaaagagaattatcgcttccatggtaataaaatccaaacataaattatactcactgtgaaatatagtgtgtactttttcaaatgagccagagacttgaaaagtaataagtgaaatgctgaaggatatcagtattttctgtggagaaacaggaacttcagtgataggttttagtaattttctctgtgttcttctctagcaatcaatggttatgtaatggataccctaccaggcttagtaatggctcaagatcaaaggattcgatggtatcttctcagcatgggcaacaatgagaacatccaatctattcatttcagtggacatgttttcactgtacggaaaaaagaggagtataaaatggcagtgtacaacctctacccaggtgtgagatagtttatactgtcctctatctactgtatttattgataacttactttaaatggtaatatttgatatgagtttcagagaatttccttgctgaaatgccttactttttcaaagtaactttatcctatacacaaatttaaatacattagcaaatgaatgagataatttcagatgcataaaaactactttaaaataataattaacaccagatagtacttccctaagaatcttttattatattcctctcaaatcccacgatactagcagctgtcaagactgatttgtttacagatgtaaccaatatattgatgaagcactaatgacagtgttgatcaaaacacagttttatttcagttctccatttgtcccttttaaatagtacaggggtgtgtgtgtgtgtgtgtgtgtgtgtgtgtgtgtgtgtgtctatatgtctgtgtctgtatgcacatataagtgtctggtgcccacgaaggtcagaagaagtcatcagaaccccttgagttgtaattgcaggcagttgtgaatgacctgacataggtaattggataccaaactcaggtcctctgcaagagcacttgcacatttaacccctgagccacctgtccagcttctcccatccctcaagtttcttataacttgagatccctttacttagtgccctggatcctagatgatcttactgtgatttctattcaccttgaaggttacatctggtcaatagtaaagatacctctaggattttttttcagagcaaaacatcacatggtaaatcctttgcacttgagagatctaaggtaatggaactgaattttggtaactctattttcatattacatattgtaaataagccaatttattccatactcatttttaatgaaatataatttttcttccttttcattttaaaaggtgtttttgagactctggaaatgataccatccagagctggaatatggcgagtagaatgccttattggcgagcacttacaggctgggatgagcactctttttctggtgtacagcaagcgtgagtaactatggatagaagttcactaaccattcagtctatttctgtataattttcctcctccttgaagtggctgtctttgtcaaaaaaataaatacaagcttgtattactatcaaatttaaaatgaatgagctttgggccctttgaatatcaagctgtgatatttagcagactgttgcttaaaaatcttcaattttacaatatcagatttgggaacttaattttgatttaattaccagagataacttagaaatttcacttgtaagagtttggggatgtaaccttgtgaaggtttgtatatgctcgtccccgggagtggcactattaggaggtgtggccttgttgaagtaggtatgtcactgtgggtgtggcctataagaccctcaaccctagctgtctggaagtcagtcttctactagcagccttcagatgaaaatgtagaactctcagctcatcctgaactatgcctgcctgcatgctgccatactcctgccttgatgataatggactgaacctcttaacctataagccagccccaaataaatgttattcttaccagagttgtcttggtcatggtgtctcgtcacaacagtaaaaaacactaagacaattcttaaacaagtaatagaaaaccacttacctaaaaatattataatttaatgggttatgagtcatttctagcttctgtgtttgatttcagagtgtcagattcctcttggaatggcttctggaagcatccgtgatttccagattacagcttcaggacattatggtaaataccattatttttgccataagaatcagggctgatttttttttttcatttctgtagaacagtttcaaataaccaatctactcccttccatacttttctcttttttacattatattattttacatatatgggtgttttgtcttcgtggaaatggacatgcctgatgcccacagaggccagaagagagtatagaattccctgaagctggagttacattttgtgagctgccttgtggttgctgggaaccaaacctgggtcctttggaagagcaaaaagtgctcttaattggtgcaccatctcttcagcccctctccattcttttcttacttcttctcagtagactcctctcaagtccacattcttatttccatttcctatatgaccatcttaatttaggccccttaccttaattcaggcttaattggacaatgacattaactcttgaaatgccctcctctagtaccttcagaactgctcccgaaagtctattctattgagcatagtaagaagctaccgtttcttctgcacagtgatagtcaagcttaaatagtgtttatagaaaattgttctagaataagggctcacagatcattgtctatggtttttgtatatgagttaagaataattttctattttactctatattatttctgcaaaacagttgctttcactgtgacatttttgttttcttaattgaatataatatactttgattctattcactgtcccctattatcctttcatactcctcttcccaatcttccagtctacttcctctttccaaatattcaggggcacaggtagggagggactcagtttttcttaaggggcttgccattgggagtttgactgtgttccagtgagtatatagccagcacaaattggatttgttttttcttttttcttccttttcttgggggaaggtcacaatagtggagggaggggacctgagagaattgagaagtgagtgtgaccagggtgtattatgcgaaatttccaaataatcacttaaaatattaccttgagaaaaaaattttattacacttgtgtgtgtgtgtgtgtgtgtgtgtgtgtgtgtgtgtgtttgtcaacctctactttaaaggtgaaaattctccttggaaattaggtttaattagtatttatttaatgtatttctgaatagaaacactatgctttttatttatttttgctatttttaaattttctagcatttctatagtaaatttacattatatggtaaagaaacattttagtaccacttatatatttcatatatataactcagtggtagagcacttgcttaacacatgcaaagccccaggttcattccccggtactgcctcctcccaaagaaactagaacatagaatatacgacaccaaaaagcaaatcctttagacaataatcaatactgccatgctataaaacttttatgctttatatcttctgcagctagaattaacctttctctagataatactgttgttcccaagtttttaagataaattcaattgaatatataataatataatctctctcttctttcttggacaaaggacagtgggccccaaacctggcaagacttcattattccggatcaatcaatgcctggagtaccaaggagcccttttcttggatcaaggtcagaaaactatgagaaatgtatcaacattcaccaagttcaaaatactatcattatgtagtctttcccatagaatatcatttaacatatgaggaaactatagaatagaataactaagtttgttcagaaatattaaaaaattagtcatttggaatagaatttaatatacagatcaatcccatttatttctacttggaatctaacatcagaatgatttctataaatttgaatttactacctgtggtagcttgcatagatttggcccccatagatttgcatatttgtatgcttggccatagggagtgacactattaggaggtgtggctttattggaggagatgtggccttattagagtacttgagtcactgtgtgggtaggctttgaggagtcctatgctcaggctccactcagtatacaaggtagtctcctgactgcctttggatcaaggtgtagaactctcagctccttcttcattaccatgtcttcctggatactgccatgcttcctgccatgattataatggactgaacctctgaactataagacagcctcaattaactttttgttctttataagagttgccttgattatggtgcctcttcacagcaatggaaacctaactaagacactattttcaagaccatgtattttctttgatgatatatctcctactgagtaggtgcctgagtcctctagtgttcttcatttttatacaaaataggagcttagtccttaatcttaaaagcaaataaattgtagcttcttttatataattaagcctgtctttttttcagaagatttctatcctttgggtattaggaagtacctacttaatatagtctactgtggtaagctaagatgtactaatacttgaagtaggttagcttaaaaattttaaatgtatacagactctcagattatctgactttgctatttcatcaagatgagccatcatcaatggaaatatgatgtacataaaatcacatgtattatttggcattttctagtagccatattaaaatgaacatgaaaatcatctttttattttaatgtctctttgtttgtttgtatgtatgtatggtatgaatttatgtgtgtgcatgtgcatgtgcttatgcatagcacatgtggagaccagggttaaatatcagttgtatttgtctgtttctctccatattatgtttaacaatatttttttattctttggaaattgcaaataatgtactttgaacatattcatgcctcctcccacaattccttccataaccatcctctccactttctcttaccttcccacccaacttttgagatttcttctttttctttctaatttgagtccactttgtattgtccatctagtcttagtagtgggaccttctctttgtgtgttcaacctactgggtgttactctgaggaagaaaggtggtattccttctcccagcagctatcaaatgcccaaagttcatgagctagtggtaggattttacacccacttttccccaccccatattgggattttttttttctggctgaagcttgtggaagctttgtgcatattgttatgttgctttgagttcataggtgttactaccctgttgtgtctagaaaacactgttctttgttgttattgaccatctctggctcttaaaatctttccatcccatcttctacaaaaatccctgagctgtaggaggtgtttaatatatatgtcccactttaggctgaacacttttattctttatatgttgaacagttgggagtctctgtgttaattgtcatctactgtaaggagaaacttgtctaatgagggttgagaaatacattgagctatgggtatagcagtaagtcattagaagtaaatttaatactatgtccatttagcaaaataatagtattaagtcctcctctagggcctatgacttatcaaatctcaggttcttggaccttttaacagtaatggttatgggttccaggtcatggagcagatcttagatctaagcagaaagtagttggtcccttcaatagcatttgttccagtattataccagtggacatatattgtcagatcaggcattattatagcttacagagttcatagttgaacaagattttaactacttttctcccctggcagcgtacatagaaaagtctagcaccgtgaaagctaaaaaggattcagttctgtttagggagcacactgttgagagtttgcacctctccagtgaatacatagataacataaagtcaacttttttattgttgttgtttctttcttttttgttctttttattttttttgtggggtataattcataagagggcctagatttggaaggacttgaaagagattgtaatcagggtgcataatgttgagaatcaataaaaatattatatgtgaaaaaaagataagtatggatgaaacttacatgtcagtaccagcttgatttatccatgttctataactcaagtgtatggtgtcttcagtaattggtttttaccatctagagggtaaacaataacattagcaatagcctataatgtttggggaatctatgtaaactcgttgactaagaactctaaaataggtaacccattcccagcattgagctttttgtttgttagctgtgatattaagtaggagcattgttgccctattttaaggtaactccattctctctctctgtctctctctgtctctgtgtgtgtgtgtgtgtctgtgtgtctgtgtgtgtgtgtctgtgtgtctgtgtgttctacaatattagatacatgtcttagtgttctattgctatgaaaagaaaccatgaccatggcaactcttagaaaggaacgctttaaattggagtttgtctacagtttcagttgcaatttattccattgttgtctagacagggagcatggcagtgtgtaaacagacatggtgctagagaagtagctgagtgttctacatctagatccacaggcagcaggaagagaatgccacactcggcctggtttgtgcttgtgaaatttcaagctcacccctagtgacacagttcctccaacaatgccacacttatcctgtcaaggccacacctcccaatacctctcaagtagtgacactccttgatgatcaagcatgcaaatatatgagcctatgaggatcatttttatttaaaccacctcattccactccctggtccccataggcttataaccatatcataatgcatcaaatacaattagttcaactctttaaaaatttattcttctctcataaaatatatcctgacatggcttctcctcctttcactcctcccagtccttcccccatctcccctttcctccagatctactcctctgtttcccttcagaaaagagcagatttctcagggatagcaacagaacatgacataacaaaatgcaataagagtggacacagaccctcatatcaaagctggacaaggtaactcagtaggaggaaaaggatccccagagcctgcaaaagaaatagagacacctcttttcccattgttaggagttccacaagcactctaagctaaacaaccacaccatgtatgtacaggacctagcacagactcatgtagggtctgtgattgctattttaatctctgtgagcccctatgagcccttcttagttaatgctgtggaatgtgttttcctcatgtccttgaccctttgggctcctacaatcctttattccactcttcttcagggtttcgagagtgtggtggcttgaataagtgaccttgtgggagtgggtgtggcctcattggaggaagtgtgttactgtgggggtggctttgaagctctacccagtgtggaagagacagtctgctcctggcttcctttggatgaagatgtagaactctcagctcctctagcaccatgcctgcctgcatgcttgccaggatgataatggactaaacttctaaacctgtaagccagctccagttaaatgttgtcctttataagagttgcctaagtcatggtgtctcttcacagcaatggaaaccctaagacactgagccctgcctaatatttgggtgtgggtctctgtatctactcccatcagctgctacaagaagccccactgatgagaactgggcactggtatataagtatagcagaatatgattaaggatcaatttgtagtttttttttttaatcaattatgtttcattctaccctagatttccaagccattcagtttccaattggtggctatcctggcagtattggtcatgggctccctcttgtggcttgggcttcaagttagacaagtcattggttgtcaactctcacaaactcagagccaccattgccccaacacatcttgcaggcaggccaggtgttttgtgactgtattagtatcctgatcttactaatggaagcctttctaagtttccaaagatggccagtttaggctctatatccttcattactaggagtcctcacaagggtcatcttcatagattctagtacatgtccactgcactaggtttaaagcccccatattctataacaatctcaactcttagaaatccaaaattcaaagtcttttctgagactcaaggcaatctcttaagagtaacctctgtaaaatcaaaatcaaatcacagaccacatacttccaatatacaatggcactgaatatacatttctgttccaaaggagaaagggagcatagcggggaaatactggtccaaagcaagacctaaaaccagcagggcaaactccaaattatgtgtatccatgtctgatgtcaaaacaatttttggatcttgtctagatagaattactattactgtgatgaaaccaaagtagcctgtgtaggaaagaatttatttccctatactttcacagcactgttaatcatcaaataaagtcaggaaggaactcagggtagaaatctataagcaggagctgatgcagaggccatggggaagtacttcttactgtattgttcagcatggcttgttcagcctacattttatagagccaagaattaccagcccagagataacaccaatcacagtgggctgggcccttctacatcaatcactaattacagcccaatcttatagaggcatttttaaattgaggtttcttcctgtcagatgattttagcttatgtcaagttaacataaaactagccaacacagatctcaaattcctttcatctttgttgactgtgtcttagtcgggctttctattcctgcacaaacatcatgaccaagaagcaagttggggaggaaagggtttattcagcttgcacttccatactgctgttcatcaccaaggaagtcaggactggaactcaaacaggtcaggaagaaggagctgatgcagaggccatggatggatgttctttactggcttgcttcccctggcttgctcagcctgctctcttatagaaccaagactaccagcccagagatggtcccacccacaaggggcctttcccccttgatcagtaattgagaaaatgccttacagttggatctcatggaggcatttcctcaactgaagctcctttctctgtgataactccagctgtgtcaagttgacacaaaactagccagtacagactgcaatatatttttctctctttggctggttctgcagctctctgtggcaggtattccacagctcttgcatctacaacttcttggggactctgttgaaatctaagcttcactttcacagctccatacaactgcctctctgacatatggctagcctcagcagttttccttagcctcagaaggagataccacatccccttttttgaatccttgactctaaaaccagaaccacaatggccaaaactgccaagttctgtgcctgaaacttggcccctcatttgtttgaatcgtcactagctttttgttttcaatagtttccttcactgcttaagcttttcattaattcatttccacaagttggaagctggatggggtctttccctaggccaacactcactccttttattccatttaacctcaggcttttctgtaaactttctatctccttgagcactagacttagctcagctccattacacttcctgatgccacttttctcctcaagctatacattttgtatttttcgttgctcagcttgttccttttcgttataaatttgcataggagtggccactaataaccacttgccagagtcaatactaggtggtcttgaaatctcctctgccaatgatattaatccaaaactctctaatttatcctcaggcagatttttttagacaagggcataaaacagcagggctgtcataatctacattgctctcagaaccactctcttctaaactcctactagtgtgaccctttaagccacacctaaatagttaaactactttcttaatccaaaatccacatactaccacaagtagcagcaataatcgtggtaccaacttctgtctcagtcagtgttctattgctatgaagagacaccataacaaaggcaactcttataaaggaaagtatttaattagggatggcttacagtttcagaggtttaatccattgttgtcttggtaggaagcatcctgacttgtgggctgaagaagtctctgagagttctacatccagaaccttaatcagcaggaagagagtgataccgggccctagtgacacacttcctctaacttcctaaaccctctccagtagttgtaactactaataaccatgaattgaaatatatgagcttatgggagccatataggtttctatatgactttttcaaaaaaccttaaaatgttatttgccatcttttcctggttgttcccactccaacccaaattcaaacctttttccataaatcccttttaaccatttactaacatgttctattttccctaccatgaaatcccccccccttccatgcccttaagtaacttcccaacttctatggatattccaaattaaacatatatttctgaagattcaaagctaacactcacatataagagcaaacaagtaacatttgtctgtctgtctggtctaggttacctcacttagaatagttgtttccagatccacccatgttctttattatgtcataatttcagttttgtaataactaaataatatttcattatgtaaatataccacattatcttgatctatttatcagctgatggatatctaggccatctggctattatgagtagagcagcaatgtacatggataatcagcaggcaactctataatataaaatggagttttttgggtatatgcccaagtgtggtaaaactggatcatataatagttctggtagttctatttctagctttttgaggagtctccacactgatttccttagtggctgcattagtttccattcctgggttttctgtgggtgctaaggtctaaagtcagatattccatacctgcacaacaaccacattactcaatgatccttgtacttggtccatgaaattcatcttaataagacattttattgaactaaacatatcaaaaaatagtatcatttaacccataatcaatcaggcccacatattaggccattctgatttatatgtgcaactccatggatgtgtgtgaggaggaagtgactcaatgatttgaaagtgatctgatttgccaagaaatggatagataattcaataaatacctttcctactcattcctatcatattgcttagttagggtttacttatgtgaatagataacatgaccaatacaactcttattagaacaacaattagttagggctggcttacaggatcagaagttcagtccattatcatcaaggcaggagcatgacagcaaacaggcaggcatggtacaggaggagctgagagttcaacatcttgacctgaaggcaaacaggattccaagaagttaagatgaggatcttaaagctcatgcccacggtgacacacttcctccaacaaagccacacctaatagcactactccatgggccaagaatattcaaaataacacacatatgttccatggctttacatacatacatggtcacatttcaacattagtgcctgctttccctgaatatgcaaggcaattgtagcaatagagtttttctaagtggataattaatagcaatgaatactaataattttcaaggtatactatgtacttttaaaaatagattaaaataagttgttttaatttgtaggtagatctgttggcaccaatgattgttcatggcatcaagactcagggtgctcgtcagaaattttccagcctttatatctctcaatttatcatcatgtatagcctggatgggaagaagtggctgagttatcaaggaaattccactggaaccttaatggtatgtatttagttctttcataagagtacatgaaaagtttaaagatcttttgacaaatggtacaacctacaagctccaaaattaattttctttctaagagttaatatgaatatttatggacatacaaacaaaaaagaagttttaatactttcatagatgatagaaatatagatgttataggtttagtccctgggggctttggggatctagttggttgatattgttgttcttcctatggggtttcaaaccccttcaactccttcagaccttgccctaactcttccattggggtccctgtgctcagtccaatgtttggctacatgcatccacatctatattggtcaggctctggcagatcctctcaggaaacagctataccaggctcatgtgagcaagctctccttggcattagcaatatgtctgggtttggtgtctgcagatgggatagatgggtggtgcaatctctggatgacctttcctttagactctgctccactctttgtccctgcatttccttttgacaggaggaattatggattattatttttgaggtgagtgggtagccccatccctcaaccggggaccatgcctatacactggatattgtctctacaggttctatatcgcctttgttggatatttcagctaatgtcctctctgttgggtcctgggaacctcttggttccatggcatctgggactttctagtggctaccccaagttccccctcccacactgctgaacacctcctttcaaattcctgatcctctgtattttccccagtctcctcccatatctgaaccaaccctcctttttccctccactcctctctccctcatatttctctctctctctcactctctctctctccctccctccctccttccctcccaagattattttctttccccttctgagtagaactgtagcatccacactttggtgtggtcttccttcttcttaggtttcatatggtctatgagttgtaccatggctattctgagctctttttttgtggctaatatccacttatcagtgagtacataccatgtgtgtggttttttttttgtgtgtgtgtgactgggttacctcctttgcctgcagatttcatgaagtaattgttcttaatatgtgagcagtactccaatgtgtagatatacctacagagtacacatggggggtaccatggctctaggataagtagcagaggattgccttatctggcatctatgggacgggagtcccttggtcctgtggaggctcaatgacccagcataggggactgctagggagctgaggtgggaataggagggcaggtgggggagcaccctcattgaggcagggagtcaggggagggaataggggggttgtggaagtgagaatggggaaggggataacatttgaaatgtaaataaataaaataaccaataaaaatatgaaaaaaataattggcttgtgttgagatcaaaaagaaagaaagaaatataaatgctaaattatgagaatataaattttcttaagagtccatactttaatttgtcagccaaaaccatgaattgagattcagatctgtcttttacatgaaagaatagggaagcctggggaatttattctctagaggtaagctcagggaaattaaatgacataaatccttaacattcttggctatacctctctgtcttagtcagggttttactgctgtgaacagacaccgtgaccaaggcaagtcttataaaaacaacatttaattggggctggcttacaggttcagaggttcagtccattatcattaaggtgggagcatggcagcatccaggcaggcatggcacaggcagagctgagagttctacatcttcatccaaaggctgctagtggaagactaacttccaggcaactgggtgagagtcttaaacccacacccatagtgacacatctattccatcaaggccacacctccacagggtgccactccctggtccaaaaatatacaaaccatcacacctctctaattttacaccactgattaactatacccaaagtgtattctaacttttttcttttatgccccacagtttgtccattttcacttatatggctattacatcaatgcaaacccctgttccctcacactcaggctataatattctccatatgctgagaatatagggaataagacctagaagctaaaggtgaagagctatagaatgtagtgacaattgccaaaatagatcttgacatgctacaaaaataccacagtggtatctattacattgagaatacacatgatgttgacagaacccagtaagcagtcagcataattgtactaaagtgttgtgattcacacacacagaaatacacacaaatatgcctactttgttcttgaaatgcaactgtatcccatgtttaataggtttcttgttggttttaagtaaacactgtttataaaaagtttccttctagccaagtgtagtggctattcctggttgtcagcttgactaaatctggaatgaactacaatccagaattgagtttctgacctggatcttggcatggagatattgaggcatagtgtctgtgaattccagaagattaagacagggagatctctgagttcaaggtcatctgggattaaaaaggcatggtggcagacacctttaatctgagctacaccttctgctggagacctatataaggacattggaagaaggaagattgactctctctcttctttacctgctttccttatgggactgagcaactgctagatccttggactttccattcacagctgctgctgaccattgttgggagttggactacagactgtaagccattaacaattaccttactatgtagagactacccataagttctgtgactcgagacccctgactaatataccatgtatagtggtacacatcattactcctagtgcttgattgtcaaaggcatttcaattggaactctgagttcaggggcagtctgttctacataagtatttccaggtcagccagggatatataatgagactttgtctaaacaaaaatcctgtttctatattgtttgtaattaaaattgaatggtatcaaatattttaccagtacttaaccccctatctattcattcatatatcatattttgagcaccctttttcctattcccatcttcttcctagaacctcctattccaattcctaaccaactttatattctctctctctctctctctctctctctctctctctctctctctctctcaaaaagaaatacaaaaatgaaaaccaaatcaaaactgggtagtggttgcacatgccttatattccagtactcaggaggttgaaacaagtggatctctgtgagttctaggccagcctggtcatcagagtgagctccaggacagtcagagttagacagagaaaccctgtctcaaaaaacccaaaaagaagagaaggagaaggaggaggaggaggaggaggaggaggaggaggaggaggaggaggaggaggaggaatgaaaacagtcaaaacatacatcagtaagacaaaaaaatgctaaaatgaaaatagtaaacaaacacacattaaaaacatagagtttattttgtgttggtcaggttatccttagtatgggccctgccctgcagtatggttgatatacccagtgacattctatagaggaaaactgatttttccatttgccaacaggtatcaattgcaaataacttcttggttaggggtagagctctgtttcaatttctccctctcagtgatttccccccagattgaacttgttcttattcatgctataacagtccctttgagttcctctgttcatcagttctgttatgtctggaagatactgtttacttggaggcatccatcacctagcttacaatctttcagcttcttcttccacatagttcctgagccttgagagggaggaagttgataaatacacaccatttaggattgagtattctaaagtgtcccactctgagcacattgtctagttgtggatctctgtgttagttcccatctactccacgaagaagcttctctgataaggcttgagtgaggcactgatcataaaacagtatgtcattaggagtcattctgttgctatgttcctttagcagaataatattagatattcccctaagcccatgacctatctagtctcaggttcttggccactttagcagtgtcaggtatggattccatttcatggagtggaccataaatatactttttaatgctgtaatatttgtgtcactattgcaccaatatatcttgcaggcaagtctcagtcataggtcacagggtttatggctgtgtgatactcaggattaccttcctttttcagtaggtgtgcagagtatgttccagcaccatgaacactaatcagtaggaatgaagcttctattagggcaccagctcaacttcttcatgttgattgacattaaggaagtgctgtcttcagaagaaaaaaaaatgcctttccatcatgttgtagaaagcaaccaataaccttgtcaatagcctgtgatacttggtggagggtgtccataggacccctttggttaagtactcaatgaatcctggtattggaagttttacttggtggcataaggtgtctaatttacttattgtctccaccattttatggtggctccatttagattcctttcataattacatatgttttaggaagctgcacagattcagaaaagcaagatttaagggattctcaattttactactgcagagggttttatttattctttgaaaagttcatacttgtatacaccacattttgatcatatctacctccacttactccaactactcttgtctctaccactatcttctttctttttttaaagaaaatataactctctaagtaaaaaaattaatgctacccaaatgtgcatggatgtgaaaccattcaatgaaacatggtcagcatacaaagggccacatccttgaaacaaaactctcttccaaaagccttgcagtcagggagtgcaatataaatgtctcatttagggctaagcattccacaggcaaattctgtgtacttggacaagttgcatattaaccactaccactgtaaaataagctactctgatgaagattgaaagttcatctaatatatgggaatagaggtaggtagaatgcaatttgatactatgtaaattcataaaaattatagtggcaggttcaccctagtgtctgtgatctcactagtcatggattttagacaagatttgcagtaccaaatgtgaatttcctagctgtggaatagaccttaaaaccaatcgaaaagcatttggttactcccatattattcatagaaatattacatccacagttctattttgccaagctgattagcagagtaaactcaagagtccacagtaagactgctggtgacctacatggcacctgtcttagttagtgttacaattgctgtgatgaaacattatgaccaaagcaacttgggaaggaaagggtttatttggctacacttccacattgtagtccatcattcaaggaagtcaggacaggaactcaagcagggcaggaacatggaagcaggagctgatgcagaggtcatgggcagggggtgggcctgctgcttactggcttcctccccatgacttcctcagcctgcctgctcccttcccctccctctctcttacatctcttacatttcaaattttgttcccttcctggtctcccctccacaatgcctccccccatcccatccctttcccctttgcctctaaaagggtgcttccccacccattcattcagcctcgctcctctagcgttcctctatgctggggcagggtcttagtcggggtttctattcctgcacaaacaccatgaccaagaagcaagctggggaggaaagggtttatttggcttacacttccatactgctgttcatcactaaaggaagtcaggactggaactcaagcaggtcaggaagaaggagctgatgcagaggccatggagggatgttacttactggcttgcttcccctggcttgctcagcctgctctcttatagaaccaagactaccagcccagagatggtcccacccacaaagagcctttcccccttgatcactaattgagaaaatgccttacagctggatctcatggaggcatttcctcaactgaagctcctttctctgtgataactccagctgtgtcaagttgacacaaaactagccaatacaggcattgagccttcacaggaacaagggcttctcctccaattgatgccctacaaggccatactctgctacatatgcagctggagacatggtcccatccatgtactctttggttggtggttttgtccctgggagctcttaagattctggttagttatattgttgttcttcctatggggttgcaatcttcttcagcgccttcagttcttcccctaactcttccattggtgttcctgagctcagtccaatggttagctgtatctgcatctgattcagtcaggtgttgacagagcctcttaggggacagctataccaggctcctgtcagcaagtacttcttggcatcaacaatggagtcagggtttggtgtctgtacatgggatggatcccaaggtggggtagtctctgtatagcctttccttcagtctctgctccattttttgtccctgtgtttcctttagaaaagaacaattctgggttaaaaattttgagatgggtgaatggcctcatcccctctactgggtgccatacctatctattggaggtagcctcttcagttcctatctcccctcttttgggtatttctgctaatgtcatgccagttgggtcctgggaacctctcgcttccctggtgtctggtactttctagtagtcccccccccactctccaccccccactgctacatatttctaatcattctcctgaccctctgggctttgctcctgtctcttctgatgcctgatcctgccccctttttccctccaagcctcctttcttatagagcccagggatagcatcacccaccaatggactggtccctcccccatcaatcactaattaagaaaatgtcatacagttgatcttatggaggcattttctgaattgaaattccctcctctcagatgactctagcctgtgtcaagataacataaaacacagcaccttccagtgctctgaaacctagccaacagtgagtgagcttccatgtagataccaacttgttttctctaggccttgcaaccaaagtgtgtgatgtcttcagcaacatgatcttaccataaaagtggatagcaatgtcaagagcttggattggattggtatagaagagtctctaggatgcccacctaataaacactcaaagaaagttatcccacatctggcactggaagaagcatagcacccatgtagaataactccatttaaacttctctttccatccccctaccactttgtgtctgtctgcttctccctcagggtactcagggctgttacacactaagctgaactggagggacggaacttagacagactagggtgggtgtagtacaggtcttggttggcaatgagtgtgtgggcaaagaatacatccaggagcagcttttggagaactgtttccatttactggggggaaaggggaatatttatgcccctggggaagtagtcagggtctctgaggcaagctttgtgtggccacgtacagttggccaaggtaggagtacaaggagtgaggctgaataaattcttactagggttgatggtggggcagctgactttatggtgtcaggttgggagtgggggttagccaagttctgccatcctcatttgaggtatctgggattggagaacctttgactctctgtaatcctgggccatttcagtcccacagctcctttctgttgttttattaaaacaacaacaacaacatcaccatagtcaacatgttttgggaatggttttgtattgaaccagaacttagttggtagcgacattggcaatattgcttacttactgttttagaaaatagatgaaacaggaagccagtaggagaagagtcccaatagccagtatgtggccgaggaggtgaaaaagccaagcctccagaggatttaagtatcaagatgtggtacctgaggcatagcaagctcaaagagctcaaagatctcagaaatctcactggggatccttaagcaccagtatgttttgttctattaacccaggttcattaacataaaaatagcattgttcccccagtacaacacaagtacctccttgttcagcccttagtaagtccagagttcttcaattttgcagaacaatcccctttggggaagtgatctgtcaatggagcgactcaagacatggcttcatggtggaagccgtggcctggtcaagcttatctggaagtcactggccaaatggtgtgtttggatgaggggtggttccatggcacccagtgagatggtgtcttagtcagggtttctattcctgcacaaacctcatgaccaagaagcagttgggaaggaaagggtttattcagcttacatttccacattgctgttcatcactgaaagaagtcaggactagaactcaagctggtcagggagcaggagctgatgcagaggccatggagggatgttctttactggcttgcttcccctggcttgctcagcctgctctcttatagaacccaagactaccagtccagtaatggtcccacccacaaggggcctttcccccttgatcactaattgggaaaatgccttacagctggatctcatggaggcatttcctcaactgaagctcctttctctgtgataactccagctgtgtcaagttgacacaaaactagccagtacagatggtgagcacaatgatgagcagagggatgaagacctctcttttctttcagccccctctaggttgcaaggtgagttcttcaggttcatagagataaacctggggaacgatcattatgggaatgcagaatcctttaaaagggggtttaatacaggaactgataatattattgcaccagagaaagtggggagaggggatgttaacacatattgacttgttgacattgatgttacaggaacaagctggataggaccttgaggaagactctaggaggcaaaatggggaaggctaaatttaaaaagaggaatgttttgtaacttttgtggataaggcctcatggggttcgtgaaacaagatgttaatgggaatagctgccaataattagcaggagagagaagcacagaaaaaggcattgagaggagttagggtaggtggttaggggaaggaggtaggcatataaatatatatatatatatatatatatatatatatatatatatatatatatatatatataaccggagagggtagcttggatctccttttgtgtttgatcgtcctgttgaagaatgttaacatgggcaaagacttacaggcagggatgagcgagtgggagatgtgtacatcagctacagggtatttggtatcactattagggtagagcttacccacaacttccattcatcattgttggtctcagggatcactgatggaaaactggaaaagcgtattaaagttggtgagcatggtgccaccacagcttgtggattcagtgttggcatctcaaatatctgaaacctttatatatggaggcctcctgcaggcagtcatctgtgttgcagtaaggaaagcagaagaaagctctatgggtattggagatgggattaggtataaagaaatctcaatcttggtccagcatccttcaagtgaatagtcctgggttcctataattttattgtgtctgttataggtctccctagcaaagaattacccattgtgggtattgggagggttaggaagaggctggccagtagcagagttagaatgaagaacagcaaagatagccatgggggctggagagatggcacagcagttaaaagcactgactgctcttccaaaggctctgagttcaaatcccagcaaccacatgatggctcacaaccatctgtaatgagatctgatgccctcttctggtgtgtctgaagacagctacagtgtacttacatataataataaatctttgagccggatgctagtgcctggcaaatacagaagtagatgctcacagtcatctataggatggaacacagggcccccaatggaggagcaagagaaactacccaaggagctgaaggggtctgcaaccaaataggtggaacaacaatatgaactaaccagtacccccagagctcatgtctctagctgcatatgtagcagaagatggcctagtcggccatcattgggaagagaggccccttggtcttgcaaactttatatgccccagtacaagggaataccagggccaagaactggaagtgagtgggtaggggagcagggtggggggagggtataggggacttttgggatagcatgtgaaatgtaaatgaagaacatacctaataaaaaaaattaaaaaaaaaatctttgagccggaacgagcagaggtcctgagttcaattcccagcaaccacatgatggctcacaaccatctgtacagctacagtgtactcatatacataaaataaacaaataaatctttttaaaaaatcaaagacggccataaaaatggaagaaagggaagcctgtggaggtcatgtggcctgggcggctgccactacctcataaatgtccttccagaagatcttgtttgttagtggcacctcctccacctccttggtccttgacctgccagtaagagtcaagccatcttgatggtcaataggatggtgttggacatttctggctaggaccaaatagtcttggactagtcctgtataaagacacaagagccccatgccatcttgggcacaaactcagtgttttgggaacaaaaaaaggggggaccctggggatgccctggggaagaaggggaaggaaagggggccaaacgtctggccagagttcctgtgctctgggcaggtggatgcaggcagagctgctggacacttttccacttggccccgggtgagcatgcttgacccatgaggcgggggtggagaagaggcaaaacccgaccaggaactccaaggtgacaccctgtcgccccagggttataggagagagggatgaggaaaggagttcccaacactggcgagagtgactcagaggatctagatggagcagagactctctatgatttaagagctgtattatagaaaagcagagtgagggggggagaaagagagagagagagagagagagagagagagagagagagagaagacaaagagaaaaggaaaaggagagagaagtgagtgagagataaaggaacgaaggagtaagagtaagagcgtcagttgggggctgaacagccctttttatggactttactgttgctaagtaactggagaggagtttagccttaaggtcagaagcttgggccattgcttatgtgactactgaccatgcttctcttgtggggcctgtgggaggtggtaccttaggcaggggccagagttctaggagcatgagggaacgcctaccttgtcatgaaggtgaattatgaccattggggttaagacctcaactcaactggataccagtctgcaattccccatatcagcggagagtacccaggtccccagaagactctccacactgcagaagcctagcacacccagatcactggtgagtggaacgcaacatctgttccaaaaaacccagagggtcttgtgccagcaggaacagggacaaaggaaacccacccaaccagtgagtgggattcgttctggtggctccagccccacacctacttgggtgcgaactcggctggcctgaggaaatccaaaacatcatcagatcctactacaaaaggctatactaaaaaaactggaaaacctgcatgaaatggacacatttctagacacataccaggtaccaaaggtaaatgaggatcagattaatgacctaaaaagtcccatatcccctaaagaaataaagcagtcatcaatagtctcctaaccaaaaaaagcccaggaccagatgggtttagtgcagagttctatcagaccttcaaagaaaacctagttcctattctcctcaaactattccacaagatagaaaaagaaggaacactacccaattcattctatgaagccacaatttctctgatacctaaaccacagaaagatccaacaaagatagagaacttcagaccaatttcccttatgaatctcggtgcaaaaatgctcaataaaattcttgcaaaccgaatccaataacacattaaaatgatcatccatcataatcaagtaggtttcattccattaatgcagggatggtttaatatatggaaatccatcaacataatccactatatgaacaaactcaaagacaaaaaccacatgatcatctcattagatgctgagaaagcatttgacaaaatccaatacccattcatgttaaagtcttggaaatatcagaaattcaaggaccatacctaaacataataaaatcaatatacagcaaaacaatagccaacatcaaactaaatggagagaaacttgaagcaatcccactaaaatcagggactagacaaggctgctcactttctccctacctattcaatatagtacttgaaatcctagcctgagcaattagacaacaaaaggagatgaaggggatacaaattggaaagaaagaagtcaaaatatcactatttgcagatgatatgatagcatatatgtgaccctaaaaattccatcagagaactcctaaacctgataaacagcttcagttcaatagctggatataaaattagctgaaacaaatcagtggcctttctctacacaaaggataaacaggctgagaaataaattagggaaacaacacccttcacaatagtcacaaataatctaaaataccttggtgtgactctaactaaggaagtgaaagatctgtatgataggaacttcaagtctctgaagaaagaaatcgaggaagatctcagaagatggaaagatctcccatgctcatggattggcaggattaatatagtcaaaatggctatattgccaaaagcaatctacagattcaatgcaatccctatcaaaattccaactcaattcttcaaggagttagaaaaggcaatttgcaaattcatctggaataacaaaaaacctatgatagcaaaaactattctcaaagataaaagaacctctagtggaatcaccatgcctaaattcaagctgtactacagagcaattgtgataacaactgcatgacatctatacagtgacaggcatatagatcaatagaataggtttgaagacccagaaatgaacccacatacctatggtctcttgatctttgacaaaggagctaaaaccatccagtggaagaaagacagcattttcaacaaatggtgctggcacaactgatgtttatcatgtagaagaatgcaaattgatccattcttatttccttgtacaaagctcaagtctaaatggatctaggaactccacataaaaccagagacactgaaactaatagaggggaaattggggaaaagccttgaagatatgggcacaagggaaaaattcctgaacagaacagcaatggcttgtgctctaagatcaagaatcaacaaatcgcacctcataaaattgcaaagctgctctgtaaggcaaaagacactgtcaataagacaaaaaggccaccaacagattgggaaaggatctttaccaatcctaaatctgataggggactaatatccaatatgtacaaagggctcaagaagctggactccaggaaatcaaatacccctatttaaaaatgaggtacagagtttaaacaaagaattctcaataccaaatgcctgagaagcacctgaaaaaatgttcaacatcattaatcatcagggaaatgcaaatcaaaacaaccctgagattccacctcagaccagtcacaatggctaagatcaaaaattcaggtgacagcagatgttgtcgaggatgttttgaaagaggaacactcctccattgctgatgggattgcaagcttgtacaaccactctggaaatcagtctggcagttcctcagaaaactggacttaatactaccagaagatccagcaatacctctcctgggcatatacccagaagatgttcctactggtaataaggacacatgctccactatgttcatagcagccttatttataatagccagaagctggaaagaacccagatgtccctcaacagaagaatggatacagaaaatatattttaaatggacaaatggatacagaaaatatttacacaatgtagcactactcagctattaaaaacaatgaatttgtgaaattcttgggcaaatgggtggatctggaggatatcatcctaagtgaggtaacccaatcacaaaagaagtcattagatatgcactcactgataagtggatattagcccagaaacctagaatacccaagatacaatttgcaaaacacaagaaaatcaagacggaagaccaatgcatggatacttcattcgtccctaaaatagggaacaaactacccatgaaaggagttacagagacagtttggagctgagacgaaaggatggaccatctagagactgccccatccaggggtccatcccataatcagccaccaaatgcagacactattgcatatgcccgcaagattttgctcaaaggaccctgatatagctgtctcgtgtgaggctatgccagtgcctggcaaatacagaagaggatgctcacagtcatctattggatggaacacaggggcccctaatggaggagctagagaaagtacccaaggagctgaaggggtctgcaaccctataggtggaacaacaaaatggactaaccagtacccccagagctcgtgtctgtagctgcatatgtagcagaaaatggtctagttggccatcattggtaagagaggccccttggtcttgcaaactttatatgtcccagtacaggggaatgctagggtcaggaagtgggattgggtgggtaagggagcagggcaggaggagggtataggggactttggagaaagcatttgaaatgtaaatgaagtaaatatctaatttaaaaacacacatgaaaaaccctttccatttataaggtacgggtctggtccctttcaaatcccatccaagagatggtgacattgcaccaggattgtaggagttacccctggtgagtgctaatggagggagatagggagatgtttgaagctcttgtagatattaaatatatttaggttagtcagagccatcattaattttatgttaaggtgtatcttttgtttgtttgtttgttttttaagttaggcttttagcatttgatgttttctttatgttataccatgtccctgtgggttgtgaagatccctgagtaatgggaaatttcccattgtgagccaaaggttttgaattggaagttggtaaaggcagggccattatcagttttcaatatgttaagaagtacccatgactgtaaatgtaacttttattctcctgatgtaattgttgcctcaggggcttactgccttcatctgctatcctaggcttagtcctgacagcttctagcctccatacaatctaggcctagaattttttcagcctttggaccttacttctaaataagctcaccctttcttgttctttctgagctctatctgcctgaatcaactcagctgttcaggctcaaactcctcttcaagctgacggattcaatctggcttttctctctctttttctttttccctgtctctttctttttctcggcctttcatcaattgttctgcttgccctcaaactaactctagaagtctattcttttttttttcataacattaatatttattgctttatatgaatactgtattgaaagcccaagcattcagttacacacgaaattatacaattatataccgcttcacaaaggcagtgaacacattacagtctacaaaacctactttacagaaatttaaaaattctaaatatcaaaaagtacagctgaagaaacaggtataaatttggcagccagtaattctgacagggaagttgcagcttgcatgactttaaatatgtgaatttgaaaatattgagtttatagagtagtaaccattgtgctttgtgttgatctgaaaaatataacactggctgttgaagaagcatgttcaaaaatattaattcacttcaaaatgttatacagatcatggtggtttctgtgcacccctaacgcctcggtcattttagctcaggtacattactgaagtcctctactaattcttccagtacagtgatgtttcacaccagtgccatgcggcatataggattattcagaaagacagatgtgatgttgacagtgttcagaaaagcaaccgaatgttatgggacctgtgggctcttgagatggtttcatgtcaggctccgaagcactcattctacagacagcaagctaatgcttgagcacaactcccaagataaagcacactttccataaataaatgaagtcttgttgtctcaggcaccttagaagtatacaaaagaatttagtttgcacagatctcttggaatgtgtttaacctggtatttcaacagactgaaagattcccaggatctcacaggggccagatttttgtctcaactactcagaagagaagatgtcttctgaaagaagtgaactcagtcattaccaataaaaaagtattcactgtattcatctcttatagaaacagaaaaatataacaccccccctcaggataatctatatatgtatatatgacttaaggttccattgtacagtcgaacaataaaaatctgaaaccacatgaaaccctattaattcacgttaacatgtttaaactatgaccaaaatatggaaactgctagagacaagacaaaaatcttccttgtgtatgtataaaccaagtgagatcatctttaaagttttcaaaattataattatcttccagtttaaaaacttttattctaaattaaaaaaaaatctatacacaaaccactgatttgagtacaccaggaaaaaagcaaacaaaaaaccaaaccaaacaagaaaatcagcactaagtgggacccagaggagccgtactcacagctcttccacatacaaccttcagggtttattcttaaggttctttattttacagcctgtttctcttgtaaaactaaaggtccactttattacttaaaagtcttatacagtgtaaaaccagaactgtatgtaaaatactgcctctaagtgtttttaagtagttagtcttgttccattgggtcatctgtgacttctgtggcttcctcattctccatggacgacggcactgacacactttctccggtcttactggaaggaggccctcctgactcctgtgtctccaggcagtcagagccactccttgaggcccctgcactgtcactcctttctgaagtggagtctgtctgagctggagacacaccagagccttccatctgatggctctcctctgaagtctcttcattcacagttaaggtgtcatcagattccttttcttgattttttctttctgggaccatttctcttggtgtcataaacgattcttcctcctcctcttcctcttcttcttcctcctcctcctcctcttctgtacagtgctgcctggttcgactttctctgtccttgtcaggagggggaattgctgtttccgtttcctctgctctaactgaagagacttcaccagacaccgtttggctagctgtctctctgacgtcaccttctttgtcaaacttcagtcttttcacctcatgttcctcagactccacagcatcttcatctggatgtttatttttaacagggctcagtaaggaaacttctgattcagaggctgaagaatcactgtggcctttctcttcacttagctgcagctcagaatctttgctatctgtgctctcaggcaaaccatttgttgtcaagggggctgacaaagaaagctttggtcgattaagtggcctaggtgttccaggcccgtttatattagacctgtcagtatagtttggtgagtttccaggaaacataacaccattcattctatttaagctattagaattgttcttctctgaggatggacaaacgcagctaacaaccatcacattcttctctactcctctgagaaacttgtccctgtataatttcttcttggatcggttagcaattcacatagccgctgaatagtaaaagggataccattaaatccagtgacaattttcagtattcttcccttcatttcatcaaagggaatatattcaacattaggattgggaggacctcttggttcaggagctgaagttctgaaatcatccatcactttctccagtttgaaaatgaaatagcctttaaattgggaccactgaatcattgtttctccagttttagctacatgacagagaaactgatccagtacaggacaaaattcctttttccctctcttctcaaaatctttcagcacctcctgcagcctctcgacgtccatggcgccgcgcagtcccggccgccgtcccgggggccgcggcgcccgcccccgcccccccggacgcccgcccccgccctccgccctcgcacacactccgccacacgccggcgaccggggaggggggtcccgaagggagccggggcggggggaagcgagagacggagcgagacggacagagcgagaacctccccgagacgctacctagaagtctattcttatcttctggttccttctcactctgtggctcattctctctttacctatatctagtttgttctctctacacaatctgtctctgtacaactctcacagtaaaactgtctttctcctctctcttttctcaacttgagagttaggttttgaggaagaaaagtgtgggtttaagaggtcattttgaggtgagggaaatttccattcccaagaatgtgatgggtgtaataagctgtatttgatgaggagctattttgaattctagagaggatagggaacttattaactgatctttaaagttgggaggggaaggtgggtccttactgagtccttagtctaagtaaggtttaaatgtagtggccaaggcctcttgtcagatagtggaaatgtcagcaattctcagaagaactgtccatttatatcacaaggccaatccagtgttgttaatgaggtatactgaaaatgcaaagcattcgctatcttgagggtggagagaaatagaaaaaaagcagtccttagtatctatcgccaagagagggacattagcaaggatgggtgagacatggggcagccctcttgggggagaattattagttaggaggatttattagttgctcttaaatcttgtggtagtcttcaccccctgagctcatttttatagaaaacataggggttttgcctgaactgctggacgggtgagtatattggagtagagccactcttttactataagttgcgtaagtgcttcaaatttctcccttgatagaggccattgttcaactcaaatgaactcgttagaaaaccagtcaaggcagggaatattaaatttaacaatggctcttcagattcggggtgatttggaagggggtctttaagaatttgggagtataatttttatgggtataatcatctagcctgatgcaattcctttctggttgggtgtgtctgcttcaccgctggggtgtcagcacgccttcagcaagctgctcaggggaggtagaacagagaccatgataggggtcccagcccatgtttctctgggtaagaaacagtggggtctggaatagatactgtggttcctggtctcctgtgtacctctatgccactggtataccactaggagttggaagcaggggccgtgctttcccttagggcatctatgcaccaggcaggaagggaatggctgagcctgggatgggtgtggaatccagtttggttcagattgagtgccaagagtagggaggggctgatacagagaaagccttctctgggagatttaggtgtggctctttacaataaagcccccacccacccacccccaggcaatccttgttgaaggagagagtccttgcctatccagactgctttatttgatagaggatatgaatgtatacaccttacttgggtactcggggtgaaccaaagattaaataccttttgcaggaaggaatgcccaggaagggaatctcattggccaaacactcagggcctatctagatgccccattaacatggaaaactccaggtttttatgctgtgtgactgactgttgtggtcctctcagtgaagtgtcatggttacatgttccagatcaggtagtttgccagggagttggttccacacctgccgttctcaattctgagattacccagggtttgaacctgctcacctttactagttcttctgtctggtggcatgatccacttgcaccacagttgactagcaagtaccacttctagggcttctgaaatatctctccccagaagtttggtgatagtgttggttattagagggtgtattagactggtagctctatcagggtctataggcttgcttagtgataaaaagcataggagctgccccctcttctaaaagctgggacctgggaattagctgcctattttatggaatctcttgtctcaaaattgtcttgtcttccacagtatcattaaggtatttgaattgcttctcatctatttttatgatgacttttgggtggaagttctctgagatgctggatacccataaagcctctatggaaatagttttcccttttactgtcagggatgagggctgacctgttttaaatttaaaagttttagttgttctccacctttatcatatcagagagacaacctttttaccagtggaagtctttgtagcatcaggggcagactgtcttactgacattggggtccctcggggggaaattcttttttggatattcatttttccaatgttgttttttgttatatttaaagcagatcccttctgtttttattgatgctgccaaggcctgagctacaaaatccacctgatatgatattgttcctgtcttgggtagccacaagccatctatcatagtattctattcatttttgagcccttggcaggccagcatgaactcagaagtcataccctcccaaatgttgtttttaagaaggagttctctggctacagggtaaggaatttctgtctctaagctcattttagttctaagaataaagtcacagagagctcctctggcttttggtggaggaaaagcatggagaaggcagggtcttgtgagccggagaggggtggggtgattctgtcccaggcttggagcaagcagaggcacgcctgatctaaaataccccactggctgtgctgtttgttgggttcctgtggaaaatgctccctggccaaaatgttaattaaagcctcatgggatgtcatctcggccctgattccacctgacttgttggaggcatttgtcccagaagagagccttccattgtagggtgattgggcctttgcagtcccccccccacacacacacaccatatttttcaagcacccctagtgttagttatccctccctaccctctcttctaccctacagttctgtctccctatttgaacccaatcctccaatattgttctttccccttcacaatacacatcttctactattctccttcccatatgttctctccccgcctaataatagctgttctaatcagaacctatcataatgttctgttctgcttttcttcttcttcccgctatcattaaaattggtaattgacatataatttacagacagctaaattcccatggtggcaacaggaacaagaaaaaaagtaaaggcagggccacactctttcatcacttgtccctcaaatgcaaaataggttggtaccaggaggaaaggtttggttcaggggaatccaagctaataaagtgtgcagaaggaaaaatatatctggagtgtatgacagaacatgccagttctgcttattaacatagtcctcatcttcagatacacagaggctacaacagttacattttatgtcatctggtggttttcccactccccagactgctgtgctagtttatatagaaacgaagcaataatgtattacaaaaggaaatatgcccaaattgtcaaattttcataatttttgagatacaaacatttctaatcttttctaaatgtttcttgatgatgccaaaccccaccaggaataaaacaaaaggaaattaagatgcaaaggaacatctgtcctcctgagtttatcggcactatacctagaacagccaggaaaatgaatcaacattatctagcaactgaccaatgcataaagaaagattactccgtagaatgtccttcagcatcaagtatgaagttacctcatttaaggcaatatgaatggaattggaggacaccaatttaagtaactggctaggtacaaaaagctaagttatcatggtggcaaaagaaatgaaaagtaaaacaaaacaaaaacaaacaaacaaacaaaaaacagaagctagatcacatattccatcacctgtccccaaagataaaacaagttggtaggaaggtgacttatcagacttcctgtcccgagggagagagtttcctgcagaacgaggagctgcaagcatgtgccatcttgcctcttggaggctcaacaaatttcacctattcagtactgttagagcaattatttaacttcaatatgagttttactaagaaatattcacacaataggtaaatccttttcagatgtttagtttgcagtttcttttttctcactttgtacattgccctttaattctgttgcttcctttgttgtacaaagctttacattttgatgtgattccacttgtgtatttttggttttgtggtctgcctgtggcttttgatgtgatacccaaaataacttcccataaacatatcaacaaatattttctgggctggtgagatggctcagcaggtaagagcactgactgttcttccaaaggtactgagttcaattcccagcaaccacatggtggctcacaactatctgtaacgagatctggtgccctcttctggagtgtctgaagacagctacagtgtacttacatataataaataaataaatcttaaaaaaaaaatttcctcctgaattttcttccaggtttatagttcctggtcttatttgtaggctattaatggtttttttttcagttgcttttcacttttttcccaagacagggttctttgtgtagcctgggactcactatatagaccaggctgaacttgaactcacagagatctgccagcctttgccttctgagtgctgggattaaaggtgcgtgccaccaccattcagtttatggggtttttttttttacatgtattttaagtaaatatcccaatttcaattttctatgtgttagatatttagtttacccaatactatttataggagaaactaatttttcctcaatgtgtgttcttggcatccttctatatttaaaaatctggtaatgataaacacataaatttattcatgtttttatattagttactgtgctggcaaattatatatcaacatgacacaagctagagtcatctgagagtaagaatcctcaatggagaaatgcttccataacattagtctataggcaggcagagccatatatcaacatgacacaagctagagttgtctgagaggaagaaacctcaattgagaaatgctgccataacattaggctataggcaggcagagcaattggggcattttcttaattagtgagtgatgggggaagacccagcccattgtggatgtagacagccctagtctggtggccctgggttctataaaaaaaagaagaatgagcaagctttgaggagcattacagtaaacactcatccacagcctctgtatcagatccttcatctagtttcctgctttgactttcttccctgactacccccagtaacagaatatgatctgagagttgaaagattaaataaatcccttactccccacggttttttataatcatggtatttcattacaacaatagaaatcctaagacatttacttttctcctcactataatgaaatatctgaaaaaaggaacttatgagaataaggatttattttggctcacagttcagagggatgtagttcaacattacagggaatgcataatgacaaaagtctatagtgagtcttagtctctctctctctctttctctctctctctctctctctctctctctctctgtgtgtgtgtgtgtgtgtgagagagagagagagagagagagagagagagagagagagagagagaggtaggcctcataaagatactttgttaatcaaatcaatttgatgattgatattaagtattacactgttctggtagataatgtgtctatttttatgtcagtaccatattatttggactgatatagccttgcaatgtattaaaatcaggaagtgagagataaattctttttttgaattattagacatcttcttcatttacagttcaaatgctatcccctttcctagtttcctctccgaaaatcccctataccctcccccctccccctgctccccaacccacccactcctgcttcctgaccctggtattcccctatactggggcatagaaccttcacaagaccaagggcctctcctcccattgatggccaactaggccatcctctgctatatatgcagctagagacacgagctctgggggtattggttatttcatattgttgttcctcctatatggttgcaaacccctttaactccttgggtactttatctagctcctccattgggggccctgtgtcccatccaatagatgactatgagcatccacttctgtatttgccaggcaccagcatagcatgaggtattcttttggcactgtttcttgacaatttttattatgaatagatgttgactgttttgcttgggttgaggagttttgttgctggttttgttttgtttcgttttgtttgagactgggcttttctgtgaagtcctaactgtactggaactccctctgtacaccaggctggccttggattcaaagagatctgcctgcctctgcctctgcctctgcctctgcctctgcctctgcctctgcctctgcctctgcctctccctctgcctctgcctctgcctctgcccctgcccctgcccctgccccctgccccctgccccctgccccctgccccctgccccctgccccctgccccctgccccctgccccctgccccctgccccctgccccctgcctctgcctctttccccagtgtgctgggattgaaggtgtgcaccactatggattttgattggctttctgtaatggtcatcatctgttacaaagagaaatttccttgatgaatggtgaaaactacacttatctgtaggtatatgaaaaatgtttatgaattgttgttagggattctgttggtttaataatgtagtggttgtagattctcctccaataatagtacttcactagcactgagcagttttcatggtttcctttttgctgagagggtcttaagtccaattagagagcttttggttaccattaaggtatgcctgccaatactgcagggacccttagggttattgtgcaatctaagaattgaagtagttcatgggcataataggtaagactgttggttgcctccctcctttagacgcatgcatggtgccttctggtactatgaaagctagtcctcatggaggggacattcagatcacttccaggttaggagtctcctggccctgtttctgaactgatgctgttgtcctcagcaatggggaattaccttctaggtccaaccaaggtcaacagcaatagactgtatgttttggagtctcttgggttaggctacacttttaaagaaagctgatagttctatggctaggggtaataattcatgtccacgtcacttctccaggatgaaattttgtctgacttaaacttgaataggtcttgtgtatgctgacacaatactaagagagtttatatgtgtaactgtcctgctgtgtccagaagacacagtgtcttcaatttctagctttttagttattctatctacttttccatcataatccctgagctaagaggagtggcacaatatacatacatacatacatacatacatacatacatacatacatacatacatacatgttctacagggttacacactccgcagtcttttattctctgcagcttggcaaggcaaaaggtacttggcctgacaatgtagatagagtgtggtttaatattgtagaaaaggcattatattgaagcataaagtggttggttacttatataaagtttatgccactattaaactagtggaaaaaaatcatgctaaaccagtcactattgttgatcagagggctcatagctgggtaagatagttgattttctgccatggcagtgtgcatagaacattctatcactgtgaaaaatagctttcatagttatggtttccattgctatgaagagacacaatgaccaaggaaactcttttttttaaaacaatttttattagatattttcttcatttacatttcaaatgctatcccaaaagttccttataccctcccccgccctgctcgacaacccacccactcctgattcctggccctggcattcccctgtattggggcatataatcgttgcaagaccaagggtctctcctcccattgatggccaactaggccatcctctgctacatatgcaactagagacacagctctgcgggagtactgattagttcatattattgttccacctatagggttgcagaccccttcagctgcttgggtactttctataactcctccattggggaccctgtgttccctccaatagatgactgtgagcatcctcttctgtatttgccagacactggcatagcctcacaagagacagctatatcagggtcctttcagcaaactcttgctgacataggcaatagtgtctgcattttggtggctgattatgggatggatcctggggtggggcagtctctggatggtccatcctttcgtctcagctccaaacttcatctatgtaactccttcatgggtattttgttccctattccagggacaaatgaagtatccacgcaatggtcttccttcttgattttcttgtgttttgcaaattgtatcttgggaattctaggtttctgggctaatatccacttatcagtgagtacatatcaagtgacttcttttgtgattgagttacctcattcaagatgatatcctccagatccatccattggcctaagaatttcataaattcattgtttttaaatacctgagtagtactccattgtataaatataccacattttctgtatccattcctctgttgagggacatctgggttctttccagcttctggctattgtacataaggctgctatgaacatagtggagcatgtgtccttattacctgtaggaacatttctgggtatatatgcccaggagaggtattgctggatcttctggtagtactatgtccaggaaccaccagactgatttccagagtggttgtacaagcttgcaatcccaccagcaatggaggagtgttcatctttctccacatccttgccagcatctgctgtcacctgagtttttgatcttagccattctgactgctgtgaggtggaatctcagggttgttttgatttgcatttccctgatgattaaggatgttgaacattctttcaagtgcttctcagccctctgatattcctcagttgagaattctttgtttagttctgtaccccatttttaaggggttatttgaatttctggagttcagcttcttgagctctttgtatatactggatattagtcccctatcagatttaggattggtaaaagtcctttccaaatcagttggtggcctttttgtcttattgacagtatcttattttttcttttttttcttaaatattttctttatttacatttcaaatgctatcctgaaagttccctataccatccccccaaccccctgccctgctaccctacccaccctcacccacttcttggccctgacattaccctgtactgtggcatataaagtttgcaataccaaggggcctcacttcccagtgatggccgactaggccatcttctgaagatttgcaaattaatgaggtcccatttgttgattattgatcttacagcacaagccattgctgttctctttaggaatttttcccctctgcccatatcttcgaggctttcccccactttctcctctataaatttcagtgtttctggttttatgtggagttctttgatccagttagacttcagctttttacaaggagataagaatggatcaattcccattcttctacatgataaacaccagttgtgccagcaccatttgttgaaaatgctgtcttttttccactggatggttttagctcccttgtcaaagatcaagtggccataggtgtgtgggttcatttctgggtcttcaattcttttccattggtctacttgtctgttgctataccagtaccatgcagtttttatcacaattgctctgtaatacagctttaggtcaggcatggtgattccaccagaggttcttttatcattgagaatagtttttgctatcataggtttttttgttattccagatgaatttacaaattgccctttctatctccgagaagaattgagttggaattttgatagggattgcattgaatctgtagattgcttttggcaatatagccattttgactatattaatcctgccaatccatgagcatgggagatctttccatcttctgagatcttcctcgatttctttcttcagagacttgaagttcctatcatacagatctttcacttccttaattagagtcacaccaaggtattttagattatttgtgactattgagaagggtgttgtttccctaatttatttctcagcctgtttatcctttgtgtagagaaaggccactgatttgtttgagttaattttatatccagctactgaactgaagctgtttatcaggtttaggagttctctggtggaatttttagggtcacatatatgctatcatatcatctgcaaatagtgatattttgacttctttctttccaatttgtatccccttgatctccttttgttgtctaattgctcaggctaggacttcaagtactatattgaattggtagggagaaagtgagcagccttgtctagtccctgattttagtgggattgcttcaagtttctctccatttagtttgatgttggctattgttttgctgtatattgattttattatgtttaggtatggtccttgaatttctgatatttccaagacttttatcatgaatgggtgttggattttgtcaaatgctttctcagcatctaatgagatgatcatgtggttttggtctttgagtttgtttatatagtggattaccttgaaggatttccatatattaacccatccctgcatccctgggatgaagcctacttggtcatgatggatgatcgttttgatgtgttcttggattcagtttgtgagaattttattgagaatttttgcattgatattcataagggaaattggtctgaagttctctttctttgttggatctttgtgtggtttaggtatcagagaaattgtggcctcatagaatgaattgggtagagtaccttctgtttctattttgtggaatagtttgaggagagttggaattaggtcttctttgaaggtctgacagaactctgcactaaacccatctggtcctgggctttttttggttaggagactattgatgactgctttatttctttaggggatatgggactttttaggtcattaatctgatcctcatttacctttggtacctggtatgtgtctagaaatgtgtccatttcatgcaggttttccagtttttttagtatagccttttgtagtaggatctgatgatgttttggatttcctcaggttctgttgttatgtctccctttttatttctgattttgttaattaggatactgtccctgtgccctctagttactctggctaagggtttatctatcttgttgattttctcaaagaaccagctcctggtttggttgattctttgaatagttctttttgtttccacttggttgatttcagccctgagtttgattatatgttaccttctactcctcttgggtgaatttgcttccttttgttctagagcttttaggtgtgctgtcaggctgctagtgtatgctctccctagtttctctctggaggcactcagggctatgagttttcctcttaggactgccttcattgtgtcccataagtttgggtatgttgtggcttcattttcattaaactctaaaaagtctttaatccttttctttatttcttccttgaccaaggtatcattgagaagagtgtcattgagcttccacgtgaatgttggctttctattatttatgttgttattgaagatcagcctcagtccatggtgatctgataggatacatgggacaatttcaatgtttttgtatatgttgaggcttgttttgtgaccaattatattgtcaattttggagaagctaccatgaggtgctgagaagaaggtatatccttttgttttaggataaaatagtctgtagatatctgttaaattcatttctttcagcagttattctgttagtttcaatgtgtctctgtttagtttctgtttccaggaactgtccaatgatgagagtggggtgttgaagtctcccactactattgggtgaggtgcaacgtgtgccttgagctttactaagtttccttaatgaatgtggatacccttgcatttggaacatagatattcagaattgagagttcatccaggaagattttacctttgatgagtatcaagtgtccctccttgtcttttttgataactttgggttggtagttgattttatttgatattagaatggctactgcagcttgtttcttcagatcatttgcttggaaaattgttttccagccttttactctgaggtagtgtctgtctttgtccctgaggtcagattcctgtatgcagcaacatgttgggtcctgattgtgtagccagtctgttagtctatgtcatttcattggggaattgagtccattgatattaagagatattaaggaaaagtaattattgcttcctgttatttttgttattagagtttgggttctgttcttgttgatgtcttcttttaggtttgttgacggattactttcttgctttttctagggcatgatttccgtccttgtgttggagttttccttttagtatgctttgtatggccggattcgtggaaagatattgtgtaaatttggttttatcatggaatactttggtttctccatctatggtaattgagagttttgttgggtatagtagcctgggcaggcatttgtgttctcttagggtctgtataacatctgaacaggatcttctggctttcatagtctctggtgagaaatctggtataattctgataggtctgcctttatatgttatttgacctttttcccttactgcttttaatattctatctttatttcttgcacttgttattctgattattatgtgttgggaggaatttcttttctggtccttttttggagtcctgcaggcttcttgtatgttcatgggcatctctttctttaggttagggaagttttcttctataattttgttgaacatatttactggccctttaagttgaaaatcttcattctcattactacctattaatcttagatttggtcttttcattgtgtcctggattttctggatgttttgagttaggatctttttgccttttgcattttctttgatttttgtgtctatattttctatggagtcttctgtgcctgagattctctcttccatctcttgtattctgttactgatgctcgcttttatggttcctgggttttttcctaggatttctatctccagcgttgtctccctttgggttttctttattgtttctacttccatttttagattttggatggttttgttcaattccattacttgtttggttgtgttttcctgtaattctttaagggatttttgtgtttcctctttaaggacttctacctttttagcagtgttttcctgtaattctttaaggacttctacctgtttagcagtgctctcctgtatttctttaagtgtgttattaatgcccttcttaaaatcctctaccaccatcatgagatatgattttaaatctgagtcttgcttttcacgtctgttggagtatctaggactcgctgtggtgggcgtactaggttctgatgatgcccagtgttcttggtttctgttagtaagattctttttttaaaaaatatttatttatttattatatgtaagtacactgtagctgtcttcagacactccagaagagagcatcagatttcgttacagatggttgtgagctaccatgtggttgctgggatttgaactcaggacctttggaagagcagtcggcaatcttaaccgctgagccatctcatccagccctgttagtaagattcttatgtttgccttttgccatctggaaatctctggtgttaatgttcaagctgtctctggctggagcttgatcctcttgtgagtctgttagcctctgtcagcactccagggagtccaactctcacctgagtttctgtggtcagaacactctctgcaggcaagctctcctcttgcagggaaggtgtctagaagtctagagctccggtccacttcctgagtcctggggtcagagccctccctggagtatgactctcctctggcaaggaaggtgcccaggggtctgggtctcagctctgcctcctggctgaaaatgaaggcctgaagggaccctgtccaagaagctctgctgcttctgtagcccacgtgctctccagtgatcccaaggtccttggtgtactagggggcctgcagtgtggagagttctctggggaccttggcaccctgcatggggttcgtgctgaaggtggtgttaggctggccccgaccggaatgaatccccaaccaaggcaactcatataaacaaaaatattcaattgggagtggcttacaatttcagaggttcagttcattatgatcatagcaaaaagcatggaagtgtgcaagcaggtggtgctggagaaagagctaagagttctacatcttgattcaaaggcaaccagaagagattgatatcctcatacagctaggaggaagctctcttcctcaatgggtggagcctgagaacaggagacctctaaagcctactcccacattggcacacttcctctaacacttcatctaacaaggccacacctcctaacagtaacaatccctataggccaagcatattcaaaccaacacactagccaatagggatgagtcttttaggttagtgccagtttagtttttctatgctctatgactgaagtaggtggtgtcttcagcaatagggtcttaccataaagttctgtagggcaaactatagcattggcaacagcctgtagtgtttgggggcctatgtgaactcactgaccaacaactccaaaagaggtaatccattcttggcactgggctttctatttgttagtttctactgccttgtgggggtatggttgtctctttataaggtaattccattttaactctttccatatatgtatattttagtatctcctacagtagtagttaggtttccatatgacttattcaaaatatttttagttttatatctctccattttccttcctctaccctaccttcctcactctcaccccaatttaacccttcctgttccatattccccttaaaccctttatactagtgagttttacctaccttctcttgaaaggccccctatagctccttactaattttctgacttccaagggtattccaaataggaatacacacacacacacacacacacacacacacacacatatatatatatatatatatatatatatatttcaaagctaaaatccacatattaggaaaaatatatttgtcatactgtctagattttctaactcagaatgattgtttccagttcatttcatttatctgaaattttcataatttttttcttttctttttttctttttagacagggtctctctacatatccctgaataccctggaattcattacataaaccagtttggccttgaactcacagaaatcctcttgcttctgcctggattaaaggcatgcaccagtccacccaactaattttctttttcctaacatctcagtaatattccattgttcaaataaactacattttctttatccattcatcacttgatgggcatctaggccatttccacttcctggctattgtgaatagagcagcagtgaatatgaatgagtagcaggaatctctgtagtatgaaatggagtcctataggtataaagtagttttaatttgcatttccctaatggctaaggatgttgaacatttttaaaaaatgcttttcagaaatctaaaattttttgagaactctctgtttagttacatgttgcattttttggttgtgagcctagcctttaacggctgagccatctctctatcccacatgttgcagattttaagggaaggttttcattcttttttggtggtttttattttttaatttttatacatttattttttgttcattttttattaaatattttcttcatttacaattcaaatgctaccccctttcctagattcctctccaaaaatcccctataccctccccctgccctgctccccaacctacccactcctgcttcctggccctggcattcccctgtactggggcatataatcttcacaagaccaagggcctctcttcccattgatggctgactaggccatcctctgctacatatgcaactagagacacaagctctggggggtactggttagttcatattgttgttccttctatggggttgcagaccccttcagctccttgggtgctttctctagctccttcattggggaccctgtgttccatccaatagatgactgtgagcatccacttctgtatttgccagtcactggcatagcctcacaaaagacagctatattagggtcctttcagcaaaatcttgctggcgtatgcaatagtgtctgggtttggtggttataattatatggggtggatccccgggtggggcaatctctggatgttccttccgtctcagctctgaactttgtaactccttccacgggtattttgttccccactctaagaaggagcgaagtattcacactttggtcttcattcttcttgagtttcatgtggtttgtgaattgtatcttgggtattcagagcttctgggctaatatccacttatcagtgagtgcatatcatgtgagttcttttgtgattgggctatctcactcaggatgatatcctctagatccatccatttgcccaagaatttcataaattcattctttttaatagatgagtagtactccattgcataaatgtaccacattttctgtatccatttctctgttgagtgacctctgggttctttccagctctggctattataagatatttttggttttttggacagagtctcactatgtaaccctggctggcttagaacttactgtgtagacaaggctggcctgtaactcagtggttctcaaccttcctaatgttacaaccctttagcacagttcctcatgtattaaaatccatccataacattatttcactgctacttcataactgtaatttttctagtgttatgaatcataatgtaaatatatgttatgtaacccaaaggagtcataacccacaggttgagaactactgctctaatttatagacatctacctgcctctgcctccagactgctagaattaatggtgagcatatctgtttcatttttcacttatctatgtagtctggatatcaaccttctgtcatactagtaacactgcatcaggatgcaggaagtttagcactgttgagatccagatggcagatagcatcacaatagtagaactatgtatgaatcggaaagatcatatggaaatatgaatcagagaatgattaagaatgaggtttgccagggctacgcagagaaaccctatctcaaaacaacaacaacaacaaaaaaaaaacccaaaaaaccaaaaccaaacaaacaaaagaatgaggtttgctcttctatgacaactgaatcttgtataagaacaagaattccttgagaaccaactcaattataataccatccccttattagattttctttttctttctttctttctttctttctttctttcttttttttttttttgggacatccggcaattttgccataatataataagttaaaaagaatgcaaattgagaaatacaatagttggggttgggcagcaaattcagagtagggtttcgaggtaagcattttttttatttttattagatattttcttcatttacatttcaaatgctatcccaaaagtcccctataccctccccttattaggttttctttcttcatctctttcttgtcttttctcaccatctccacccacctttgccacccccacccccacccccacccctgcatctcactgtctaattctagatgttctagactccctaagtagaagtagaacaggctagcttcaaattcagagatctgtttacttctgcctccagagtgcttggattaaagatatgttgcaccatgccaggcttaggttctatctcttaaagtgcctactatttagggagaattggagaatcacctcaatcctttttgatgttgcctaaagttaaggacacctttcctagagtgcctccccagagaaagaaccaaagaccaaaaaaatgttaaggaaattgtcttaggtagggttttactgctatgaacagacaacatgaccaactctgaaaatgacaacatttaattggggctggcttgtaggttcagaggttcaatccagtatcatcaaggcaggaacatggaagcatccagacaggcatggtacaggcaggaggagctgagagttctacattttcatctgaagactcctagtggaagacttgacttctaggtagctcaagcccacagtgacatacctactccaacagggccacaccttttaatggtgccactccctgggccaagcatatacaaaccatcacagaaacctttaatgaaccagagtttaggaaaggatatatcttgcataaaaagacaaggcaaaccatgtaggaaaataacaaagaaccagtagtatcaagtctttgtttatcaagagttttattgaggtaggcatgaaaattgcattctgctgaaaataacttgatcgatggttgtgaaaactgcattctatctcctcaggccacctaaggaataaataaactgtattctattgctttggtgtaattttgcagtcagttaaaggatgttctgtatgggccaaaactcagcatggatatttgagataggagatgactaaccaaaattactgtcacaagtttcctttacagctattgctagtttggggccaggaaggaaaaaaaaatacttatattatttgtcatcagtccgtcacttagttttatggctaacttaggactccaagttgttcttctagttcatttcataactaagcagtgaaaaataatttgagtattgcttagtgaaacactggcatttgaaagctttgagctccttttttaagaacctgtctctcaaaaaaaagaaagaaagaaagagagagagagagagagagagagagagagagagagagagagaaagaaagaaagaaagaaagaaagaaagaaagaatgaatgaatgaatctgtattctctcccacttccctaactccttgcctacctatcatgatgatgctgtgttagaagctcaggtggacattttgtattttttcaaaaggtcagaatttattggatgtcccagtataggggaatgccaggtcagggaagcaggagtgggtggattggtgatcagggggaggggagatgggatagggggttttcagaggagaaaccaggaaaggggatatcatttgaaatgttaataaagaaaatatctaataaaaagtacttcacacaataataagcaaatatgaaggtcacagaatgattaaaaaatgttaaagagactacaaagttgagagataccatcttgaagttataggaagagatctgatgcaaactccaaagaatactctttaggggaccagaaaagaactcttgggaagcacagcacagagctgcttttagttacagagatgccaggtgcaattccaggtgacaagacatttcagctgtcagttcgaagtgggccaagtgtcacaggctagggaaactagaaactgcactacagcttgagctctggaacagaggcagagtcttttgatgtggcaaatttcctggacaaggctcatgacaagtgaccttgtgactggttagtgttcctaccacactttggtcttgaggtggtccttcttttacagacccaagtgagggggttctatctggtgaaattgataagttcatatgtcttgtgtaaatgggaacatcatttactggtataaacaatcattttgtgcctcctaatgtgttgtcagataatggttgtcaattgtgtaaacaagatatagagtcattctctctttgttcttacactcaaaatggagtaactcaagctgagactattgcttaagactacacaagccagcttcttatcctctccacaataatacctcaatatcaccacactcagtatcagtcctctaacacatgaaaccttaagaaaaacttcatccaactcatagctacatgttactaggggtgccaatgaaagttaaccttacaaagtacttgggtaaattgggatagtgtaaagaatacacatgagtggggttggatctgagtccacaagaggtaatcagtctgcttctgagtctatagccaggactacaggcagcaggccactatcaaacagttgtacttggtttgttgcttccatagtgtttcttaacctcccaagtacatcccaagatgcccatagatggatgtctgccaaatcattgttcttgtgaaataaaagctaagtaactctgatatctatatactgaagctacacggtgctaatggcttcctcaacttttatgaggaacccaaggtagaaaaccacttcatttgactgagatcacaccaaactactttgtcccactcttcttggtgatttaaaaaatatatatatactatgctaacatttatctagtcaccatattttcatttgaatttattgatactgtttttttaaatgccagaggcaaaattagaaggaaaagaacaacttttttatgctttgtatttactttccacatatttttaataatctcttctaataggttttctttggcaatgtggactcatctgggattaagcataatagttttaatcctccaattattgctcgatatatccgtttgcaccccactcattctagcatccgtagtactcttcgcatggagttgatgggctgtgatttaaacagtaagttccaagtctttccatattattttctttcctaaccataagtagaataactagctgagactgtgaggagggatttctatcacagtatatagcaccatcagtgataaaactatcatagttctgaaacaaacagaataacaaaagtaggagtttgttactgtagttctccagaagcacctatctcctatacttctatcaacaaggaaaattaaaatcaagcagaactaaggagaattgactagaaaatctgagcagtttagcaataacagaaattgtataaaaatcagtgcctgaaaattatcatgatgataatatctctagaggactgaagacaacacagtgaaacctaggctgcaggatacccatgtgacatcattatactttcatttctttgaggttgcagcataccattgggaatggaaagtaaagtaatatcagatacacaaatcactgcctcatcctacttcaccaacatgtttgctacttggtctccttcacaagctcgacttcacctccagggaaggactaatgcctggcgacctcaggtaactgcaacatatttaccatttaactaattaaagtagaaaataaaggctagaaaattaggagaagcccttgtttttcataggtatatctgttcactgttcctaagaaaaatgtttatagggatcaataatgcccatgggcattcctttgatgtgccatatgattttgtatagcattcaatggaagaagaaatgatccttaatgaactgcctagaagaataatctctgtacccagtactagagtaatttctgtgaaataattatggtaactaaagtccaatccaaagctggtaaaatggttcagcagatcaagatgcttgatcccaaaccagatgaggtgacataagttcaattcttgggatccacataggggaaagaaagagccaactcctttaagttgtcctcagacctccatacaggttccatggccatgaacatgtgtgtatatgcacacacacacacacacacacacacacacacatatacttggacaagtaagtaaatataatataaaattttaagttcagttttaaaagtgttattattttgaatgaagtagtttggctactacgttgccaaactttatgttctagtagttatggttcctaaaattcattcagcacttactaggaacctattaagtgagtgacctaaggagattaaaataagaattatgaaaaatttggcccttggaattcttagtcaaataaaggaggcagacaaacccttatgtacagtgataagtgctgtagtatggttacaaagacagttgtggatttctcagagcaaataatgacaaaggagattttattcaaatatcttcctcaggtgaatgatccaaaacaatggttgcaagtggacttacaaaagacaatgaaagtcactggaataataacccagggagtgaaatctctctttaccagcatgtttgtgaaagagttccttatttccagcagtcaagatggccatcactggactcaaattttatacaatggcaaggtaaaggtatgttctcataagagaggcacagtgtttatggtgactcaagcctgtaaccctttcacacagccataggtcatgttgagtttaaagactgagaccctgccttaaataaatgaacaaaagacataacacctgtctttgatcttgacatttagagatagaaccagattgatttgtgatcaccctctcaggacacaatttattaagtacctacattaacaggacactgtgaacaactttatgagagaacacagtgacccccaacaggggagtaaaatttcaagggataaaaaaaagtacagccaagaattgtttctcatattgaaagtcatacagaatgattgccaaaaaattaaatacagagggttgcaatttaggtcttttttttcttttcttttcttttctttctttctttctttctttctttctttctttctttctttctttctttcttctttggacaactgtttaatgatgctcttattctcactagcaatgctagacttccaaaccttactaactttaactatagtggcccatcttaacttggattttctagctaattcaacaaagtataccaactataagcataatacaagtcttagtatgccataaataatatgagtagcaatagtttacatcatctttggtattttgtaatttttttgtaatatttttaaacaaagaattaaccatggtggggtatgtcagctttccattactatgacaaccatctgagataaacaacttataatgacagtttgatgatttatttagaacatattatgacaacagcataaatgtcataattggccggacgtggtggcgcacgccttcaatcccagcacttgggaggcagaggcaggcagatttctgagttccaggccagcctggtctacaaagtgagttccaggacagccagggctatacagagaaaccctgtctcgaaaaatcccaacagagccacaccttctaatagtgccactctctgagccaagcatataaaagtcataattgagggaaatagaataaagaattctaaaattctagtattatcttggaagtaaagtataatattaaatgttgatagtttaaattttgttgtattttccataataactaatcagtaacaggataggttataagtctctcaaatgccaaaagaaaaaaatataaaaagataaaccaagtataaataaaagcaagcagatgagtacaatgaagatcaaaataagcaggaaaaatatcctaattagctgtcagatttgccagacatggtgctacacacctttaatcctagtattgggaggcatcaatgctggagtttagttctagcaggccaggcactgaagctgggtgggatcagtggctttttctcacacagcagactttttctcttagggagcaaaacttaattctctggggccagcaaaaaaggaagaatatcacacacacacacacacacacacacacacacacacacacacacacacagagagagagagagagagagagagagatcttattgttggaacatgctcaagttctctttatttttcccctacagcttatatcccccaacaaaatctttcaagcaatataaaaattacagtgtggttatattctatttttccttttgaatgatcacaatgaatacaggtaaaaaacagcatgtactccaacagtcttacataattaaacattttaaatattacaggtaaaaaacaatttgtccccaaggatccacatgcattcatatgaaagcaacttgttataggttaacaaagtgtaagcaagcaagttattcttcttttccagttcttttactggcaggctgcattttgaagttacaaagaaaggattaatcattttttttatatttgccaatcagtcatttctactttaaatcttcaggttgcacatctactcactgtagagagaatctcttataagcatcacctgtcaataaaaaagcctgtggccaatgagctgaggcaagaaatagggacactggcagagaggtgcaaagattcatccaggaacatagaggaggtcagaaggatggaaactgagcagaggtaaccagccacatagatgaactcgggatagaataaaaggagagatttgagctggaatgctgaggagacagatgtaaaccagccatgtagctgaactaaggttagaataaggttagtgatttgcccaggaacactgaggagatggacataaacttgggataaaataaagataaaataaagaggattagcccagaagtggatggatgacagggcccccaatggaggagctagagaaagtacccaaggagctaaagggatctgcaaccctataggtggaacaacattatgaactaaccagtacctcggagctcttgattctagctgcatatgaatcagaagtcggccattagtggaaagagaggcccattggtcgtgcaaactttatatgcctcagtacaggggaacgccagggccaagaagtgggagtgggtgggtgggggagcatgtgggggacttttgggatagcattggaaatgtaaatgaaataaatacccaattaaaaaaataaaataaaatatgctaaaaaaagaggattagccctggacttggacacatgaagctgaggacaggtaactaaccatgtggtagacatagaatagtttaaataggttaaataagttatcagttagtcggggaatgagccaaagcttgtagccaaggcattcattaataattagtctcagagtaatcatcattcagggagcaagtgctgggaaggaaaaaaaacagatttattttttacaacttaccaagttttttattattattattattattaaatcgtatcaggaagctaagggcaaaaatgggtacaagaaattaatcatccccttgatcaccaacccagctttagtaagaaaggcaggcaagtcagtttacaatagccaggcttccactgttcttgttccctgacctcaatgagcccctcactcaactatcaaaaaatgtgcctttctgagctttaagttgttcctcaagatcttccacatcaaagccactaacaaaaacaacttaacctaactttactaacaatttacatctcaatccttttaagggttttggttgaatgattaatctattccagcaacaatgcttggaaaagatcaatcactaatattgtaagtgccaatgatactgcccattgaggggttggaaacccccttagagtttttataccatttatagattatgaggggtgtggtaaccatgagagcaataagcaaatcaatgctcaataacagcatgaagctcagccccttttataccaagccaggtctacctggctgttgccaggtaactgctgggcagagcctagaaggaatgctaataggtggagcacccctgaatgacagccttaaggagggcagaaagactgagaagagatggcttgccattgggactcagagtaggtagggagttaggcttggaggagccaagaggaaggaggatagggatgatacctggcctctttagcagactcttcagtagaagcatttcccaaaactatatcattgaaaggggcctggtaacctaacgttcacaacacccacctactttggaaaatatgaggcttctagcagctttaggactagagacccattgataatggatgtatccttggtggtaaggaagcacttctcctgtcaaatggaaacatggtagtatgggatgtggagttgcatatttagaatatggtatatgttgatggttttatctcattaaaataagggctctaatgagggttatgagctttctcttctgagaagtaatgcatggcagtaaaaagacagtctctacaacctgtcagaaaagactatggcataaccctttttggctggagccaataaaagtgagagatgagcttccatctaggaatcaagaataatcaggacaaagttgtggggttttataggtgagagtttcaagttattctaggcaagaatgagtgagggtagtagtcttggaaaggagtgtggatgggataagatgaaggcaggaatcaactaagatatcaggattttctaggagagtaatatgaaaaagttagaacttagaagggaacaaagtatgagagagtcttgtgtataaatcaattatccttaatatatatatatatatatatatgtatatatatatatatatatatatatatatatatatatacatacacacacatactcacacacacaaacacacatatatatgataaattaaaagggcagctgtatttctttgccttatgctattccctaataaccacacagaaaaaataagatttattcaaaactgcatgtcaatagctgaacagttaaatgatctacctttacctcctatgctaatctagttatctcctagccccatcccatgatacttgcatattattgacatggctcttcagaccttcttcatggctccaattcctccatcctgccactgatctgagtctccccatctccctccttcctctcgcctctgctggtggatgttctgccctattctctattctgcccagttattgggagatcagcatttattgacaaggcagagaataaatggtaaaatctgtttacacttgagactggaagttcttggaataagaattacaatgtggtgccctgcttgaattaagatatgaaggcagagaaatcggcatctgaataactcaagggtaaaatttacactgcttataaaacattacgcctacacttgtgcgtgataggagccccttgtgctggtgtggtaggaggacagatgtgagtttagaggcctcctttgccaatagggagactgctgctactgtctgttggcaaggttgccattcccctatatctgttgtatctaaatgtctggaaatataaacgagggcaaaggtgggtcctttcatttgtcccaaaaatcctgaagccattcttcatttttcagaaatacagaagataaagggttggtcaaagtcagggagagacagagacctttagaagtacctttcttgactttagctgcatatgtatcaaaagatggcctagtcggccatcactggaaagagaggcccattggacttgcaaactttatatgccccagtacaggagaacgagaacgccagggccaaaaagggggagagagtgggtaggggagtgggggggggtatgggagacttttgggatagcattggaaatgtaaatgagaaaaatacctaataaaaaaatattttaaaaaaatacaaaccagtcttaaaacaaacaaaaaaaaaaaaaaaagaagaagaagaagaagaagaagaagtacctttcagaaacaagagaaagcagacttagtaggatctagagagtcagttaagtggcccttatctgcttcatcaagggggtgaacaagaaaagcaaagttgggaaacaagattctgaggtatcctaccaggccaattaaagagagaatcttttatttggaggttagaggactacaaatactgtctgccatcaagagtgagtttgtagttgttgggtaattaaaaaaatcatagatatttgacctgaaggatagaaactttggctctggaaggggagactctgcatcctttgtttccctaggaagtgaagaagttgagaaggatgttgctgtaacagtgagagcaaggggctgcatagtagaaggtcattacataattggattaaggatctgggagacaggtcaagaaaaaggtcaatggcaagagcctggctgaagaaatgggggttatctcaggacagtccatgtaagctgagacactatcccatgtcagggtcctcccagatgaaggcaaagtagtcatgttaacctgggtataaaaggaatggtaaaggaagcatccttgaaatctaggacagtaaaggaaaatgttgataattctgattttatactataagtacttgctgcagtgagaaaattttgagcagaaagttaaagtggtcaccattatccaccatacacacacacaccagaagattccacagatgaaaacagcgggtactgtgcctttcaggacagtcccacaagggagtttattcctagcacactggaagattttcccattgaacatctgtatctctaaacccacatcttgtggatctcctataggacaattatgaattctcagtgtttaaatatcccactgggtccagaatgttaatgcctcagcatgcattatgtatgatggtgtgttaattgttttccagatggagatggagaagccacagagaagcaaaaatcttttctagagtattattaaaaccttcaaacttcatacacagacactcatcatacacacacacacacacacacattcctacactatgaaacacatctgtgtatatatacagcaaatctcaatatgtaaatcaacattcacatagctaaaaagaaagctagaaaaatggctcagcacatagagtacttgtggtctaagtatttaaacctgagtttgaccccagaacctatgtcaaaacaacaacaacaaattaattcaggggaaatagagacagcaaagacaaaccattgagactcacaggctagccagcctaacccagttggcaagttacaggtaaaagagagataccttttctttaaaaacaagttggttttacttgtttatcagttgttaataaatgtttggacaaagaggctgaagagatggctcagtggttaagagcactggctgttcttccagaagtcctgtcatggtgggaacctcacaaccatctataatgtaatctgatcccctatctgacatgtagagatttacatgtacatagagcactcatttacattaaataaataaataaatcttaaataaatgtaagaacaaaaaaagcaagataaatagctcctaagaaatgactctgagttgaccatgggcctccatttgcacccatacatccttggacattggcatacaaacaaacatgtgccctcatgtgtgcatgcatgaatgcacacacacacacacatacacgcacactttaagtaagaaaagttatttggtgaattgaagtctaataacaaggaagtaatagtgagggtttaggagattgttttgtttcattttcatcactaggctgattaattggtcttgtagagttgtgaggtctcattaagtctgtaatacacgagaagcaatatgctatgtagtatgcaaagcttgagcacccctacccctgagtaacgattaggcaccacggagtgtataggaaagtctgcttcatgaatgatcttgactaggcaatagtaatcatcataatgtactctgttgctttaggacaggcaagagaagagcgttataggtcaagtgagtagtagacttgacaatacccttattaagaaggcatggtggtatgttttaagcctcatatatgttttaaagagatagggcattgaaagtgacagggtaggaagtagaatcctggagtaggatcttaatggagggaagatgatgagaaactactgaaagaaagggggtgcctcatacttttctgtcagctggaaagtctggaaaaggataagatgaggtattagtgttagccagagagactcttcaaaggctagaagaagaggggaaattccagaagaagttagatgaaaagaaaaggaaaagtgtagtttaaccatgatatccctactcaataacagggttgggaaatgaggtataatgaggaaagagtgagcaattgggtagcctcagagggaagagaggaaaggacctctagccctgagctggttgggccagctggcaacaccaatcacagagatctgagaagagtaagttttatcagagttagccagaggtatagaccaagtaactgcacagtcactccaggctccttcatgctaattttgatagttttgttgggggtagacttcccagggaagtcttatcagtcttccagaaaatctgagaggttttcctgtagacaaagaatttggggaattaacctaccttgttgatgctgagtggtgcagtccatcttccagtgtcctgtcgtcccacaatttgaacatgctcccggcagctgaaatgtagttctttgccaagtggttgacattgccacacttgaagcaagctccagatggagtccattggttccccatctttagaggtggcttgagggctgttgccagaagctgttatttgtctatcttttcttgttcctcctttccattaaacaccttttaaaatgctgtattcagcagatctctctgaggatgtgagggccatcatctagtcccttaaggctttttttttccctaatatcaaagacttactggaagaggaagagggagttaaggacaagcatgtcctcttgagaattaggatctacttttgtgtactagagagcctctatgagttggttgaggaactcagcaggattttcatctgtccactgggtgacctccctaagtttattggaattagcaaccttgcaggaatccttttagaagccagccagaaggcaaataaccattttattattatgccctagcaggctactaagtctcagaaccaacctggtaactccagtggggatctgcccagagaactgtcacagcttccatggaatagaaagtatccatgtggtagacatcatccatatgggtttggacagctgcccagaccaactcttttgtttttttcaggggtgagagtagagaaaataacatagaggtcagatgtgaactgttggaggtgatgagataagaaaagatgaggctaaatcagaataaggaggtgaagcaggctgggaggacacctgtgagcttgaggctgaggaggtgcaggtaggttaggctgaggaggtgctggtggagggggccatatcctctatataagaatcaaaagggcggaccagaggacaggtgcccgcccggctggggaggcgacctaagccacagcagcagcggtcgccatcttggtccgggacccgccgaacttaggaaattagtctgaacaggtgagagggtgcgccagagaacctgacagcttctggaacaggcggaagcacagaggcgctgaggcagcaccctgtgtgggccggggacagccggccaccttccggaccagaggacaggtgcccacccggctggggaggcggcctaagccacagcagcagcggtcgccatcttggtccgggacccgccgaacttaggaaattagtctgaacaggtgagagggtgcgccagagaacctgacagcttctggaacaggcagaagcacagaggcgctgaggcagcaccctgtgtgggccggggacagccggccaccttccggaccagaggacaggtgcccacccggctggggaggcggcctaagccacagcagcagcggtcgccatcttggtccgggacccgccgaacttaggaaattagtctgaacaggtgagagggtgcgccagagaacctgacagcttctgaaacaggcagaagcacagaggcgctgaggcagcaccctgtgtgggccggggacagccggccaccttccggaccagaggacaggtgcccgcccggctggggaggcgacctaagccacagcagcagaggtcgccatcttggtccgggacccgccgaacttagggaattagtctgaacaggtgagagggtgcgccagagaacctgacagcttctggaacaggcggaagcacagaggcactgaggcagcaccctttgtgggccggggacagccagccaccgtccggaccggaggacaggtgcccgtccggctggggaggcggcctaagccacagcagcagcggtcgccatcttggtccgagacccgccgaacttaggaaattagtctgaacaggtgagagggtgcgccagagaacctgacagcttctggaacaggcagaagcacagaggcgctgaggcagcaccctgtgtgggccggggacagccggccaccttccggaccggaggacaggtgcccacccggcaggggaggcggcctaagccacagcagcagcggtcgccatcttggtcccgggactccaaggaacttagaaatttagtctgcttaggtgagagtctgtaccacctgggaactgccaaagcaacacagtgtctgagaaaggtcctgttttgggccttcttcttcggccaggaggaggtccaaatacaagatatctgcgcaccttccctgtaagagagcttgccagcagagagtgctctgagcactgaaactcagaggagagaatctgtctcccaggtctgctgatagacggtaacagaatcaccagaagaacaatctctaaacagagtcaactataactactaactccagagattaccagatggcgaaaggtaaacggaggaatcttactaacaggaaccaagaccactcaccatcaccagaacccagcacacccacttcgcccagtccagggaaccccaacacacctgagaacctagacctagatttaaaagcatatctcatgatgatggtagaggacatcaagaaggactttaataaatcacttaaagaaatacaggagaacactgctaaagagttacaagtccttaaagaaaaacaggaaaacacaatcaaacaggtagaagtccttacagaaaaagaggaaaaaacatacaaacaggtgatggaaatgaacaaaaccatactagacctaaaaagggaagtagacacaataaagaaaactcaaagcgaggcaacactagagatagaaaccctaggaaagaaatctggaaccatagatttgagcatcagcaacagaatacaagagatggaagagagaatctcaggtgcagaagattccatagagaacatcggcacaacaatcaaagaaaatggaaaatgcaaaaagatcctaactcaaaatatccaggaaatccaggacacaataagaagaccaaacgtacggataataggagtggatgagaatgaagattttcaactcaaaggtccagcaaacatcttcaacaaaattattgaagaaaacttcccaaatctaaagaatgagatgcatatgaacatacaagaagcctacagaactccaaatagactggaccagaaaagaaattcctcccgacacataataatcagaacatcaaatgcactaaataaagatagaatactaaaagcagtaagggaaaaaggtcaagtaacatataaaggcaagcctatcagaattacaccagatttttcaccagagactatgaaagccagaagagcctggacagatgttatacagacactaagagaacacaaactgcagcccaggctactatacccagccaaactctcaattatcatagagggagaaaccaaagtattccacgacaaaaccaaattcacgcattatctctccacgaatccagcccttcaaaggataataacagaaaaaaaccaatacaagaacgagaacaacgccctagaaaaaacaagaaggtaatccctcaacaaacctaaaagaagacagccacaagaacagaatgccacctttaacaactaaaataacaggaagcaacaattacttttccttaatatctcttaacatcaatggtctcaactcgccaataaaaagacatagactaacaaactggctacacaaacaagacccaacattttgctgcttacaggaaactcatctcagagaaaaagatagacactacctcagaatgaaaggctggaaaacaattttccaagcaaatggtatgaagaaacaagcaggagtagccatcctaatatctgataagattgacttccaacccaaagtcatcaaaaaagacaaggagggacacttcattctcatcaaaggtaaaatcctccaagaggaactctcaattctgaatatctatgctccaaatacaagagcagccacattcactaaagaaactttagtaaagctcaaagcacacattgcgcctcacacaataatagtgggagacttcaacacaccactttcaccaatggacagatcatggaaacagaaactaaacagggacacactgaaactaacagaagtgatgaaacaaatggatctgacagatatctacagaacattttaccctaaaacaaaaggatataccttcttctcagcacctcatggtaccttctccaaaattgaccacataataggtcacaaatcaggcctcaacagattcaaaaatattgaaattgtcccatgtatcctatcagatcaccatgcactaaggctgatcttcaataacaaaataaataacagaaagccaacattcacatggaaactgaacaacactcttctcaatgataccttggtcaaggaaggaataaagaaagaaattaaagactttttagagtttaatgaaaatgaagccacaacgtacccaaacctttgggacacaatgaaagcatttctaagagggaaactcatagctatgagtgccttcaagaaaaaacgggagagagcacatactagcagcttgacaacacatctaaaagctctagaaaaaaaggaagcaaattcacccaagaggagtagacggcaggaaataatcaaactcaggggtgaaatcaaccaagtggaaacaagaagaactattcaaagaattaaccaaacgaggagttggttctttgagaaaatcaacaagatagataaacccttagctagactcactaaagggcacagggacaaaatcctaattaacaaaatcagaaatgaaaagggagacataacaacagatcctgaagaaatccaaaacaccatcagatccttctacaaaaggctatactcaacaaaactggaaaacctggacgaaatggacaaatttctggacagataccaggtaccaaagttgaatcaggatcaagttgaccttctaaacagtcccatatcccctaaagaaatagaagcagttattaatagtctcccagccaaaaaaagcccaggaccagacgggtttagtgcagagttctatcagaccttcaaagaagatctaactccagttctgcacaaactttttcacaagatagaagtagaaggtattctacccaactcattttatgaagccactattactctgatacctaaaccacagaaagatccaacaaagatagagaacttcagaccaatttctcttatgaacatcgatgcaaaaattcttaataaaattctcgctaaccgaatccaagaacacattaaagcaatcatccatcctgaccaagtaggttttattccagggatgcagggatggtttaatatacgaaaatccatcaatgtaatccattatataaacaaactcaaagacaaaaaccacatgatcatctcgttagatgcagaaaaagcatttgacaagatccaacacccattcatgataaaagttctggaaagatcaggaattcaaggccaatacctaaacatgataaaagcaatctacagcaaaccagtagccaacatcaaagtaaatggagagaagctggaagcaatcccactaaaatcagggactagacaaggctgcccactttctccctaccttttcaacatagtacttgaagtattagccagagcaattcgacaacaaaaggagatcaaggggatacaaattggaaaagaggaagtcaaaatatcactttttgcagatgatatgatagtatatataagtgaccctaaaaattccaacagagaactcctaaacctgataaacagcttcggtgaagtagctggatataaaattaactcaaacaagtcaatggcctttctctacacaaagaataaacaggctgagaaagaaattagggaaacaacacccttctcaatagccacaaataatataaaatatctcggcgtgactctaacgaaggaagtgaaagatctgtatgataaaaacttcaagtccctgaagaaagaaattaaagaagatctcagaagatggaaagatctcccatgctcatggattggcaggaccaacattgtaaaaatggctatcttgccaaaagcaatctacagattcaatgcaatccccattaaaattccaactcaattcttcaacgaattagaaggagcaatttgcaaattcatctggaataacaaaaaaccgaggatagcaaaaactcttctcaaggataaaagaacctctggtggaatcaccatgcctgacctaaagctttactacagagcaattgtgataaaaactgcatggtactggtatagagacagacaagtggaccaatggaatagaattgaagacccagaaatgaacccacacacctatggtcacttgatcttcgacaagggagccaaaaccatccagtggaagaaagacagcattttcaacaattggtgctggcacaactggttgttatcatgtagaagaatgcgaatcgatccatacttatctccttgtactaaggtcaaatctaagtggatcaaggaacttcacataaaaccagagacactgaaacttatagaggagaaagtggggaaaagccttgaagatatgggcacaggggaaaaattcctgaacagaacagcaatggcttgtgctgtaagatcgagaattgacaaatgggacctaatgaaactccaaagtttctgcaaggcaaaagacactgtctataagacaaaaagaccaccaacagactgggaaaggatctttacctatcctaaatcagataggggactaatatccaacatatataaagaactcaagaaggtggacctcagaaaatcaaataacccccttaaaaaatggggctcagaactgaacaaagaattctcacctgaggaataccgaatggcagagaagcacctgaaaaaatgttcaacatccttaatcatcagggaaatgcaaatcaaaacaaccctgagattccacctcacaccagtgagaatggctaagatcaaaaattcaggtgacagcagatgctggcgaggatgtggagaaagaggaacactcctccattgttggtgggattgcaggcttgtacaaccactctggaaatcagtctggcggttcctcagaaaattggacatagtactaccggaggatccagcaatacctctcctgggcatatatccagaagaagcctcaactggtaagaaggacacatgctccactatgttcatagcagccttatttataatagccagaagctggaaagaacccagatgcccctcaacagaggaatggatacagaaaatgtggtacatctacacaatggagtactactcagctattaaaaagaatgaatttatgaaattcctagccaaatggatggacctggagagcatcatcctgagtgaggtaacacaatcacaaaggaactcacacaatatgtactcactgataagtggatactagcccaaaacctaggatacccaagatataagatacaatttcctaaacacatgaaactcaagaaaaatgaagactgaagtgtggacactatgcccctccttagaagtgggaacaaaacacccatggaaggagttacagaaacaaagtttggagctgagatgaaaggatggaccatgtagagactgccatatccagggatccaccccataatcagcatccaaacgctgacaccattgcatatactagcaagattttatcgaaaggacccagatgtagctgtctcttgtgagactatgccggggcctagcaaacacagaagtggatgctcacagtcagctaatggatggatcacagggctcccaatggaggagctagagaaagtacccaaggagctaaagggatcttcaaccctataggtggaacaacattatgaactaaccagtacccctgagctcttgactctagctgcatatgtatcaaaagatggcctagtcggccatcactggaaagagaggaccattggacacgcagactttgtgtgccccggtacaggggaacgccagggccaaagggggggagtgggtgggtaggggagtgggggtgggtgggtaagggggacttttggtatagcattggaaatgtaaatgagctaaatacctaataaaaaatgggaaaaaaaaaaaaaaagaatcaaaaggagaaggattggaatctctaagttcctttttttttttttttttggtttttcaagacagggtttctctgtgtagccctggctgtcctggaactcactctgtagaccaggctggcctcgaactcagaaattcacctgcctctgcctcccaagtgctgggattaaaggtgtgcaccaccacacctggcggaatctctaagttctaatcagctttggagtagatttgacctttgccaggaaaacctggtgagtatggcatgaggtacaaaaagaagggcaagagaatgaacacaggggatttcagaccatttgcccatgcattggcagaatttgtcaagattagtgagaatttggtagcctaatatgccattttctgacaactgagacaaattgtcaaacttgcattatggtcaagccaaattgcagtttaaaatggggaacctgtgttgaggcttaatgatatctctaagtcctagaagggaacaagacttaaggaggcaaacaagtaaaaatgaagggaagaattcatgtttaattcaagggaggaaaggagacaccattgaaaaggtagcagtagagaatttccaggagcagagcaaggaagagtgggagagacttaaaaagggagccatagtacttatgtcagaaggaggattttaatagcataggaatggagaagagaagggaggggaggggaggggaaagggtgaagaagggaaggggagcaggagaagagaggggaggggaggggaagggaggggaggggagggaagggaagggaagggaagggaagggaagggaagggaagggaagggaagggaagggaagggaagggaagggaagggaaggaaaaggggtaactgccatagctacagagtctcaatctgagggcatttccaaaagtaaagagacttgtcagagagagagagagatgttctgaatcacagttgataggcatctccttccatgtgaagggtacccagtagagcaaaggaagctgtttgaaacaccagtgtgattttttttaagtagactccagaaagatggcaggctccaagtaagccaatgaaaaagacagagccaaagcaagcaattctgaggaggcacaagtattgaggagagtccaggaaaaatgagtgcgtagagtaggtggagaaaagaaatagctggagaagtgaactttaaagtttgaagtcaaataccatgggtagtaggagccagcagaagcaagtaatctgctcccaggagtgtcaaaatgagcaatttggttcagttaggagggggtaggccctttgaaagggactcagtattcacttcccaggtttcagcaacaaatgtaagagagggtacagtgaaagcatcaaactagatggctccatgaaaaagcaaaatggtggcaaggcaagcagatgggtggggggacttggatctgttcagattgaccagaaactagatgcccttgcctgaggtagttgacctttgaagcagaaacctgctttaggagacctgtttttccacctttaggctcaattacccaatagtgatcgttttggtttactctgacaaggtccttctgttgaagacattgtcattgtcactaacactgccattgttgaggagaggtgtcttggactaacactcagttaggagtgggagtttataatcccatcctgctccatctaaagtattgactgttttaatcctgtacagatcttctccaagcaactatagctgctatgtgtttatgacttaaacagtcctgtcatgtcataacacttgtattaatcagggttctctagagtcacagaacttatgggtagtctctatatagtaaaggaatttgttatgatgacttacagtctgtagtccaactccccaacaatggtcagctaggaatgggaaactcaaggatgcagtagtatagccattacaatccaccctttgtcagcttgacacaaataacatctcatgtccacatgaaaaaataacaaggtcatgaatacgcctaacatgatataactattcctggcaaaatcaaagatgtatttgtaaatttacaatggggcaatgtcccttgggaacattcttgtagtatctcaacttaaataccaattgatgttaaagaaattggaagaaagacaatgtattcttagcaaaataagacaggagcattcatgttactttataatcctctttggtcagcggatcatagagaataccccacgaggttataggcacatgcttggcagcagatagcattgtaacagaagtagaaaccataggcttttgagcaacttcttcatgtaacttgcttgtgccttcaggacctgctctggcccgatcatgtatataccacttccatttgataatagactgctactgtacacatcctactttatgacttgcagggtctgatagtacccagctcatggtgggcagttcaggttgcatagtaacttggtgtcctattgtcaaatgttcagtttccattaaggcccaatagcaggccaagagctgctttttaaagggagaatagttgtctgcagataatggtagagctttgctcctctgtgattcacctacaggggcctgccagaggctccaaacagcatctctatcagccacagacacctcaagtaccatcgggtctgctggatcatatggtccaagtggtagagcaacctgcacagaagcctggacctgttgaagggccttctcctgttccagaccctttacaaagctagcagctttccaagttacttggtaaataggcctaagtacacctaagtgagggatgtgcattctccagaatccaaatagacccatgaaacattgtgcttctttcttggtggtgggagggaccaggtgcaataacttatctttcaccttagaaagaatatctctgcatgtcccacaccactggactcctaagaagttcactgagatagatggtccttgaattttagttggatttatttcccatcctctgatatacatatgtgttaccaatgagtccaaagtggttgctacttcctgctcacttggtccaaccagcataatgtcatcaatatagtataccaatgtaatattttatagaagagacagatgatcaagatcccttctaactaagttatgacatagggcagaagagttaacatatcctcaaaactgtaaacgtttcagctagcattgccaattgaaagcaagttggacaggtactgagaaaaaggcatttgctagatcaatagctgcataccaggcactaggagatgtatttaatttgctcaaacaatgaaactacatctggtacagcaggtgcaattggctttactacctgatttagttttcaatagtcaactgacattctccatgattcatctgtcttctgcactggccaggtaggagagttaaagggagatgttgtgggaaccaccacccctgcctctttcaaatccttgatggtggcactaatttctgcagttcttccaggaatatgatattttttgatttactattttctttggcagaggctactctaaaggcttccatttagcctttccaaccataattgcccttactccacaggtcagggaaccaatgtgagagttctgccaatttctgagtatatctatcccaattatatattctggaactggggaaatgaccacagaatgtgttctgggacctactggacctactgtgagtcggacatcagtcaaaactccattaatcacctggcctccataagcccctactttaactggagggccacaatgtttcttgggatttcctgggatcaaggtcaattcagaaccaatatccaatagaccccggaaagtctatttccttcccaacgcccaccctcaccccccaccccaccccacccccaccccgtgtacagttacccttgggggaaaaataaaagcctgtaggtccctctgcagaagaactggagaaaggctaacacaaaacttttagatgtcttatcaagatccttccttgggaacctggccatcccttcattcaaggggttctggatctgcaaactggctcaagtctggaaattgattcactggctaagactgccttttgccatgatccagtgtagcctttctttcatttgtttgtgaattgttctgtttatacagatcaaacagatatgcagtaggcttcctgtctatttcatgcctggaaacatcatgattgattagccagtaccaaaggtccgaaggagtcatgccattagaaatttcacctctcctgtgctgaccattacaggctaggtcattatacatgttgttttgtctacactgcccgctataataactatcaccttgtctctggcgattcaatgctgccacctggcccttgttacctgggggcccagttaaacctgttgtggatagccttggggctagttatatttgatgttaattccattctcctgtgaggggttttgaacaaggaatgagtcagcaggtgatttcctgctaacctccttcccaccttaatttgtaaaataaagggaagctgatgattgggcagataaagggaaggtggagcccaagactgggcgagggaagaaaatgaagcacatggcctggagaaaccgcaagtcctaaggggtctcatagatggagaagatggtagtgtagtggtagatctgcccaatctaggtgcacagcatatattcatattaattgagttgtgtttttattgctgggatatatttgggttggaaatttacagcaacatataatgctgtccattataataactatgatcaccttgtctctggcaattcagtgctgccacctggcccttgtcaccttggggcccaattaaacccactgcatttaattcatccaattcagcaatagcatctccacctaaggtctggcacaaggaaagggacaagaacaaaactcttcaactgtactggtacgcctctcaccagtgtgcatcttataggatttgtgaaggggatatcttctggtccttcccattgtaaaggattaggttttacagaatgtatccactctagtattgcactttccctgagccttaaaatccctttgtcaacactaagccaagggatatcaggcatctccaactccttttcagtagtccatcttttgataagctcttcagccaaccattcaaacatacttctgaaaccctttttaactgtgaaagctttcatatttaacctagaatctccactcagaggatccatgtcaataaactcagcctgatctagttttatgttccttctaccattatcttacacccttaaaatccattcccacacatatttcccagacttctatttgaatgaattagcaaactcattaagctccttagtagtgtagagaattttctcagggactacattttccacctcccctctaggagcctgtttttccttgtgtctagaataaattattggagggtcttgaggaacatcagtattgtcttgtccggcattttcttcagagaaagttgctgctgttttatcagacactgaggagttaatttcctcaggtgaaaaaggtattatttcaaggggtggggctgagtgtactacttcctcaggtgagataaacccttgagaatctggattcaaatgtctcagcttcaacagtgcccttcccaagttataaaatcccattctttgccaattaatgcccttactttaattactgacaccctctgaggttgagacttgaatttttgctgtaattcagccaaccttataatgagggcttcagtttgattttctgcaactggggctctatggctactaaagagaaggttctcttcaagggcacacttagaaacctttagattgtttgtttgcatctggagctgtccaattttatcatacagctcattcttttccttcaccaattttttcagagatactaagaacaacaagctagaaaaatcattttctgatttttcccccaacttgtagaacatttggtacaccgggtcacctaattcatagtcagttacaattgatagatcaagttaatcaaaggcattggcttctttaagtttgaaatatagtttctgccatgggccttcaatattctccgagctcccaggaaagagtatctggagaggtttcagtagttgaaggtactagtgaattattaaaccaactccaaattcttaaaagattcatccttatacttttgcttctctagaatcactcccagcaccaactaccttagggttttactgctgtgaacagataccaagaccaagacaacatttaattggggctggcttacaggttcagaggttcagtccattatcgtcaaggcaggaatatggcagcatccaggcaggcatgatgcaggcagggctaagagttctacatcttcgtctgaagggtgctagtggaagactgacttccaggcagtgaggatgaaggtcttatagcccacacccttagtgacacacctactccaagagggccacaccttctaatagtgccactccctgggctgagcatatacaaaccatctcaacactgtttttgttgttgttgttgtcgttccagtcttcaatgacctctggctcttacaatctatctgccccctcttctaatatcgtcactgagccctaggcaggggtagaggtagggtgatataaatgtgcctgagcactccacaaacagcctgcagtttgatcagttatgagtttcttcattaactgccattcactacacaaagtttctctgatgagtactaagtgctgcactaatctattggcatagagatgagaatttagaaggtagtttgctagtatgtctttttagcaaaatagtagtagtagattcacaccccgggcctgtgaactctccaaccatggattcttggcaaggtttatagttctagccatatgatttatcctatgcagcaggctttaaacccaatcagcaatttgcctttataacatttattccactgttgtacccatggcatatcttatcatactagtcattattgtagcccataggcttcatagctaggtaagactgttaacttttactccccagtaccatgtatagcagcttcaaatactatgaaatctagccagcaggaaagaagcttcctgttcagtacctacttgatttctccaagtcttgtgaccaaaacttgtggtatctttaacaataagaacttactatcaaggtctggtggatgaccaagagcaatgacaatagaccgtgttgtttagggtgtctccaggacatccctaatcaacaagagaagtattttagtcaagattctctagaggaacagaactggtgtgtgtgtgtgtgtgtgtgtgtgtgtgtgtgtatgcacacacacacacacacacacacatatatatatataatatatatatacacatatacatacatacatatgtatgttacaagtgaatttgtaacttattggctctggtcttgttattccaactctggctacctcctgacagaaagtttaagaatctagtaattgttcagtctacacaactggatgtctcagctggtctccagattagtatcctaaagaagtaggttctaacactagtaaaggaatgcctcagcagcaagatatgtgaacttttcagtgagagtgaaggcaagcagggaaaagccaaaagtttccctcttccttgtccttttacaaagactgccactagatagtatgacccagatttaggatgagtcttcctacctcaaatggtccaataaagaaaaattgctcacatgtatgcccagatgcttgggttttagttggttccagatgtagtcaagttgttaatcaagattatccatcacagggcagtatcccaaatgtggcactcaaatttttatttgacaacctatggcttctggaggagtattatcctctctatagaataactccacttaactcttttagatgaatatgtataaaatagtgagttaccatgtcttagagttttactgctgtgaacagacaccatgaccaaggtaagtcttataaagggcaacatttaattgggtctgtcttatagttataagttgagtggttcagtccattatcatcaagggagtcatggcagcatctaggcaggcatggtgcaggcagagccaagagttctacatctttatcatctttatccgaaggcttctagcagaatactggctttcaggcagttagggtgagggcctttagtccatacccacattgacatagctatcccaacagagccacaccttctaatagtgccactctctgagccaagcatatataagccatcacataccacatagtttttttcaactatccttagtgctaattatctgtttcccatctcttcctctatcctaccctcccatccctctccccacttaaacctccctcactattattcccttttcccattcatatacctgtgttctactattccaccttacttaagatctttctttcctctccccactaagcagtctcaaatttcagagaatttgtaaattaaaatacattaattatttgattattaagttagatataaagtaaaaggataactataaaatctttatatcaatagagaaacttatttttttatttattaacatttcaaaggttatccatccatttccagtttcccctctgcaaactccctatccccctccctcctgcttctatgagggtaatcccccacccatctacccactcctgcctctctgccctagcattcccctatactgaggcatcgaatctccacaggaccaagggcctctcctcccactgatgcccagcaaggcactcctctgctacatatgcagctggagccatgggttcctccatgtgtactctttggttggtggtttagtccctgggagcttgggggggggttctggttggttgatattattgttcttcctatggggttgcaaaccccttcagctcccttcagccttttctctaactcccccattgagacacttttaaaaacttctatgtcacgaagaaatcataaaatagaaaatacttagttggatgttgtggtgcatgcctttaatcccatcactcctgaggcagaggcaggtggatctctgagtttgaggccagcctggtctacaaagagagttccaggacattcaggaatacaaaaagaaacctgtctcaaaaaagaaaccccccaaaaattaaatgaacaataataaaacagtacatatcaaaatagaaggctctgtaactccttccaagggtgttttgttcccacttctaaggaggggcatagtgtccacacttcagtcttcatttttcttgagtttcatgtgtttaggaaattgtatcttatatcttgggtatcctaggttttgggctaatatccacttatcagtgagtacatattgtgtgagttcctttgtgaatgtgttacctcactcaggatgatgccctccaggtccatccatttggctaggaatttcataaattcattctttttaatagctgagtagtactccattgtgtagatgtaccacattttctgtatccattccagggccaaaaagggggagtgggtgggtaggagagtgggggtgggtggctaagggggacttttggtatagcattggaaatgtaaatgagctaaatacctaataaaaatggaaaagaaaaaaatatcaatcaaaatagaaggcagaacaaaatagtagctgaataagctgctttcgcaatcatctccacttaggcataccaagttgaatagttattcatatattaattcatactttcacatgagctaaggaaagcaaatgacagactataatgtctgcttttacaataaaaaataagtcaagacatactatagaaaacagaaaggaaagtgttgcctttaccatgtatccctcaactttaagcagcacagctcagagttgaggaagggagaagatttaagctcagtccttagactttcaatctaattcctggcctgacagtgaaatctgctgctgagtagcacaaaccttagtacctcctctggtttatacttatgttggcaggttgtaggctcaggataagacataacttggcagcattagtagcctccatcatggtagtggagctggggctagttcattcaaacttattttgcttagataagattgcaatgacccatggaaacaaaaattaattactaaacaagacacacactgcttcttttccttgctagtaaagaagttgaactttactttgttaacattagaaggtacttctggattaagaaatctagaaaaccaccacaaatgtccacctttacctttgtgaaattatctataaaattgttctagcacagcaagaaaatataatgaatttctaagtgaacagaaaatactgcataaggtacattgaattcatatgttcttatcttttcatttctagggtagattgaattcatatgttcttaactttttatttgctctttctttgaaaactgcattcactgttggtatggccatttaactcatgttggccaacagtaagttagtagatatgataaaagctttaaatttgaatgtgtttcactcagtttctcaggcctctgcttcagattccagactttgagcctatagagctttaaaataatacattcatttttagctgccaagtttgggtaaatttgttttaacagcactagataattaatgtgaataaatacaagaaatgttaaacttgaactttaagtatcaataagaactcaaaaattttaaaaataaatttgtgacagcattgtcctctgagagagcctagcaatattgataccacagaagcagtgagcacattaggtctagatgttggtctctaccttttcccagtaaaagacatctgggcttattgagaaataactaatttctgagacaagaaaactgtctggcaatcttgaaacatctctgtgtgctggaatataaagctaatgaggtccatgtgaaaaagtacataggagtttacttgaattctttctattagccaagtttgagaaaaatttgaatatcaaaaatataatagaagggtgtattggctcatgtagaatttgattacctatataacaggagatttgagtagactcagtcttaaaaagttctcaaacttaggatcatcaataatggggaagagtggtgcatcaagtgtcctttgatgcaatgcaataaggacacacattctacgtatctaatgtgaagtcattcaaatttagaattcagtccatgcaataacacaagtattttgtgcttttaaagatgtcacgctggagagatggcccagcaggtaagagcactgactgctcttccagaggtcctgagttcaaaacccagcaaccacatggtggctcacaaccacctgtaatgggttctgatgccctgttctggtgtgtctgaagacagctacagtgtacttatacaaaataaataaataaataaataaatccttatttatctatttggtttttttggtttttcgagacagggtttctctgtgtagccctggctatcctggaactcactttgtagaccaggctgaccttgaactcagaaatcgacctgcctctgcctcccaagtgctgggatgaaaggcattcgccaccacacccggcttatttatttttcttaaaatttttattaagcgaattttatacatcaaacttattaataattttgagtattttgagaataaaataatacataaaaatttgttcaacgtttatattcatatcctttcataccctaaaatatcactaatgaacatttaatactatccataactgaggctcctatatctaatgttgaatactacgacgtttcaaaacatacaaaatattctttggggattaagcataataaaaaggcataaaatattaaaagtgaatcattaaggaatatattcaaaagcccttatatgataccacctggcataaagagagagtatttaaaactcactatatatctctttacgttgtctaactataagtttacttttaaaagattatcagtgtttctaggagagaaattattttatcagtaagtatacttcaaaaattttaaaataacaaaatctctttgaagttaaacattaagaaaatgctaatttcaagcacaatgagaaaaattaatatttccatgatgtttgtagaaaatgattttaatattttcaactgttaatattcaacaaacagaataaaattttaaattatatttcattgttatgtctcccttttcatttctgattttataaatttgactactgtctctgtgccctctggttaatctagctaaaggtttatctatcttattgattttctcaaaaaaaaaaaacagctcctagtttgcttgattctttgtatagttctttttgtttctatttggttgatttcagccctgagtttgattatttgctgcggtctactcctcttgggtgtatttgcttcattttgttctagaactttaaggtatgttatcaagctgctagggtatactctgtccaaactaattttttctttatttcttccttgatcaagttatcattgagtacatagtttttcagcttccatgtgtatgtgtgctttccattgtttttgttgtaatttaagaccattaaagaatatatctagcccttctggtcagcgccaacacctacgcatcttgggcgcggagtctgcggacacacccaaggtccgcacaggactctccatgggatcttaggacctctggtgagtggaaaacaacagctgctccaatccaatctcgtgggacctgagacagcattaattaaggaagcagaaaacccggcctgaccagggtcacaagtcccttccagacggcaccagcaccaacaccggggcaccttgggcgcagagtctgcggacacccccatggtcacagaggactctccaagggatcttaggacctctggtgactagaacacaacttctgccaggaggcaggttcgaacaccagatatctgggcaccttccctgcaagaggagagcttgcctgcagagagtactctgaccactgaaattcaggagagagctagtctcccaggtctgctgatagaggctaacataatcacctgaggaacaagctctaaccagagccaactataacaactaactccagagattaccagatggcaaaagacaaatgtaagaatcttactaacagaaaccaagaccactcaccatcatcagaacgtagcacatccaccccacacagtcctgggaaccccaaaatacccaacaagatagacccggatttaaaagcatatctcatgatgatggtagaggatatcaagaaggaatttaataattcacttaagggaatacaggagaacactgctaaacaggtagaagaccttaaaaaggaagcacaaaaatcccttaaagaattgcaggaaaacacgaccaaacaggtgatggaattgaataaaaccatccaagacctaaaaagggaagtagacacaatgaagaaaacccaaagtgaggcaacgctggagatagaaaccctaagaaagaaatctggaaccatagatgccagcatcagcaacagaatacaagagatggaagagagaatctcaggtgcagaagattccatagagaacatcggcacaacaatcaaagaaaatggaaaatgcaaaaagatcctaactcaaaacatccaggaaatccaggatacaatgagaagaccaaacctacgcataataggagtggatgagaatgaagattttcaactcaaaggaccagcaaacatcttcaacaaaattattgaagaaaacttcccaaatctaaagaaagagatgcccatgaacatacaagaagcctacagaactccaaatagactggaccagaaaagaaattcctcccgacacataataatcagaacaacaaatacactgaataaagatagaatattaaaagcagtaagggaaaaaggtcaagtaacatataaaggcaggcctatcagaattacaccagatttttcaccagagactatgaaagcaagaagatcatggacagatgttatacagacacaaagagaacacaaatgccagcccagggtactatactcagccaaactctcaattaccatggagggagaaaacaaagtatttcacgacaaaaccaaattcacacattatctgtccatgaatccagcccttcaaagggtaatgacagaaaaaaaaaaaaaaaaaaaaaacaatacaaggacggaaaccacgccatagaaaaagcaagaaagtaatccttcaacaattcaaaaagaagacagccacaagaacagaatgccaactctaacaacaaaaataataggaagcaacaattacttttccttaatatctcttaatatcaatggactcaattccccaataattatttttattaggtatttagctcatttacatttccaatgctataccaaaagtcccccatacccacccacccccactcccctacccacccactccccctttttggccctggcgttgccctgtactggggcatataaagtttgcgtgtccaatgggcctctctttccagtgatggccgacgaggccatcttttgatacatatgcagctagagtcaagagctccgggatactggttagttcattatgttgttccgcctatagagttgcagatccctttagctccttgggtactttctctagctcctccattgggagccctgtgatacatcaattagctgactgtgagcatccacttctgtgtttgctaggccctggaatagtctcacaagagacagctacatctgggtcctttcgataaaatcttgctagtgtatgcaatggtgtcagcgtttggatgctgattatggggtggatccctggatatggcagtctctacatggaccatcctttcatctcagctccaaactttgtctctgtaactccttcccagggtgttttgttcccacttctaaggaggggcatagtgtccacacttcagtcttcatttttcttgagtttcatgtgtttaggaaattgtatcttatatcttgggtatcctaggttttgggctaatattcacttatcagtgagtacatattgtgtgagttcctttgtgaatgtgttacctcactcaggatgatgccctccaggtccatccatttggctaggaatttcataaattcattctttttaatagctgagtagtactccattgtgtagatgtaccacattttctgtatccattcctctgttgaggggcatctgggttctttccagcttctggctattataaataaggctgctatgaacatagtggagcatgtgtccttcttaccagttggggcatcttctggatatatgcccaggagaggtattgctggatcctccagtagtactatgtccaattttctgaggaaccgccagactgatttccagagtggttgtacaagcctgcaatcccaccaacaatggaggagtgttcctctttctccacatccacgccagcatctgctgtcacctgaatttttgatcttagccattctgactggtgtgaggtggaatctcagggttgttttgatttgcatttccctgatgattaaggatgttgaacattttttcaggtgcatctctgccattcggtattcctcaggtgagaattctttgttcagttctgagccccatttttaaatggggttatttgattttctgaagtccaccttcttgagttctttatatatgttggatattagtcccctatctgatttaggataggtaaagatcctttcccaatctgttggtggtctttttgtcttattgacggtgtcttttgccttgcagaaactttggagtttcattaggtcccatttgtcaattctcgatcttacagcacaagccattgctgttctgttcaggaatttttcccctgtgcccatatcttcaaggcttttccccactttctcctctataagtttcagtgtctctggttttatgtgaagttccttgatccacttagatttgaccttagtacaaggagataagtatggatcgattcccattcttctacatgataacaaccagttgtgccagcaccaattgttgaaaatgctatctttcttccactggatggttttagctcccttgtcgaagatcaagtgaccataggtgtgtgggttcatttctgggtcttcaattctattccattggtctactggtctgtctctataccagtaccgtgcagtttttatcacaattgctctgtagtaaagctttaggtcaggcatggtgattccaccagaggttcttttatccttgagaagactttttgctatcctaggttttttgttattccagatgaatttgcaaattgctccttctaattcgttgaagaattgagttggaattttgatggggattgcattgaatctgtagattgcttttggcaagatagccatttttacaatgttgatcctgccaatccatgagcatgggagatctttccatcttctgagatcttctttaatttctttcttcagagatttgaagtttttatcatatagatctttcacttccttagttagagtcacgccaagatattttatattatttgtgactattgagaagggtgttgtttccctaatttctttctcagcctgtttattctttgtatagagaaaggccattgacttgttggagtttattttatatccagctactattccagggatgcagggatggtttaatatacagaaattcatcaacgtaatccattatattaaaaaacccgaaagacaaaaaccatatgatcatctccttagactgggagaaagcatttgacaaaatccaacacccattcatgataaaatcttggaaagatcagaaattcaagtcccatacctaaacatgataaaagcaatttacagcaaaccagtagccaacatcaaagtaaatggtgagaagctggaagcaatcccactaaaatcagggactagataaggctgcctactttctccctacctattcgacattgtacttgaagtcctagccagagcaattagacaacaaaaggagatcaagtggatacaaattggaaaggaagaagtcaaaatatcactttttgcagatgatatgatagtatatataagtgaccctaaaaattccaccatagaactcctaaatctgataaacagcttcagtgaagtagctggatataaaattaactcaaacaagtcaatggcctttctctacacaaagaataaacaggctgagaatgaaattagggaaacaacacccttctcaatagtcacaaataatataaaataccttggcgtgactctaactaaggaagtgaaagatttgtatgataagaactttaagtctctgaagaaagaaattaaagaagatctcagaagatggaaagatctcccatgctcatggattggcaggatcaacattgtaaaaatggctatcttgccaaaagcaatctacagattcaatgtaatccccatcaaaattccaactcaattcttcaatgaattagaaagagcaatctgcaaattcatctggaataacaaaaaaacctatgatagcaaaaactcttctcaacgataaaagaacctctggtggaatcaccatgcctgacctaaagctgtactacagagcaattgtgataaaaactgcatggtactggtatagtgacagacaagtagaccaatggaatagaattgaagacccagaaatgaacccacacacctatggtcacttgatctttgacaagagagcaaaaaccatccagtggaaaaaagacagcattttcaacaaatgatgctggcacaactggtggttatcatttagaagaatgcgagttgatccattcctatctccttgtattaaggtcaaatctaagtggatcaaggaactccacatataaccagagacactgaaacttatagaggagaaagtggggaaaagcctcgaagatatggtcacaggggaaaaaattcctgaatagaacagcaatggctggtgctataagatggagaattgacaaatgggacctcataaaactgcaaatggctggtgctataagatggagaattgacaaatgggacctcataaaactgcaacgccagggccaaaaagggggagtgggtgggtaggggagtgggggtgtgtggctatgggggacttttggtatagcattggaaatgtaaatgatgtaaatacctaataaaaaatggaaaagaaaaaaaaactgcaaagcttctgtaaggcaaaagacaccgtcaataagacaaaaaggccgccaacagattgggaaagtatctttacctatcctaaatcagataggggactaatatccaatatatataaagaactcaagaaggtggactccagaaaatcaaataacaccattaaaaaatggagctaggagctaaacaaagaattctctcctgaggaataccgaatgtctgagaagcacctgaaaaaatgttcagcatccttaatcgtcagggaaatgcaaatcaaaacagccctgagattccatctcacaccactcagaatggctaagatcaaaaattcaggtggcagcagatgctggcgaggatgtggagaaagaggaacactcctccattgttttgggattgcaagcttgtacaaccactctggaaatcagtctggaggttcctcagaaaatggaacatagttctactggaggatcccgcaatacctctcctgggcatctatatccagaagatgttccaactggtaagaaagacacatgctccactatgttcatagcagccttatttataatagctagaagctggaaagaacccagatgcccctcaacagaggaatggatacagaaaatgtggtacatttacacaatggagtactactcagctattcaaaagaatgaatttatgaaattcctaggcaaatggttgaacctggagggcatcatcctgagtgagataacccaatcacaaaagaactcacatgatatgttctcactgataagtggatattagcccagaaacttagaatacccaagatataagatacagtttgcgaaacacatgaaacttaataagaatgaagaccaaagtgtggacactttgccccttcatggaaatgggaacaaaacacccatggaaggagttacagagacaaatctggagctgagacaaaaggatggaccatctagagaccgccatatccagggatccatcccataatcagcctccaaacgctgacaccattccatacactaacaagattttgctgaaaggaccctgatatagctgtctcttgtgagactatgccggggcctagcaaacacagaagtggatgctcacagtcagctattggatggatcacagggcccccaatggaggagctatagaaagtacccaaggagctaaagggaactgcacccttataggtggaacaacaatatgaactaaccagtaccccggagctcttgtctctagctgcatatgcatcaaaagatggcctagttggccatctctggaaagagaggcccattggtcatgcaaactttatatgccccagtacaggggaacgccagggccaaaaagtgggagtgggtgggtaggggagcggggggagggtatgggggacttttcggatagcattggaaatgtaaatgtgggaaatacctaataaaaaatatttaaaaaaaaaacctagctcccagcatgctttcaaaggacatcttctgtctttcctggatcaccacagtgaagtattacagttgtacagtttcccaatctggccttggcttgctcaggtaaaactttgttatatattttgtaaggcatagattctatattgtaatgtccaatgcaaaagaaaaaattaatgaaattgtaaattttattgttttaacatgtatgcatgtttaatgatgtttacattttgaagtaaaatttatgtttcattaaaaaaaaagaaaatatctaataaaaaaaaaagaccatccttagtctgtggtgatctgagagggtacatgggattatttaaatcttcttgtatctgttgaggcctgttttgtgaccaattatatggtcaattttcgagaaagtaccatgaggtgctgagaagaaggtatatacttttgcttttgatgaaatgttctataaatatctgttagatccatttggttcataccttaagttagtttcactgtgactctgtttagttttgtttccatgatctgtccattgatgagagtggggtgttgaagtctcccactattatcccactattacacatgagctgcaatgtgtgttttgagctttactacagtttctttaatgaatgtggctgcccttgtatttggagcatagatattcagaattaagagttcattttggaagattttacctttgacgagtatgaagtgcccctccttttctttcctgataactttgggttggaagtcaattttattcaatattagaatggctattccagcttgtttcttcagactgtttgcacttcagagttggcactatccaataactaaacaagacaattgtgtctataatgtaaaatagggggaaagtagtgggaggtgagatcagagtggccagcaaccatatctttcaaggcttggaggtcagaatgagtatggatttcattctaagtgttgtggaagattttgttttggaggaaggaggtatgaatgttttgcttatgtgtgtgtctttgcaccacatgcattcagtgctcaaggaagccagaaaagagtggtgaatctcttggaacttgagttacgaacagtgagagtttgcttgcagttgctagaaattgaacctaagtcctctggaaaagtagtcagtgcttttgaccactgaaccatccccatccccatgatagatgattttaagcaggaatgtggcacctctgggtttacatattgagaagcttttttctaggtattccctaagggggccaaagttagagaaccaattaaattgacatttctaggttaagagatagaccaagcctcagtagttttaagaagctccctaggaaagtaatttcagcttgtgtgttgtgataagcattgtgacagatccaaagaggagaaaggatcatgagaaagagaaaccatgaatgagtgactgaccaagcagggggctaattaacttgaagcttctagcaagaatgtggtgttataaatggtatatttttcttgtcagtcagttaatacatgctgtctatcctctttcaggtttttcaggggaatcaggactcatccacacctatgatgaattctctagacccaccattactcactcgctatcttcgaattcacccccagatctgggagcaccaaattgctctgaggcttgagattctaggatgtgaggcccagcagcaatactgaggtagcctctgcatcacctgcttattccccttcctcagctcaaagattgtcttaatgttttattgctgtgaagagacactatgaccatggcaactcttataaaataaagcatttaatcagggcttacttatagtttaaaaggtttcgtccattatcattgtgggaaacatagtggcacacaaacagacatggtgctggagaagttgctgagagttctatatctggatccacagatatagcaggaagagaaagacactgggactgacttgggctttttaaacttcaaagtctaccccccagtgacacattccttcgacatgcccatacccattcaaacaaggccacttctaatctttctctgtagtgtcccccctgatgactaagcattcaattttatgagcctgtggggaccattattattcaaaccacaaggatattccttcaccaattcaagaccaccatccctcttaggcatctacattacatacacattgtttatactaccatcattttatttaaaagaatacaatcatatatcaccctacttctaaattatttattctgaattttctgaaaacttaactttcaacatttgaaatgaaagctgtgaagcaccacactaaattttatactttcagttatcaatataagttatgcactaccaaaccccccaaaaaatcaataacagaatcagaactagaaaaacaattagctttataacctcttaaataactcatgtccattaactacattcattcattcctggtccccttatatttagccttttatgttctcttttcttcatgttatactgtacccaaatgtacattatatcatatatatatatatatgtgtgtgtgtgtgtgtgtgtgtgtatacacatatacatatacatacatacatacacactattggctagattatacatatgagagaaaacatacagatttttttctttctgagattatatggcctcatttaataatatacattctaagactatgttccagaaaattttatcttcatttaaactttaatttaaaacctggaacactgaaacttttaggaaaaagaaaaacacacaagatacccttcaagatatcagtacaggcaagaactttttaaatagaactccaacactacaggaactaaccccaagtatcaaaatatgggattatatgaaaaaaattttgtgcagcaagagaaacaaccatcagttaacatacagtccagagaatcaaagacaaatccttaccagctacacttcataaaggggctaattactatccaggggctggtgagatggctcagaggttaagagcactgactgttcttccagaagtcctgagttcaattctcagtggccacttggtggctcacaacatctgtaattggacctgatgcccttttctggtgtgtctgaagacagctacagtgtacatacataaaataaatttttaaaaaatcattaaaaaacaaatctgataagttgaaaagttgaaggtgatgtggagagtaagcagccttgattcactgttagtggaggtataaattaaggaacccattgtggaaatcagtttggaatttttcaaaaattaaaaatagaactaccatatgactcagctgtttcactcctgaacatatacccaggaaactccataccctaccataaaaatctttgtacctttatgtttatcttgctttattcactatagcaaagaactagagccaacaggtgaatgtatagtaaaaatttggtatatacatacatatatattcataatggaatgttacttagctctaatgataatagtcttctaaaggagatatttttaatatttctataggaaagtgcaaactttaaagttatattaaagagctttgccaaaaacaaaccttcaacttctgttttactccttccttcctgctaaaacaaaaatacagtggaaaattttatactatacttctgtagttgaaatatcaaggaatcataaaaagcgcaactgttgaagactccagtatacattgccacattctcaccagaagcttgaggatgtttcattggtccttcttcctctatactttattatgattacacaagcacatcatggtagcaatgacagtcgactgaacagtcagaggatgcattcaaaatttgcagccaaagctgatttgaaaaaataagaagaaaatttgtctcagtctcagaaaaggcaaaagaacggatacatttgtttcatgctagtgcattttgtagtaatcctacttgacccttctgtgactactttgggaactataacacaactatcaaagtccacaactgacaaaactatagatggtatggttttatttcctataaaattctaatcactcaaatctaacttaataatctgattttgatagtcttttcccattgatgacgcagctctatttctcagatgcttctggaatcaactgttttttttgttttagttatgaattaaaataaaacattgatgcatacaaatgaaagcctttgagaattgttttaatactagaaataaaaatgtgagcaatgaatggtactttaatagatattggcttttacaatatttatacataaatatttatagataaatagagaaggcatgaagtttggaagggataggagggtaagggtggacccgggaggaggtaggtaagtgtgggatatgatcaaaatatattgtgtgcattgtgaatttctcaaaagaattaataaaaatagtatatgtaaaaacaaagacattcactagtagaaaacccaatttgggtattgtaacagactaaattgaatccagaataagaaagtgtgatatattttttgagagaagagataaaaatcacaagtggagcttcagtctgtgagaagaacctacaaagagttggcacacgaggagttgctatttaagaaggaagggagggagggaaggaggaagggaaggagagagagaaaaataaatagattctaaaaaattgatatctcattggcaacaattgaagccaacatatattcaatgtactgtaatatacattgtaaagtaactgcatatgtacattgtaatgtaattgaataacttttgacctaaaatttaaagagtattaggtagcagagatagttcagtcgttagaatgctgccttacaagcataaacatctaagtttgatccccagaatttgcattaaaaacaaaaggctagacaaagaggtttatgcttgtaactagttctggggaggtagggatggggaatccttggagcttactggccagccagcctagcctacttggccagtttcagggtagcagtacactgtctcaaaaacaggtggatggtacttgcagaacaacactcaaggttgtccagtgacctatacacaggcacgtacaagttcgctttcacaaacatgaacattcacacacatatacaagatagaaagtgttgatacaatatagccatgtcaacaagtgaaatataaaaacttgaaagacaaattatctttatgcatcctttccactgttataaaaagacctgtaggtgtaaactataaaacataatttgtgtagttctatagttcttcaaatgagttaattggatttataattgtatttaaaatgccacttcacaagaaggttaaacaaagttctgctaataaattgaaattgttaaaatttattaactagattagtgatgaaaatgaaagtaaaaaatcaactagccatcttaacattttctttccttctatatcattagttttaagataagtgactgtttaatacaaaaaataacaaaaatttaaaaaaagaaatcataagtctttagttgtgtattatctctgaatggcattgtccttttctgattcaaagagaaagtagtctcttgtgccatattccatttgcccagtgcctctgcctggccttaggggaaggaactgaagtaggcacagatgtcagatggacacaggacaaaaggttgacgttctctggccttgtaactttctaactatgctggatgctgaagctcatgaatctggagactatactcaggttgttctgtggctgttaacagctggtttctctcttcttttactctctatgcttaattttacttctaagctctaccttactgttcagtgctaaaaacttaactcattctatgcttcattaagcactgaagaaacttaactctttgtctgctatttactttataaatctctgtgcttgattagcacttggaaacataactcttgcttacttctctatacttgatcaagcactagaaaacttaactctcacttactttataattttctgtgcttgattaagtgctgcaaaacctaacacttactttaattctttgatttaacactgatcccagaatgtctctggcaaattaacacctgtttctgaacaggaagggattaagtaaagaattaattgctagtgctcctttctctcttgcctagaagcctcacatctcactggtcaggtaagagggaggcttggagcaataaaacttttattgaaccagggaaagtttacaaaaggaaaaacttttacacaagcaaatatgcataagcacacatacattcatatacacattcatacacattcatgcacattcatacattcctattgggctcagttactaatctcatactaacatacttatacccacacacctatgcaatatggagcaaagcccaagtgccatcccagaaaaaaaaaaaaaaaacctcactcattatggataaaaaataagcttcaacccttttattactaaatgaaataagaaacctgtctcattgtaagaaaagcctgcctgctgccttctgctctccctgtagctccttctcaatctcttttctcctcttgcatacttaattctactttcttctttttctctcctcatcatcacagctcctcatctctgtaaagctggttttgcttctactcagtctcaccaactgttccacatcccatacttcctccccacccccatctctataaggatgtccccacacttccaccccccattccaccagacctccccactccctggggcctccagtctcttgagggttaggcgcatcatctctgaatgaacacagacccggaagtcctcttctgtatgtgtgttgggaacttcatatcagctggtgtatggtgcctattgggtgggccagtgtgtgagagatctcaggggtccaggttaattgagactgctggtcctcctaaagggtcaccctcctcagcttcttccagattttccctaattcaacaacaggggtcagctgcttctgtccattggttgggtgtaagtatctacatctgactctttcagctgcttgttgagtcttttggagggcagtcatgataggtcccttttttgtgagcgcttcacagactcagtaatagtatcaggccttgggacctccccttgagctggatcccactttgggcctgtcactggaccttcttttcctcaggctcctctccatttccatccctgcagatctttcagataggcacaattatgggtcagagtttaagaattaagaagttacgtatttgtgtgtatggaatccctatgagacagtacatcttcattaatctgcagaaaaacttcccaatgggagggggagtaatgcccagggattgttagattaatgatgacagaaaaggcatagcaatagcagaaatcaattctgggacaacatccctcaggccttgcctccaagggctcattcacctcagttccaaggagaaccatctctggaaaatcacctgctggtcttagcctttcctagatgactcctgacactctttgaatctttctgaaatcctgcgtgcatgggctttgtgaataccatgtgtaaactgttaaaaaaaatggaagagaacatgtgtgctgcattaatttactctgttcatgttcatactgcattgtcccatttaatttccctaaaaaatgcaaagtcaacaataaaatcattagaaatttcaacacagagataacagaactttacagcaagtacaaggcacaactctgcattggtcgcttgaaattcaaaagtcactcagcttattaactccaaaattcagacctagaggaactatgagatcataaatgctttttttcccattttagttgctaaatgtggaaatatttttttacatagaatagatactttatgtagcagtcatattctttttatatgtggaacaatcaagcacagggtactaattaccaacttataccagcctcactacctatcagctatcctaaagagcacagggcagtattcaagtttaacactcctacagatcttgctgggtccttcagctcttccaaattctaggaaaggtgtatgcttagctctttgaagaaggttaatttttcatacaaataaaaccaacaccaaatctggaagtatttaagaactgaatgtactaggtatagtggcccacatctttaatcctagcactggaaaggcttctatggcagacttctatgagtttgaggccagcctggtctacatagcaaattacagaccagccaaagatacatagtgagaacatatttaaaaactacaacaaaactgaagcttttagaccaactcactgggcttcagcttatccttcagacttccaatgaacacttgcttctgacaaatttatttcatattccctttctctgatgtggccctttaaggttctctttctgtgtgaatccactatgcttgcagtatcttaatgctcggcagtcttcctgaaaggtttcttttttagaacattaactgtcccattctcaaaaggttttgatgtgtaatctgtgataccttaggaaaaaaaaatattctaagccccaaagacactttaatttctgtttgtcctcgatcaacaaagaccttttttctcattactgggaataagcctaggatctcacacatactaggcaagcacatgctcactgagccatgtccccctaaccccatacagtatttatcgcgttactgtagcaaagggctgctacttcagtgcatcccaagaaatatccaatcgttctgaactcagtagtaagcaatgccagttaatactgctgccagtgtagcctgaagagtcacagaggcctgtgctcaaacatacctaggctctcgactgccatgtaaaattccagaatgaatcagagtaaagcacggttagtgggattatttgttaaatatcaagacaagacccatttgtgagaaccaagtgtgagcattagagtgcattagcagtagttcaatatgtgatttgagggctttgaagctatttagtctgcaactaaacttagttattatagaaaatatgcactggtatgtaatttttttcaaagcctacttttaatgatgattttttaaaacactttaacctcccttctatcccaccacccaacagaggtgagcctgttttagaaatggttctgtggagcaaatttcatctgcattgtcaggaaatcagcagtttggttcacaggtcagcagtggcagctctatccactcacaaacacttcacagatataccagcagtccagttcaatagtgtcaggatagcagcagtggtggcatgacctagcaggaacagctaggccttgatcaaatcagcaggaaggaccaggagggactccaggagttctttgccatgcctctctcagcaaagcaaagatcagcaaagacaccaaaccaagaaactatacagctagctctaccagcaagccaagccttgacaagccaaacctcaagctcctttcccagtccactgagtcctatttattctccctccaaacatcacgtgttctccacaggttttgcctcgcctcatgttttgcatggtgtctctgtctcagctgacatcactctgccaatcagagtccttagaagtggcaagaaactatagcacaccatcagttttttgtttcgtttctcaatatggaatcctgacaaatgcagctcaactacacaatgtaaggcagaccaatacatgtgtgtcattactgaaaaatccttcatcacatgtcctttcatgtggttgctttagcagaacatcctttcacctgtgtccgcttcagtgaaacattccttcatgagtctgctttagcaaaacaccatccaacacaactgactttccaaagaacccttaagtttccacttcactagtatatttatttttcttttctaaataattttatcattgaagagaaaatttttaaaatttttattttattttaaattcatttttacactccatattccattccccgctccccccatccaccctccgactacaacatgtcccacacctcctccccactccacccctgtctccacgtggatatgcccatcccctaccacacctggcctctaaactccctggggcctccagtctcttgagggttaggtgcatcatctctgaatgaacacagacccaggagtcctgaagaggaaatattttaaggtacattatatagattactatctggtgaaaaatgctagttaagattataatcattaagcaaagttgttatttactcaattcacaaggagattgaccttaaggcatagtttattagccattttaataactttttgtgatcttagaaaagagatcacaagtatttttgcagatgatctaatcggttatataaaaattcctgagtatcggccagtgagagatggaaatcataactgacggaaaatctctttcccttcctatgtatcctctatttcctagctaattatccttaatcctgtcatattaaatgatttaccattaataatatgaaatagcattttattcattaaaatttgatatacacactattataaggtatagcaaataccatgtagtgaaaaaatattttggaattcttcacacctaagagactattagtgtgaaaatgaatttaagtctcagctcacatatgcatgcttgggtggaaaaaaagctgtctgttcatttaactaccaactagagcccacatgggtgtcaaaggtggttaatgatatcatagaatggtggaattctagctggaattccagagacttaagaggatgactggtgatcttctgaaggcttttagcctctgaataccatagtctaatcccactgtttcgttggttacctttgttcttagttaatttcaggtaagtggctttacaccagaataacctctctttaagccccttccaaatataaataaacatatctgttaaaatatcttaagtaaagaaagcccaaaatattgttatcagtgagatggctggggtctttttgttctacttggatgaaaattgtcaatatgtgaggaaaaagttttctagtgctagtagtcttgggcttttgagtgtcaaagaatcatgggctggggtgactgaatcagaagtctgtaataccaagtgaagagaaccagagatgtaaggcctttgaccttcgaaaccagaaatgtatagctataggtgttctgacataactgctttacataaccaagctagtaaaggttctcagttttaaatagcagcttatgacgatagcaacagtcagaagcagttaatattacaactcatagccttagggcaagcctctcaggcttggtagtactcaggaacttttctaaagactagggcttgtagtcatcattacaaaagttctgccttctctaacctctgtcactactctgctgccactgccatcccgtgctgttgctcccaaacctttgctgctactctactgctgctagctcattccacttcactcaattaaaaaaaagtagccaaaacaatagcattctagaaaaccttttattaaatagatctaatattgtaaccctagggggtgggactgtaaaatagaagggtttctccccacttactcaaaaatgacctgaacaacctggctaaaatatgcaaatgaatggttatatttataccactgacagcacaacttccagctctaccaatgactgacttcttgctgagttactgagaagccgttctttctcccatcttgagtaagattagctgtcatgttaggtcatctaaacttcatcaaggcttttcatgccaagaataatgccttccaaggccaatataggttttctagagcaagtttggaaaaggcaggatttcaggtttttcagccttttgcctgtttgatattcaaatgaaagtgaatggctattagatcacttatgattgtgactattcctcattcatgagagacacccatcattcatttactcaaaaaaaaatgattgggctggaaatatggctctgcgaataaaagcacttacctcacaagactagcaacctgagtttaatccctggatgccaaaataaaatgagagaatgggctcaatcccaaaagttgtccttatgtgcacataatggcatatatgttcctaaacatacacaatagtacatagattaaaataaaaatataaaatacctgaatatgtcataggtaatattcagtagcaaaccaaacaggaaagaaatctctgtattcatggagaacataccatagttcaataaaataaataatgaagtagattaattagatttgatgaagttaatgaagaaaactcaagcaggtaaatgactaggtggtttgtttgaaagtgggacaacttttataaagggattgcaaggaaatctacctcaagaaaatgacatttgagcactttaaacatgtgaagtaagaaggcatagacatacatgtctgggttggggagaattctttgaaacagggatggcaagtgaaagagctccaaggaaagaataagtcatagagccgaatcacagtgaccaaggaaagcttagtaggacgtgagatcagagaccaattctgactactgcttacaagatctgcttgcttactgtagaaaaaagatgaaggaaagcaaaaacacgacgacggtgaggggttatgcaaagttcataaagctaacgggattactctgacagattaaacgtaggattcaaaagtgaacaaatatacttgaatggtacccaacaagcacatagttttatgggagttttattggtttgtagaacccacagactgggttcaagattcacttgtataaatcaatgaattacctttgtgtgtggcagctggaaagctttttaatataagttgaatgagactctgttctgacttttcagacaaaacaagagttcatgaagcctctgaagctgttctgcataggactgctcttgtgccctctggtctgtctcttgttagagacagctcctcctccttcagctttacttacccttgaagtgaaagaaaaaacaggattgaaatcagatgcaatgggagtatttgctattaggaagaatacttctgacatcaacagacaagtctcaggtcaggaaaaaaaaaactgctttcatgctattttgacaaatgttcccaagtacaactgaacaattaaagttgttgcaggtggattaagggaaggtttcacaaaggtagcaaaattgattttttttttaaattggcatatcttcttttatttttttattatttatttattttaaactccatattttattcccctcccgatccaccctccaactgttccacatccaatacctcctcacctccccttctccacgaggatgtcaccaccccccacccccaccacaccacacctctaaattccctggggcctccagtctcttgagggttaggtgcatcttctctgactgatcccagacccagcagacctatgctgtatatgtattgggggcctcatatcagctggtgtatgctgcctggctggtgttccagtatctgagagatctggggatccaggttaattgaaacttacagggtcgccctcctcctcagcttcttacagctttcccctaattcaaccacaggggccagcaacttctgtccattggttgggtgcaaacacctgcatctgatgctttcagctgcttgttaggtcttttggagggcagtcatgataggtccctttttgtgagcgctccacagcttcagtaatagtgtcaggtcttggggcctccccttgagctggatcccactctgggcctgttgctgggccttcttttc

SEQ ID NO: 12 - DNA, 231325 bp, Mus musculus
gaaaagaaggcccagcaacaggcccagagtgggatccagctcaaggggaggccccaagacctgacactattactgaagctgtggagcgctcacaaaaagggacctatcatgactgccctccaaaagacctaacaagcagctgaaagcatcagatgcaggtgtttgcacccaaccaatggacagaagttgctggcccctgtggttgaattaggggaaagctgtaagaagctgaggaggagggcgaccctgtaagtttcaattaacctggatccccagatctctcagatactggaacaccagccaggcagcatacaccagctgatatgaggcccccaatacatatacagcataggtctgctgggtctgggatcagtcagagaagatgcacctaaccctcaagagactggaggccccagggaatttagaggtgtggtgtggtgggggtggggggtggtgacatcctcgtggagaaggggaggtgaggaggtattggatgtggaacagttggagggtggatcgggaggggaataaaatatggagtttaaaataaataaataataaaaaaataaaagaagatatgccaatttaaaaaaaaaatcaattttgctacctttgtgaaaccttcccttaatccacctgcaacaactttaattgttcagttgtacttgggaacatttgtcaaaatagcatgaaagcagttttttttttcctgacctgagacttgtctgttgatgtcagaagtattcttcctaatagcaaatactcccattgcatctgatttcaatcctgttttttctttcacttcaagggtaagtaaagctgaaggaggaggagctgtctctaacaagagacagaccagagggcacaagagcagtcctatgcagaacagcttcagaggcttcatgaactcttgttttgtctgaaaagtcagaacagagtctcattcaacttatattaaaaagctttccagctgccacacacaaaggtaattcattgatttatacaagtgaatcttgaacccagtctgtgggttctacaaaccaataaaactcccataaaactatgtgcttgttgggtaccattcaagtatatttgttcacttttgaatcctacgtttaatctgtcagagtaatcccgttagctttatgaactttgcataacccctcaccgtcgtcgtgtttttgctttccttcatcttttttctacagtaagcaagcagatcttgtaagcagtagtcagaattggtctctgatctcacgtcctactaagctttccttggtcactgtgattcggctctatgacttattctttccttggagctctttcacttgccatccctgtttcaaagaattctccccaacccagacatgtatgtctatgccttcttacttcacatgtttaaagtgctcaaatgtcattttcttgaggtagatttccttgcaatccctttataaaagttgtcccactttcaaacaaaccacctagtcatttacctgcttgagttttcttcattaacttcatcaaatctaattaatctacttcattatttattttattgaactatggtatgttctccatgaatacagagatttctttcctgtttggtttgctactgaatattacctatgacatattcaggtattttatatttttattttaatctatgtactattgtgtatgtttaggaacatatatgccattatgtgcacataaggacaacttttgggattgagcccattctctcattttattttggcatccagggattaaactcaggttgctagtcttgtgaggtaagtgcttttattcgcagagccatatttccagcccaatcatttttttttgagtaaatgaatgatgggtgtctctcatgaatgaggaatagtcacaatcataagtgatctaatagccattcactttcatttgaatatcaaacaggcaaaaggctgaaaaacctgaaatcctgccttttccaaacttgctctagaaaacctatattggccttggaaggcattattcttggcatgaaaagccttgatgaagtttagatgacctaacatgacagctaatcttactcaagatgggagaaagaacggcttctcagtaactcagcaagaagtcagtcattggtagagctggaagttgtgctgtcagtggtataaatataaccattcatttgcatattttagccaggttgttcaggtcatttttgagtaagtggggagaaacccttctattttacagtcccaccccctagggttacaatattagatctatttaataaaaggttttctagaatgctattgttttggctacttttttttaattgagtgaagtggaatgagctagcagcagtagagtagcagcaaaggtttgggagcaacagcacgggatggcagtggcagcagagtagtgacagaggttagagaaggcagaacttttgtaatgatgactacaagccctagtctttagaaaagttcctgagtactaccaagcctgagaggcttgccctaaggctatgagttgtaatattaactgcttctgactgttgctatcgtcataagctgctatttaaaactgagaacctttactagcttggttatgtaaagcagttatgtcagaacacctatagctatacatttctggtttcgaaggtcaaaggccttacatctctggttctcttcacttggtattacagacttctgattcagtcaccccagcccatgattctttgacactcaaaagcccaagactactagcactagaaaactttttcctcacatattgacaattttcatccaagtagaacaaaaagaccccagccatctcactgataacaatattttgggctttctttacttaagatattttaacagatatgtttatttatatttggaaggggcttaaagagaggttattctggtgtaaagccacttacctgaaattaactaagaacaaaggtaaccaacgaaacagtgggattagactatggtattcagaggctaaaagccttcagaagatcaccagtcatcctcttaagtctctggaattccagctagaattccaccattctatgatatcattaaccacctttgacacccatgtgggctctagttggtagttaaatgaacagacagctttttttccacccaagcatgcatatgtgagctgagacttaaattcattttcacactaatagtctcttaggtgtgaagaattccaaaatattttttcactacatggtatttgctataccttataatagtgtgtatatcaaattttaatgaataaaatgctatttcatattattaatggtaaatcatttaatatgacaggattaaggataattagctaggaaatagaggatacataggaagggaaagagattttccgtcagttatgatttccatctctcactggccgatactcaggaatttttatataaccgattagatcatctgcaaaaatacttgtgatctcttttctaagatcacaaaaagttattaaaatggctaataaactatgccttaaggtcaatctccttgtgaattgagtaaataacaactttgcttaatgattataatcttaactagcatttttcaccagatagtaatctatataatgtaccttaaaatatttcctcttcaggactcctgggtctgtgttcattcagagatgatgcacctaaccctcaagagactggaggccccagggagtttagaggccaggtgtggtaggggatgggcatatccacgtggagacaggggtggagtggggaggaggtgtgggacatgttgtagtcggagggtggatggggggagcggggaatggaatatggagtgtaaaaatgaatttaaaataaaataaaaattttaaaaattttctcttcaatgataaaattatttagaaaagaaaaataaatatactagtgaagtggaaacttaagggttctttggaaagtcagttgtgttggatggtgttttgctaaagcagactcatgaaggaatgtttcactgaagcggacacaggtgaaaggatgttctgctaaagcaaccacatgaaaggacatgtgatgaaggatttttcagtaatgacacacatgtattggtctgccttacattgtgtagttgagctgcatttgtcaggattccatattgagaaacgaaacaaaaaactgatggtgtgctatagtttcttgccacttctaaggactctgattggcagagtgatgtcagctgagacagagacaccatgcaaaacatgaggcgaggcaaaacctgtggagaacacgtgatgtttggagggagaataaataggactcagtggactgggaaaggagcttgaggtttggcttgtcaaggcttggcttgctggtagagctagctgtatagtttcttggtttggtgtctttgctgatctttgctttgctgagagaggcatggcaaagaactcctggagtccctcctggtccttcctgctgatttgatcaaggcctagctgttcctgctaggtcatgccaccactgctgctatcctgacactattgaactggactgctggtatatctgtgaagtgtttgtgagtggatagagctgccactgctgacctgtgaaccaaactgctgatttcctgacaatgcagatgaaatttgctccacagaaccatttctaaaacaggctcacctctgttgggtggtgggatagaagggaggttaaagtgttttaaaaaatcatcattaaaagtaggctttgaaaaaaattacataccagtgcatattttctataataactaagtttagttgcagactaaatagcttcaaagccctcaaatcacatattgaactactgctaatgcactctaatgctcacacttggttctcacaaatgggtcttgtcttgatatttaacaaataatcccactaaccgtgctttactctgattcattctggaattttacatggcagtcgagagcctaggtatgtttgagcacaggcctctgtgactcttcaggctacactggcagcagtattaactggcattgcttactactgagttcagaacgattggatatttcttgggatgcactgaagtagcagccctttgctacagtaacgcgataaatactgtatggggttagggggacatggctcagtgagcatgtgcttgcctagtatgtgtgagatcctaggcttattcccagtaatgagaaaaaaggtctttgttgatcgaggacaaacagaaattaaagtgtctttggggcttagaatatttttttttcctaaggtatcacagattacacatcaaaaccttttgagaatgggacagttaatgttctaaaaaagaaacctttcaggaagactgccgagcattaagatactgcaagcatagtggattcacacagaaagagaaccttaaagggccacatcagagaaagggaatatgaaataaatttgtcagaagcaagtgttcattggaagtctgaaggataagctgaagcccagtgagttggtctaaaagcttcagttttgttgtagtttttaaatatgttctcactatgtatctttggctggtctgtaatttgctatgtagaccaggctggcctcaaactcatagaagtctgccatagaagcctttccagtgctaggattaaagatgtgggccactatacctagtacattcagttcttaaatacttccagatttggtgttggttttatttgtatgaaaaattaaccttcttcaaagagctaagcatacacctttcctagaatttggaagagctgaaggacccagcaagatctgtaggagtgttaaacttgaatactgccctgtgctctttaggatagctgataggtagtgaggctggtataagttggtaattagtaccctgtgcttgattgttccacatataaaaagaatatgactgctacataaagtatctattctatgtaaaaaaatatttccacatttagcaactaaaatgggaaaaaaagcatttatgatctcatagttcctctaggtctgaattttggagttaataagctgagtgacttttgaatttcaagcgaccaatgcagagttgtgccttgtacttgctgtaaagttctgttatctctgtgttgaaatttctaatgattttattgttgactttgcattttttagggaaattaaatgggacaatgcagtatgaacatgaacagagtaaattaatgcagcacacatgttctcttccattttttttaacagtttacacatggtattcacaaagcccatgcacgcaggatttcagaaagattcaaagagtgtcaggagtcatctaggaaaggctaagaccagcaggtgattttccagagatggttctccttggaactgaggtgaatgagcccttggaggcaaggcctgagggatgttgtcccagaattgatttctgctattgctatgccttttctgtcatcattaatctaacaatccctgggcattactccccctcccattgggaagtttttctgcagattaatgaagatgtactgtctcatagggattccatacacacaaatacgtaacttcttaattcttaaactctgacccataattgtgcctatctgaaagatctgcagggatggaaatggagaggagcctgaggaaaagaaggtccagtgacaggcccaaagtgggatccagctcaaggggaggtcccaaggcctgatactattactgagtctgtgaagcgctcacaaaaaagggacctatcatgactgccctccaaaagactcaacaagcagctgaaagagtcagatgtagatacttacacccaaccaatggacagaagcagctgacccctgttgttgaattagggaaaatctggaagaagctgaggagggtgaccctttaggaggaccagcagtctcaattaacctggacccctgagatctctcacacactggcccacccaataggcaccatacaccagctgatatgaagttcccaacacacatacagaagaggacttccgggtctgtgttcattcagagatgatgcgcctaaccctcaagagactggaggccccagggagtggggaggtctggtggaatggggggtggaagtgtggggacatccttatagagatgggggtggggaggaagtatgggatgtggaacagttggtgagactgagtagaagcaaaaccagctttacagagatgaggagctgtgatgatgaggagagaaaaagaagaaagtagaattaagtatgcaagaggagaaaagagattgagaaggagctacagggagagcagaaggcagcaggcaggcttttcttacaatgagacaggtttcttatttcatttagtaataaaagggttgaagcttattttttatccataatgagtgaggttttttttttttttttctgggatggcacttgggctttgctccatattgcataggtgtgtgggtataagtatgttagtatgagattagtaactgagcccaataggaatgtatgaatgtgcatgaatgtgtatgaatgtgtatatgaatgtatgtgtgcttatgcatatttgcttgtgtaaaagtttttccttttgtaaactttccctggttcaataaaagttttattgctccaagcctccctcttacctgaccagtgagatgtgaggcttctaggcaagagagaaaggagcactagcaattaattctttacttaatcccttcctgttcagaaacaggtgttaatttgccagagacattctgggatcagtgttaaatcaaagaattaaagtaagtgttaggttttgcagcacttaatcaagcacagaaaattataaagtaagtgagagttaagttttctagtgcttgatcaagtatagagaagtaagcaagagttatgtttccaagtgctaatcaagcacagagatttataaagtaaatagcagacaaagagttaagtttcttcagtgcttaatgaagcatagaatgagttaagtttttagcactgaacagtaaggtagagcttagaagtaaaattaagcatagagagtaaaagaagagagaaaccagctgttaacagccacagaacaacctgagtatagtctccagattcatgagcttcagcatccagcatagttagaaagttacaaggccagagaacgtcaaccttttgtcctgtgtccatctgacatctgtgcctacttcagttccttcccctaaggccaggcagaggcactgggcaaatggaatatggcacaagagactactttctctttgaatcagaaaaggacaatgccattcagagataatacacaactaaagacttatgatttctttttttaaatttttgttattttttgtattaaacagtcacttatcttaaaactaatgatatagaaggaaagaaaatgttaagatggctagttgattttttactttcattttcatcactaatctagttaataaattttaacaatttcaatttattagcagaactttgtttaaccttcttgtgaagtggcattttaaatacaattataaatccaattaactcatttgaagaactatagaactacacaaattatgttttatagtttacacctacaggtctttttataacagtggaaaggatgcataaagataatttgtctttcaagtttttatatttcacttgttgacatggctatattgtatcaacactttctatcttgtatatgtgtgtgaatgttcatgtttgtgaaagcgaacttgtacgtgcctgtgtataggtcactggacaaccttgagtgttgttctgcaagtaccatccacctgtttttgagacagtgtactgctaccctgaaactggccaagtaggctaggctggctggccagtaagctccaaggattccccatccctacctccccagaactagttacaagcataaacctctttgtctagccttttgtttttaatgcaaattctggggatcaaacttagatgtttatgcttgtaaggcagcattctaacgactgaactatctctgctacctaatactctttaaattttaggtcaaaagttattcaattacattacaatgtacatatgcagttactttacaatgtatattacagtacattgaatatatgttggcttcaattgttgccaatgagatatcaattttttagaatctatttatttttctctctctccttcccttcctccttccctccctcccttccttcttaaatagcaactcctcgtgtgccaactctttgtaggttcttctcacagactgaagctccacttgtgatttttatctcttctctcaaaaaatatatcacactttcttattctggattcaatttagtctgttacaatacccaaattgggttttctactagtgaatgtctttgtttttacatatactatttttattaattcttttgagaaattcacaatgcacacaatatattttgatcatatcccacacttacctacctcctcccgggtccacccttaccctcctatcccttccaaacttcatgccttctctatttatctataaatatttatgtataaatattgtaaaagccaatatctattaaagtaccattcattgctcacatttttatttctagtattaaaacaattctcaaaggctttcatttgtatgcatcaatgttttattttaattcataactaaaacaaaaaaaacagttgattccagaagcatctgagaaatagagctgcgtcatcaatgggaaaagactatcaaaatcagattattaagttagatttgagtgattagaattttataggaaataaaaccataccatctatagttttgtcagttgtggactttgatagttgtgttatagttcccaaagtagtcacagaagggtcaagtaggattactacaaaatgcactagcatgaaacaaatgtatccgttcttttgccttttctgagactgagacaaattttcttcttattttttcaaatcagctttggctgcaaattttgaatgcatcctctgactgttcagtcgactgtcattgctaccatgatgtgcttgtgtaatcataataaagtatagaggaagaaggaccaatgaaacatcctcaagcttctggtgagaatgtggcaatgtatactggagtcttcaacagttgcgctttttatgattccttgatatttcaactacagaagtatagtataaaattttccactgtatttttgttttagcaggaaggaaggagtaaaacagaagttgaaggtttgtttttggcaaagctctttaatataactttaaagtttgcactttcctatagaaatattaaaaatatctcctttagaagactattatcattagagctaagtaacattccattatgaatatatatgtatgtatataccaaatttttactatacattcacctgttggctctagttctttgctatagtgaataaagcaagataaacataaaggtacaaagatttttatggtagggtatggagtttcctgggtatatgttcaggagtgaaacagctgagtcatatggtagttctatttttaatttttgaaaaattccaaactgatttccacaatgggttccttaatttatacctccactaacagtgaatcaaggctgcttactctccacatcaccttcaacttttcaacttatcagatttgttttttaatgattttttaaaaatttattttatgtatgtacactgtagctgtcttcagacacaccagaaaagggcatcaggtccaattacagatgttgtgagccaccaagtggccactgagaattgaactcaggacttctggaagaacagtcagtgctcttaacctctgagccatctcaccagcccctggatagtaattagcccctttatgaagtgtagctggtaaggatttgtctttgattctctggactgtatgttaactgatggttgtttctcttgctgcacaaaatttttttcatataatcccatattttgatacttggggttagttcctgtagtgttggagttctatttaaaaagttcttgcctgtactgatatcttgaagggtatcttgtgtgtttttctttttcctaaaagtttcagtgttccaggttttaaattaaagtttaaatgaagataaaattttctggaacatagtcttagaatgtatattattaaatgaggccatataatctcagaaagaaaaaaatctgtatgttttctctcatatgtataatctagccaatagtgtgtatgtatgtatgtatatgtatatgtgtatacacacacacacacacacacacacatatatatatatatatgatataatgtacatttgggtacagtataacatgaagaaaagagaacataaaaggctaaatataaggggaccaggaatgaatgaatgtagttaatggacatgagttatttaagaggttataaagctaattgtttttctagttctgattctgttattgattttttggggggtttggtagtgcataacttatattgataactgaaagtataaaatttagtgtggtgcttcacagctttcatttcaaatgttgaaagttaagttttcagaaaattcagaataaataatttagaagtagggtgatatatgattgtattcttttaaataaaatgatggtagtataaacaatgtgtatgtaatgtagatgcctaagagggatggtggtcttgaattggtgaaggaatatccttgtggtttgaataataatggtccccacaggctcataaaattgaatgcttagtcatcaggggggacactacagagaaagattagaagtggccttgtttgaatgggtatgggcatgtcgaaggaatgtgtcactggggggtagactttgaagtttaaaaagcccaagtcagtcccagtgtctttctcttcctgctatatctgtggatccagatatagaactctcagcaacttctccagcaccatgtctgtttgtgtgccactatgtttcccacaatgataatggacgaaaccttttaaactataagtaagccctgattaaatgctttattttataagagttgccatggtcatagtgtctcttcacagcaataaaacattaagacaatctttgagctgaggaaggggaataagcaggtgatgcagaggctacctcagtattgctgctgggcctcacatcctagaatctcaagcctcagagcaatttggtgctcccagatctgggggtgaattcgaagatagcgagtgagtaatggtgggtctagagaattcatcataggtgtggatgagtcctgattcccctgaaaaacctgaaagaggatagacagcatgtattaactgactgacaagaaaaatataccatttataacaccacattcttgctagaagcttcaagttaattagccccctgcttggtcagtcactcattcatggtttctctttctcatgatcctttctcctctttggatctgtcacaatgcttatcacaacacacaagctgaaattactttcctagggagcttcttaaaactactgaggcttggtctatctcttaacctagaaatgtcaatttaattggttctctaactttggcccccttagggaatacctagaaaaaagcttctcaatatgtaaacccagaggtgccacattcctgcttaaaatcatctatcatggggatggggatggttcagtggtcaaaagcactgactacttttccagaggacttaggttcaatttctagcaactgcaagcaaactctcactgttcgtaactcaagttccaagagattcaccactcttttctggcttccttgagcactgaatgcatgtggtgcaaagacacacacataagcaaaacattcatacctccttcctccaaaacaaaatcttccacaacacttagaatgaaatccatactcattctgacctccaagccttgaaagatatggttgctggccactctgatctcacctcccactactttccccctattttacattatagacacaattgtcttgtttagttattggatagtgccaactctgaagtgcaaacagtctgaagaaacaagctggaatagccattctaatattgaataaaattgacttccaacccaaagttatcaggaaagaaaaggaggggcacttcatactcgtcaaaggtaaaatcttccaaaatgaactcttaattctgaatatctatgctccaaatacaagggcagccacattcattaaagaaactgtagtaaagctcaaaacacacattgcagctcatgtgtaatagtgggataatagtgggagacttcaacaccccactctcatcaatggacagatcatggaaacaaaactaaacagagtcacagtgaaactaacttaaggtatgaaccaaatggatctaacagatatttatagaacatttcatcaaaagcaaaagtatataccttcttctcagcacctcatggtactttctcgaaaattgaccatataattggtcacaaaacaggcctcaacagatacaagaagatttaaataatcccatgtaccctctcagatcaccacagactaaggatggtcttttttttttattagatattttctttttttttaatgaaacataaattttacttcaaaatgtaaacatcattaaacatgcatacatgttaaaacaataaaatttacaatttcattaattttttcttttgcattggacattacaatatagaatctatgccttacaaaatatataacaaagttttacctgagcaagccaaggccagattgggaaactgtacaactgtaatacttcactgtggtgatccaggaaagacagaagatgtcctttgaaagcatgctgggagctaggttttttttttaaatattttttattaggtatttcccacatttacatttccaatgctatccgaaaagtcccccataccctccccccgctcccctacccacccactcccactttttggccctggcgttcccctgtactggggcatataaagtttgcatgaccaatgggcctctctttccagagatggccaactaggccatcttttgatgcatatgcagctagagacaagagctccggggtactggttagttcatattgttgttccacctataagggtgcagttccctttagctccttgggtactttctatagctcctccattgggggccctgtgatccatccaatagctgactgtgagcatccacttctgtgtttgctaggccccggcatagtctcacaagagacagctatatcagggtcctttcagcaaaatcttgttagtgtatggaatggtgtcagcgtttggaggctgattatgggatggatccctggatatggcggtctctagatggtccatccttttgtctcagctccagatttgtctctgtaactccttccatgggtgttttgttcccatttccatgaaggggcaaagtgtccacactttggtcttcattcttattaagtttcatgtgtttcgcaaactgtatcttatatcttgggtattctaagtttctgggctaatatccacttatcagtgagaacatatcatgtgagttcttttgtgattgggttatctcactcaggatgatgccctccaggttcaaccatttgcctaggaatttcataaattcattcttttgaatagctgagtagtactccattgtgtaaatgtaccacattttctgtatccattcctctgttgaggggcatctgggttctttccagcttctagctattataaataaggctgctatgaacatagtggagcatgtgtctttcttaccagttggaacatcttctggatatagatgcccaggagaggtattgcgggatcctccagtagaactatgttccattttctgaggaacctccagactgatttccagagtggttgtacaagcttgcaatcccaaaacaatggaggagtgttcctctttctccacatcctcgccagcatctgctgccacctgaatttttgatcttagccattctgagtggtgtgagatggaatctcagggctgttttgatttgcatttccctgacgattaaggatgctgaacattttttcaggtgcttctcagacattcggtattcctcaggagagaattctttgtttagctcctagctccattttttaatggtgttatttgattttctggagtccaccttcttgagttctttatatatattggatattagtcccctatctgatttaggataggtaaagatactttcccaatctgttggcggcctttttgtcttattgacggtgtcttttgccttacagaagctttgcagtttttttttcttttccattttttattaggtatttacatcatttacatttccaatgctataccaaaagtcccccatagccacacacccccactcccctacccacccactccccctttttggccctggcgttgcagttttatgaggtcccatttgtcaattctccatcttatagcaccagccatttgcagttttatgaggtcccatttgtcaattctccatcttatagcaccagccattgctgttctattcaggaattttttcccctgtgaccatatcttcgaggcttttccccactttctcctctataagtttcagtgtctctggttatatgtggagttccttgatccacttagatttgaccttaatacaaggagataggaatggatcaactcgcattcttctaaatgataaccaccagttgtgccagcatcatttgttgaaaatgctgtcttttttccactggatggtttttgctctcttgtcaaagatcaagtgaccataggtgtgtgggttcatttctgggtcttcaattctattccattggtctacttgtctgtcactataccagtaccatgcagtttttatcacaattgctctgtagtacagctttaggtcaggcatggtgattccaccagaggttcttttatcgttgagaagagtttttgctatcataggtttttttgttattccagatgaatttgcagattgctctttctaattcattgaagaattgagttggaattttgatggggattacattgaatctgtagattgcttttggcaagatagccatttttacaatgttgatcctgccaatccatgagcatgggagatctttccatcttctgagatcttctttaatttctttcttcagagacttaaagttcttatcatacaaatctttcacttccttagttagagtcacgccaaggtattttatattatttgtgactattgagaagggtgttgtttccctaatttcattctcagcctgtttattctttgtgtagagaaaggccattgacttgtttgagttaattttatatccagctacttcactgaagctgtttatcagatttaggagttctatggtggaatttttagggtcacttatatatactatcatatcatctgcaaaaagtgatattttgacttcttcctttccaatttgtatccacttgatctccttttgttgtctaattgctctggctaggacttcaagtacaatgtcgaataggtagggagaaagtaggcagccttatctagtccctgattttagtgggattgcttccagcttctcaccatttactttgatgttggctactggtttgctgtaaattgcttttatcatgtttaggtatgggacttgaatttctgatctttccaagattttatcatgaatgggtgttggattttgtcaaatgctttctcccagtctaaggagatgatcatatggtttttgtctttcgggttttttaatataatggattacgttgatgaatttctgtatattaaaccatccctgcatccctggaatagtagctggatataaaataaactccaacaagtcaatggcctttctctatacaaagaataaacaggctgagaaagaaattagggaaacaacacccttctcaatagtcacaaataatataaaatatcttggcgtgactctaactaaggaagtgaaagatctatatgataaaaacttcaaatctctgaagaaagaaattaaagaagatctcagaagatggaaagatctcccatgctcatggattggcaggatcaacattgtaaaaatggctatcttgccaaaagcaatctacagattcaatgcaatccccatcaaaattccaactcaattcttcaacgaattagaaggagcaatttgcaaattcatctggaataacaaaaaacctaggatagcaaaaagtcttctcaaggataaaagaacctctggtggaatcaccatgcctgacctaaagctttactacagagcaattgtgataaaaactgcacggtactggtatagagacagaccagtagaccaatggaatagaattgaagacccagaaatgaacccacacacctatggtcacttgatcttcgacaagggagctaaaaccatccagtggaagaaagatagcattttcaacaattggtgctggcacaactggttgttatcatgtagaagaatgggaatcgatccatacttatctccttgtactaaggtcaaatctaagtggatcaaggaacttcacataaaaccagagacactgaaacttatagaggagaaagtggggaaaagccttgaagatatgggcacaggggaaaaattcctgaacagaacagcaatggcttgtgctgtaagatcgagaattgacaaatgggacctaatgaaactccaaagtttctgcaaggcaaaagacaccgtcaataagacaaaaagaccaccaacagattgggaaaggatctttacctatcctaaatcagataggggactaatatccaacatatataaagaactcaagaaggtggacttcagaaaatcaaataaccccatttaaaaatggggctcagaactgaacaaagaattctcacctgaggaataccgaatggcagagatgcacctgaaaaaatgttcaacatccttaatcatcagggaaatgcaaatcaaaacaaccctgagattccacctcacaccagtcagaatggctaagatcaaaaattcaggtgacagcagatgctggcgtggatgtggagaaagaggaacactcctccattgttggtgggattgcaggcttgtacaaccactctggaaatcagtctggcggttcctcagaaaattggacatagtactactggaggatccagcaatacctctcctgggcatatatccagaagatgccccaactggtaagaaggacacatgctccactatgttcatagcagccttatttataatagccagaagctggaaagaacccagatgcccctcaacagaggaatggatacagaaaatgtggtacatctacacaatggagtactactcagctattaaaaagaatgaatttatgaaattcctagccaaatggatggacctggagggcatcatcctgagtgaggtaacacattcacaaaggaactcacacaatatgtactcactgataagtgaatattagcccaaaacctaggatacccaagatataagatacaatttcctaaacacatgaaactcaagaaaaatgaagactgaagtgtggacactatgcccctccttagaagtgggaacaaaacaccctgggaaggagttacagagacaaagtttggagctgagatgaaaggatggtccatgtagagactgccatatccagggatccaccccataatcagcatccaaacgctgacaccattgcatacactagcaagattttatcgaaaggacccagatgtagctgtctcttgtgagactattccagggcctagcaaacacagaagtggatgctcacagtcagctaattgatgtatcacagggctcccaatggaggagctagagaaagtacccaaggagctaaagggatctgcaactctataggcggaacaacataatgaactaaccagtatcccggagctcttgactctagctgcatatgtatcaaaagatggcctcgtcggccatcactggaaagagaggcccattggacacgcaaactttatatgccccagtacagggcaacgccagggccaaaaagggggagtgggtgggtaggggagtgggggtgggtgggtatgggggacttttggtatagcattggaaatgtaaatgagctaaatacctaataaaaataattattggggaattgagtccattgatattaagagatattaaggaaaagtaattgttgcttcctattatttttgttgttagagttggcattctgttcttgtggctgtcttctttttgaattgttgaaggattactttcttgctttttctatggcgtggtttccgtccttgtattgttttttttttttttttttttttctgtcattaccctttgaagggctggattcatggacagataatgtgtgaatttggttttgtcgtgaaatactttgttttctccctccatggtaattgagagtttggctgagtatagtaccctgggctggcatttgtgttctctttgtgtctgtataacatctgtccatgatcttcttgctttcatagtctctggtgaaaaatctggtgtaattctgataggcctgcctttatatgttacttgacctttttcccttactgcttttaatattctatctttattcagtgtatttgttgttctgattattatgtgtcgggaggaatttcttttctggtccagtctatttggagttctgtaggcttcttgtatgttcatgggcatctctttctttagatttgggaagttttcttcaataattttgttgaagatgtttgctggtcctttgagttgaaaatcttcattctcatccactcctattatgcgtaggtttggtcttctcattgtatcctggatttcctggatgttttgagttaggatctttttgcattttccattttctttgattgttgtgccgatgttctctatggaatcttctgcacctgagattctctcttccatctcttgtattctgttgctgatgctggcatctatggttccagatttctttcttagggtttctatctccagcgttgcctcactttgggttttcttcattgtgtctacttccctttttaggtcttggatggttttattcaattccatcacctgtttggtcgtgttttcctgcaattctttaagggatttttgtgcttcctttttaaggtcttctacctgtttagcagtgttctcctgtattcccttaagtgaattattaaattccttcttgatatcctctaccatcatcatgagatatgcttttaaatccgggtctatcttgttgggtattttggggttcccaggactgtgtggggtggatgtgctacgttctgatgatggtgagtggtcttggtttctgttagtaagattcttacatttgtcttttgccatctggtaatctctggagttagttgttatagttggctctggttagagcttgttcctcaggtgattatgttagcctctatcagcagacctgggagactagctctctcctgaatttcagtggtcagagtactctctgcaggcaagctctcctcttgcagggaaggtgcccagatatctggtgttcgaacctgcctcctggcagaagttgtgttctagtcaccagaggtcctaagatcccttggagagtcctctgtgaccatgggggtgtccgcagactctgcgcccaaggtgccccggtgttggtgctggtgccgtctggaagggacttgtgaccctggtcaggccgggttttctgcttccttaattaatgctgtctcaggtcccacgagattggattggagcagctgttgttttccactcaccagaggtcctaagatcccatggagagtcctgtgcggaccttgggtgtgtccgcagactccgcgcccaagatgcgtaggtgttggcgctgaccagaagggctagatatattctttaatggtcttaaattacaacaaaaacaatggaaagcacacatacacatggaagctgaaaaactatgtactcaatgataacttgatcaaggaagaaataaagaaaaaattagtttggacagagtataccctagcagcttgataacataccttaaagttctagaacaaaatgaagcaaatacacccaagaggagtagaccgcagcaaataatcaaactcagggctgaaatcaaccaaatagaaacaaaaagaactatacaaagaatcaagcaaactaggagctgttttttttttttgagaaaatcaataagatagataaacctttagctagattaaccagagggcacagagacagtagtcaaatttataaaatcagaaatgaaaagggagacataacaatgaaatataatttaaaattttattctgtttgttgaatattaacagttgaaaatattaaaatcattttctacaaacatcatggaaatattaatttttctcattgtgcttgaaattagcattttcttaatgtttaacttcaaagagattttgttattttaaaatttttgaagtatacttactgataaaataatttctctcctagaaacactgataatcttttaaaagtaaacttatagttagacaacgtaaagagatatatagtgagttttaaatactctctctttatgccaggtggtatcatataagggcttttgaatatattccttaatgattcacttttaatattttatgcctttttattatgcttaatccccaaagaatattttgtatgttttgaaacgtcgtagtattcaacattagatataggagcctcagttatggatagtattaaatgttcattagtgatattttagggtatgaaaggatatgaatataaacgttgaacaaatttttatgtattattttattctcaaaatactcaaaattattaataagtttgatgtataaaattcgcttaataaaaattttaagaaaaataaataagccgggtgtggtggcgaatgcctttcatcccagcacttgggaggcagaggcaggtcgatttctgagttcaaggtcagcctggtctacaaagtgagttccaggatagccagggctacacagagaaaccctgtctcgaaaaaccaaaaaaaccaaatagataaataaggatttatttatttatttatttattttgtataagtacactgtagctgtcttcagacacaccagaacagggcatcagaacccattacaggtggttgtgagccaccatgtggttgctgggttttgaactcaggacctctggaagagcagtcagtgctcttacctgctgggccatctctccagcgtgacatctttaaaagcacaaaatacttgtgttattgcatggactgaattctaaatttgaatgacttcacattagatacgtagaatgtgtgtccttattgcattgcatcaaaggacacttgatgcaccactcttccccattattgatgatcctaagtttgagaactttttaagactgagtctactcaaatctcctgttatataggtaatcaaattctacatgagccaatacacccttctattatatttttgatattcaaatttttctcaaacttggctaatagaaagaattcaagtaaactcctatgtactttttcacatggacctcattagctttatattccagcacacagagatgtttcaagattgccagacagttttcttgtctcagaaattagttatttctcaataagcccagatgtcttttactgggaaaaggtagagaccaacatctagacctaatgtgctcactgcttctgtggtatcaatattgctaggctctctcagaggacaatgctgtcacaaatttatttttaaaatttttgagttcttattgatacttaaagttcaagtttaacatttcttgtatttattcacattaattatctagtgctgttaaaacaaatttacccaaacttggcagctaaaaatgaatgtattattttaaagctctataggctcaaagtctggaatctgaagcagaggcctgagaaactgagtgaaacacattcaaatttaaagcttttatcatatctactaacttactgttggccaacatgagttaaatggccataccaacagtgaatgcagttttcaaagaaagagcaaataaaaagttaagaacatatgaattcaatctaccctagaaatgaaaagataagaacatatgaattcaatgtaccttatgcagtattttctgttcacttagaaattcattatattttcttgctgtgctagaacaattttatagataatttcacaaaggtaaaggtggacatttgtggtggttttctagatttcttaatccagaagtaccttctaatgttaacaaagtaaagttcaacttctttactagcaaggaaaagaagcagtgtgtgtcttgtttagtaattaatttttgtttccatgggtcattgcaatcttatctaagcaaaataagtttgaatgaactagccccagctccactaccatgatggaggctactaatgctgccaagttatgtcttatcctgagcctacaacctgccaacataagtataaaccagaggaggtactaaggtttgtgctactcagcagcagatttcactgtcaggccaggaattagattgaaagtctaaggactgagcttaaatcttctcccttcctcaactctgagctgtgctgcttaaagttgagggatacatggtaaaggcaacactttcctttctgttttctatagtatgtcttgacttattttttattgtaaaagcagacattatagtctgtcatttgctttccttagctcatgtgaaagtatgaattaatatatgaataactattcaacttggtatgcctaagtggagatgattgcgaaagcagcttattcagctactattttgttctgccttctattttgattgatatttttttcttttccatttttattaggtatttagctcatttacatttccaatgctataccaaaagtcccccttagccacccacccccactctcctacccacccactccccctttttggccctggaatggatacagaaaatgtggtacatctacacaatggagtactactcagctattaaaaagaatgaatttatgaaattcctagccaaatggatggacctggagggcatcatcctgagtgaggtaacacattcacaaaggaactcacacaatatgtactcactgataagtggatattagcccaaaacctaggatacccaagatataagatacaatttcctaaacacatgaaactcaagaaaaatgaagactgaagtgtggacactatgcccctccttagaagtgggaacaaaacacccttggaaggagttacagagccttctattttgatatgtactgttttattattgttcatttaatttttggggggtttcttttttgagacaggtttctttttgtattcctgaatgtcctggaactctctttgtagaccaggctggcctcaaactcagagatccacctgcctctgcctcaggagtgatgggattaaaggcatgcaccacaacatccaactaagtattttctattttatgatttcttcgtgacatagaagtttttaaaagtgtctcaatgggggagttagagaaaaggctgaagggagctgaaggggtttgcaaccccataggaagaacaataatatcaaccaaccagaacccccccccaagctcccagggactaaaccaccaaccaaagagtacacatggaggaacccatggctccagctgcatatgtagcagaggagtgccttgctgggcatcagtgggaggagaggcccttggtcctgtggagattcgatgcctcagtataggggaatgctagggcagagaggcaggagtgggtagatgggtgggggattaccctcatagaagcaggagggagggggatagggagtttgcagaggggaaactggaaatggatggataacctttgaaatgttaataaataaaaaaataagtttctctattgatataaagattttatagttatccttttactttatatctaacttaataatcaaataattaatgtattttaatttacaaattctctgaaatttgagactgcttagtggggagaggaaagaaagatcttaagtaaggtggaatagtagaacacaggtatatgaatgggaaaagggaataatagtgagggaggtttaagtggggagagggatgggagggtaggatagaggaagagatgggaaacagataattagcactaaggatagttgaaaaaaactatgtggtatgtgatggcttatatatgcttggctcagagagtggcactattagaaggtgtggctctgttgggatagctatgtcaatgtgggtatggactaaaggccctcaccctaactgcctgaaagccagtattctgctagaagccttcggataaagatgataaagatgtagaactcttggctctgcctgcaccatgcctgcctagatgctgccatgactcccttgatgataatggactgaaccactcaacttataactataagacagacccaattaaatgttgccctttataagacttaccttggtcatggtgtctgttcacagcagtaaaactctaagacatggtaactcactattttatacatattcatctaaaagagttaagtggagttattctatagagaggataatactcctccagaagccataggttgtcaaataaaaatttgagtgccacatttgggatactgccctgtgatggataatcttgattaacaacttgactacatctggaaccaactaaaacccaagcatctgggcatacatgtgagcaatttttctttattggaccatttgaggtaggaagactcatcctaaatctgggtcatactatctagtggcagtctttgtaaaaggacaaggaagagggaaacttttggcttttccctgcttgccttcactctcactgaaaagttcacatatcttgctgctgaggcattcctttactagtgttagaacctacttctttaggatactaatctggagaccagctgagacatccagttgtgtagactgaacaattactagattcttaaactttctgtcaggaggtagccagagttggaataacaagaccagagccaataagttacaaattcacttgtaacatacatatgtatgtatgtatatgtgtatatatatattatatatatatatgtgtgtgtgtgtgtgtgtgtgtgcatacacacacacacacacacacacacacacacacaccagttctgttcctctagagaatcttgactaaaatacttctcttgttgattagggatgtcctggagacaccctaaacaacacggtctattgtcattgctcttggtcatccaccagaccttgatagtaagttcttattgttaaagataccacaagttttggtcacaagacttggagaaatcaagtaggtactgaacaggaagcttctttcctgctggctagatttcatagtatttgaagctgctatacatggtactggggagtaaaagttaacagtcttacctagctatgaagcctatgggctacaataatgactagtatgataagatatgccatgggtacaacagtggaataaatgttataaaggcaaattgctgattgggtttaaagcctgctgcataggataaatcatatggctagaactataaaccttgccaagaatccatggttggagagttcacaggcccggggtgtgaatctactactactattttgctaaaaagacatactagcaaactaccttctaaattctcatctctatgccaatagattagtgcagcacttagtactcatcagagaaactttgtgtagtgaatggcagttaatgaagaaactcataactgatcaaactgcaggctgtttgtggagtgctcaggcacatttatatcaccctacctctacccctgcctagggctcagtgacgatattagaagagggggcagatagattgtaagagccagaggtcattgaagactggaacgacaacaacaacaacaaaaacagtgttgagatggtttgtatatgctcagcccagggagtggcactattagaaggtgtggccctcttggagtaggtgtgtcactaagggtgtgggctataagaccttcatcctcactgcctggaagtcagtcttccactagcacccttcagacgaagatgtagaactcttagccctgcctgcatcatgcctgcctggatgctgccatattcctgccttgacgataatggactgaacctctgaacctgtaagccagccccaattaaatgttgtcttggtcttggtatctgttcacagcagtaaaaccctaaggtagttggtgctgggagtgattctagagaagcaaaagtataaggatgaatcttttaagaatttggagttggtttaataattcactagtaccttcaactactgaaacctctccagatactctttcctgggagctcggagaatattgaaggcccatggcagaaactatatttcaaacttaaagaagccaatgcctttgattaacttgatctatcaattgtaactgactatgaattaggtgacccggtgtaccaaatgttctacaagttgggggaaaaatcagaaaatgatttttctagcttgttgttcttagtatctctgaaaaaattggtgaaggaaaagaatgagctgtatgataaaattggacagctccagatgcaaacaaacaatctaaaggtttctaagtgtgcccttgaagagaaccttctctttagtagccatagagccccagttgcagaaaatcaaactgaagccctcattataaggttggctgaattacagcaaaaattcaagtctcaacctcagagggtgtcagtaattaaagtaagggcattaattggcaaagaatgggattttataacttgggaagggcactgttgaagctgagacatttgaatccagattctcaagggtttatctcacctgaggaagtagtacactcagccccaccccttgaaataatacctttttcacctgaggaaattaactcctcagtgtctgataaaacagcagcaactttctctgaagaaaatgccggacaagacaatactgatgttcctcaagaccctccaataatttattctagacacaaggaaaaacaggctcctagaggggaggtggaaaatgtagtccctgagaaaattctctacactactaaggagcttaatgagtttgctaattcattcaaatagaagtctgggaaatatgtgtgggaatggattttaagggtgtaagataatggtagaaggaacataaaactagatcaggctgagtttattgacatggatcctctgagtggagattctaggttaaatatgaaagctttcacagttaaaaagggtttcagaagtatgtttgaatggttggctgaagagcttatcaaaagatggactactgaaaaggagttggagatgcctgatatcccttggcttagtgttgacaaagggattttaaggctcagggaaagtgcaatactagagtggatacattctgtaaaacctaatcctttacaatgggaaggaccagaagatatccccttcacaaatcctataagatgcacactggtgagaggcgtaccagtacagttgaagagttttgttcttgtccctttccttgtgccagaccttaggtggagatgctattgctgaattggatgaattaaatgcagtgggtttaattgggccccaaggtgacaagggccaggtggcagcactgaattgccagagacaaggtgatcatagttattataatggacagcattatatgttgctgtaaatttccaacccaaatatatcccagcaataaaaacacaactcaattaatatgaatatatgctgtgcacctagattgggcagatctaccactacactaccatcttctccatctatgagaccccttaggacttgcggtttctccaggccatgtgcttcattttcttccctcgcccagtcttgggctccaccttccctttatctgcccaatcatcagcttccctttattttacaaattaaggtgggaaggaggttagcaggaaatcacctgctgactcattccttgttcaaaacccctcacaggagaatggaattaacatcaaatataactagccccaaggctatccacaacaggtttaactgggcccccaggtaacaagggccaggtggcagcattgaatcgccagagacaaggtgatagttattatagcgggcagtgtagacaaaacaacatgtataatgacctagcctgtaatggtcagcacaggagaggtgaaatttctaatggcatgactccttcggacctttggtactggctaatcaatcatgatgtttccaggcatgaaatagacaggaagcctactgcatatctgtttgatctgtataaacagaacaattcacaaacaaatgaaagaaaggctacactggatcatggcaaaaggcagtcttagccagtgaatcaatttccagacttgagccagtttgcagatccagaaccccttgaatgaagggatggccaggttcccaaggaaggatcttgataagacatctaaaagttttgtgttagcctttctccagttcttctgcagagggacctacaggcttttatttttcccccaagggtaactgtacacggggtgggggtggggtggggtggggggtgagggtgggcgttgggaaggaaatagactttccggggtctattggatattggttctgaattgaccttgatcccaggaaatcccaagaaacattgtggccctccagttaaagtaggggcttatggaggccaggtgattaatggagttttgactgatgtccgactcacagtaggtccagtaggtcccagaacacattctgtggtcatttccccagttccagaatatataattgggatagatatactcagaaattggcagaactctcacattggttccctgacctgtggagtaagggcaattatggttggaaaggctaaatggaagcctttagagtagcctctgccaaagaaaatagtaaatcaaaaaatatcatattcctggaagaactgcagaaattagtgccaccatcaaggatttgaaagaggcaggggtggtggttcccacaacatctccctttaactctcctacctggccagtgcagaagacagatgaatcatggagaatgtcagttgactattgaaaactaaatcaggtagtaaagccaattgcacctgctgtaccagatgtagtttcattgtttgagcaaattaaatacatctcctagtgcctggtatgcagctattgatctagcaaatgcctttttctcagtacctgtccaacttgctttcaattggcaatgctagctgaaacgtttacagttttgaggatatgttaactcttctgccctatgtcataacttagttagaagggatcttgatcatctgtctcttctataaaatattacattggtatactatattgatgacattatgctggttggaccaagtgagcaggaagtagcaaccactttggactcattggtaacacatatgtatatcagaggatgggaaataaatccaactaaaattcaaggaccatctatctcagtgaacttcttaggagtccagtggtgtgggacatgcagagatattctttctaaggtgaaagataagttattgcacctggtccctcccaccaccaagaaagaagcacaatgtttcatgggtctatttggattctggagaatgcacatccctcacttaggtgtacttaggcctatttaccaagtaacttggaaagctgctagctttgtaaagggtctggaacaggagaaggcccttcaacaggtccaggcttctgtgcaggttgctctaccacttggaccatatgatccagcagacccgatggtacttgaggtgtctgtggctgatagagatgctgtttggagcctctggcaggcccctgtaggtgaatcacagaggagcaaagctctaccattatctgcagacaactattctccctttaaaaagcagctcttggcctgctattgggccttaatggaaactgaacatttgacaataggacaccaagttactatgcaacctgaactgcccaccatgagctgggtactatcagaccctgcaagtcataaagtaggatgtgtacagtagcagtctattatcaaatggaagtggtatatacatgatcgggccagagcaggtcctgaaggcacaagcaagttacatgaagaagttgctcaaaagcctatggtttctacttctgttacaatgctatctgctgccaagcatgtgcctataacctcgtggggtattctctatgatccgctgaccaaagaggattataaagtaacatgaatgctcctgtcttattttgctaagaatacattgtctttcttccaatttctttaacatcaattggtatttaagttgagatactacaagaatgttcccaagggacattgccccattgtaaatttacaaatacatctttgattttgccaggaatagttatatcatgttaggcgtattcatgaccttgttattttttcatgtggacatgagatgttatttgtgtcaagctgacaaagggtggattgtaatggctatactactgcatccttgagtttcccattcctagctgaccattgttggggagttggactacagactgtaagtcatcataacaaattcctttactatatagagactacccataagttctgtgactctagagaaccctgattaatacaagtgttatgacatgacaggactgtttaagtcataaacacatagcagctatagttgcttggagaagatctgtacaggattaaaacagtcaatactttagatggagcaggatgggattataaactcccactcctaactgagtgttagtccaagacacctctcctcaacaatggcagtgttagtgacaatgacaatgtcttcaacagaaggaccttgtcagagtaaaccaaaacgatcactattgggtaattgagcctaaaggtggaaaaacaggtctcctaaagcaggtttctgcttcaaaggtcaactacctcaggcaagggcatctagtttctggtcaatctgaacagatccaagtccccccacccatctgcttgccttgccaccattttgctttttcatggagccatctagtttgatgctttcactgtaccctctcttacatttgttgctgaaacctgggaagtgaatactgagtccctttcaaagggcctaccccctcctaactgaaccaaattgctcattttgacactcctgggagcagattacttgcttctgctggctcctactacccatggtatttgacttcaaactttaaagttcacttctccagctatttcttttctccacctactctacgcactcatttttcctggactctcctcaatacttgtgcctcctcagaattgcttgctttggctctgtctttttcattggcttacttggagcctgccatctttctggagtctacttaaaaaaaatcacactggtgtttcaaacagcttcctttgctctactgggtacccttcacatggaaggagatgcctatcaactgtgattcagaacatctctctctctctctgacaagtctctttacttttggaaatgccctcagattgagactctgtagctatggcagttaccccttttccttcccttcccttcccttcccttcccttcccttcccttcccttcccttcccttcccttcccttcccttcccttcccttccctcccctcccctcccttcccctcccctcccctctcttctcctgctccccttcccttcttcaccctttcccctcccctcccctcccttctcttctccattcctatgctattaaaatcctccttctgacataagtactatggctccctttttaagtctctcccactcttccttgctctgctcctggaaattctctactgctaccttttcaatggtgtctcctttcctcccttgaattaaacatgaattcttcccttcatttttacttgtttgcctccttaagtcttgttcccttctaggacttagagatatcattaagcctcaacacaggttccccattttaaactgcaatttggcttgaccataatgcaagtttgacaatttgtctcagttgtcagaaaatggcatattaggctaccaaattctcactaatcttgacaaattctgccaatgcatgggcaaatggtctgaaatcccctgtgttcattctcttgcccttctttttgtacctcatgccatactcaccaggttttcctggcaaaggtcaaatctactccaaagctgattagaacttagagattccgccaggtgtggtggtgcacacctttaatcccagcacttgggaggcagaggcaggtgaatttctgagttcgaggccagcctggtctacagagtgagttccaggacagccagggctacacagagaaaccctgtcttgaaaaaccaaaaaaaaaaaaaaaaaggaacttagagattccaatccttctccttttgattctttttttttttttttcccattttttattaggtatttagctcatttacatttccaatgctataccaaaagtcccccttacccacccacccccactcccctacccacccactccccccctttggccctggcgttcccctgtaccggggcacacaaagtctgcgtgtccaatggtcctctctttccagtgatggccgactaggccatcttttgatacatatgcagctagagtcaagagctcaggggtactggttagttcataatgttgttccacctatagggttgaagatccctttagctccttgggtactttctctagctcctccattgggagccctgtgatccatccattagctgactgtgagcatccacttctgtgtttgctaggccccggcatagtctcacaagagacagctacatctgggtcctttcgataaaatcttgctagtatatgcaatggtgtcagcgtttggatgctgattatggggtggatccctggatatggcagtctctacatggtccatcctttcatctcagctccaaactttgtttctgtaactccttccatgggtgttttgttcccacttctaaggaggggcatagtgtccacacttcagtcttcatttttcttgagtttcatgtgtttaggaaattgtatcttatatcttgggtatcctaggttttgggctagtatccacttatcagtgagtacatattgtgtgagttcctttgtgattgtgttacctcactcaggatgatgctctccaggtccatccatttggctaggaatttcataaattcattctttttaatagctgagtagtactccattgtgtagatgtaccacattttctgtatccattcctctgttgaggggcatctgggttctttccagcttctggctattataaataaggctgctatgaacatagtggagcatgtgtccttcttaccagttgaggcttcttctggatatatgcccaggagaggtattgctggatcctccggtagtactatgtccaattttctgaggaaccgccagactgatttccagagtggttgtacaagcctgcaatcccaccaacaatggaggagtgttcctctttctccacatcctcgccagcatctgctgtcacctgaatttttgatcttagccattctcactggtgtgaggtggaatctcagggttgttttgatttgcatttccctgatgattaaggatgttgaacattttttcaggtgcttctctgccattcggtattcctcaggtgagaattctttgttcagttctgagccccattttttaagggggttatttgattttctgaggtccaccttcttgagttctttatatatgttggatattagtcccctatctgatttaggataggtaaagatcctttcccagtctgttggtggtctttttgtcttatagacagtgtcttttgccttgcagaaactttggagtttcattaggtcccatttgtcaattctcgatcttacagcacaagccattgctgttctgttcaggaatttttcccctgtgcccatatcttcaaggcttttccccactttctcctctataagtttcagtgtctctggttttatgtgaagttccttgatccacttagatttgaccttagtacaaggagataagtatggatcgattcgcattcttctacatgataacaaccagttgtgccagcaccaattgttgaaaatgctgtctttcttccactggatggttttggctcccttgtcgaagatcaagtgaccataggtgtgtgggttcatttctgggtcttcaattctattccattggtccacttgtctgtctctataccagtaccatgcagtttttatcacaattgctctgtagtaaagctttaggtcaggcatggtgattccaccagaggttcttttatccttgagaagagtttttgctatcctcggttttttgttattccagatgaatttgcaaattgctccttctaattcgttgaagaattgagttggaattttaatggggattgcattgaatctgtagattgcttttggcaagatagccatttttacaatgttggtcctgccaatccatgagcatgggagatctttccatcttctgagatcttctttaatttctttcttcagggacttgaagtttttatcatacagatctttcacttccttcgttagagtcacgccgagatattttatattatttgtggctattgagaagggtgttgtttccctaatttctttctcagcctgtttattctttgtgtagagaaaggccattgacttgtttgagttaattttatatccagctacttcaccgaagctgtttatcaggtttaggagttctctgttggaatttttagggtcacttatatatactatcatatcatctgcaaaaagtgatattttgacttcctcttttccaatttgtatccccttgatctccttttgttgtcgaattgctctggctaatacttcaagtactatgttgaaaaggtagggagaaagtgggcagccttgtctagtccctgattttagtgggattgcttccagcttctctccatttactttgatgttggctactggtttgctgtagattgcttttatcatgtttaggtattggccttgaattcctgatctttccagaacttttatcatgaatgggtgttggatcttgtcaaatgctttttctgcatctaacgagatgatcatgtggtttttgtctttgagtttgtttatataatggattacattgatggattttcgtatattaaaccatccctgcatccctggaataaaacctacttggtcaggatggatgattgctttaatgtgttcttggattcggttagcgagaattttattaagaatttttgcatcgatgttcataagagaaattggtctgaagttctctatctttgttggatctttctgtggtttaggtatcagagtaatagtggcttcataaaatgagttgggtagaataccttctacttctatcttgtgaaaaagtttgtgcagaactggagttagatcttctttgaaggtctgatagaactctgcactaaacccgtctggtcctgggctttttttggctgggagactattaataactgcttctatttctttaggggatatgggactgtttagaaggtcaacttgatcctgattcaactttggtacctggtatctgtccagaaatttgtccatttcgtccaggttttccagttttgttgagtatagccttttgtagaaggatctgatggtgttttggatttcttcaggatctgttgttatgtctcccttttcatttctgattttgttaattaggattttgtccctgtgccctttagtgagtctagctaagggtttatctatcttgttgattttctcaaagaaccaactcctcgtttggttaattctttgaatagttcttcttgtttccacttggttgatttcacccctgagtttgattatttcctgccgtctactcctcttgggtgaatttgcttcctttttttctagagcttttagatgtgttgtcaagctgctagtatgtgctctctcccgttttttcttgaaggcactcatagctatgagtttccctcttagaaatgctttcattgtgtcccaaaggtttgggtacgttgtggcttcattttcattaaactctaaaaagtctttaatttctttctttattccttccttgaccaaggtatcattgagaagagtgttgttcagtttccatgtgaatgttggctttctgttatttattttgttattgaagatcagccttagtgcatggtgatctgataggatacatgggacaatttcaatatttttgaatctgttgaggcctgatttgtgacctattatgtggtcaattttggagaaggtaccatgaggtgctgagaagaaggtatatccttttgttttagggtaaaatgttctgtagatatctgtcagatccatttgtttcatcacttctgttagtttcagtgtgtccctgtttagtttctgtttccatgatctgtccattggtgaaagtggtgtgttgaagtctcccactattattgtgtgaggcgcaatgtgtgctttgagctttactaaagtttctttagtgaatgtggctgctcttgtatttggagcatagatattcagaattgagagttcctcttggaggattttacctttgatgagaatgaagtgtccctccttgtcttttttgatgactttgggttggaagtcaatcttatcagatattaggatggctactcctgcttgtttcttcataccatttgcttggaaaattgttttccagcctttcattctgaggtagtgtctatctttttctctgagatgagtttcctgtaagcagcaaaatgttgggtcttgtttgtgtagccagtttgttagtctatgtctttttattggcgagttgagaccattgatgttaagagatattaaggaaaagtaattgttgcttcctgttattttagttgttaaaggtggcattctgttcttgtggctgtcttcttttaggtttgttgagggattaccttcttgttttttctagggcgttgttctcgttcttgtattggtttttttctgttattatcctttgaagggctggattcgtggagagataatgcgtgaatttggttttgtcgtggaatactttggtttctccctctatgataattgagagtttggctgggtatagtagcctgggctgcagtttgtgttctcttagtgtctgtataacatctgtccaggctcttctggctttcatagtctctggtgaaaaatctggtgtaattctgataggcttgcctttatatgttacttgacctttttcccttactgcttttagtattctatctttatttagtgcatttgatgttctgattattatgtgtcgggaggaatttcttttctggtccagtctatttggagttctgtaggcttcttgtatgttcatatgcatctcattctttagatttgggaagttttcttcaataattttgttgaagatgtttgctggacctttgagttgaaaatcttcattctcatccactcctattatccgtacgtttggtcttcttattgtgtcctggatttcctggatattttgagttaggatctttttgcattttccattttctttgattgttgtgccgatgttctctatggaatcttctgcacctgagattctctcttccatctcttgtattctgttgctgatgctcaaatctatggttccagatttctttcctagggtttctatctctagtgttgcctcgctttgagttttctttattgtgtctacttccctttttaggtctagtatggttttgttcatttccatcacctgtttgtatgttttttcctctttttctgtaaggacttctacctgtttgattgtgttttcctgtttttctttaaggacttgtaactctttagcagtgttctcctgtatttctttaagtgatttattaaagtccttcttgatgtcctctaccatcatcatgagatatgcttttaaatctaggtctaggttctcaggtgtgttggggttccctggactgggcgaagtgggtgtgctgggttctggtgatggtgagtggtcttggttcctgttagtaagattcctccgtttacctttcgccatctggtaatctctggagttagtagttatagttgactctgtttagagattgttcttctggtgattctgttaccgtctatcagcagacctgggagacagattctctcctctgagtttcagtgctcagagcactctctgctggcaagctctcttacagggaaggtgcgcagatatcttgtatttggacctcctcctggccgaagaagaaggcccaaaacaggacctttctcagacactgtgttgctttggcagttcccaggtggtacagactctcacctaagcagactaaatttctaagttccttggagtcccgggaccaagatggcgaccgctgctgctgtggcttaggccgcctcccctgccgggtgggcacctgtcctccggtccggaaggtggccggctgtccccggcccacacagggtgctgcctcagcgcctctgtgcttctgcctgttccagaagctgtcaggttctctggcgcaccctctcacctgttcagactaatttcctaagttcggcgggtctcggaccaagatggcgaccgctgctgctgtggcttaggccgcctccccagccggacgggcacctgtcctccggtccggacggtggctggctgtccccggcccacaaagggtgctgcctcagtgcctctgtgcttccgcctgttccagaagctgtcaggttctctggcgcaccctctcacctgttcagactaattccctaagttcggcgggtcccggaccaagatggcgacctctgctgctgtggcttaggtcgcctccccagccgggcgggcacctgtcctctggtccggaaggtggccggctgtccccggcccacacagggtgctgcctcagcgcctctgtgcttctgcctgtttcagaagctgtcaggttctctggcgcaccctctcacctgttcagactaatttcctaagttcggcgggtcccggaccaagatggcgaccgctgctgctgtggcttaggccgcctccccagccgggtgggcacctgtcctctggtccggaaggtggccggctgtccccggcccacacagggtgctgcctcagcgcctctgtgcttctgcctgttccagaagctgtcaggttctctggcgcaccctctcacctgttcagactaatttcctaagttcggcgggtcccggaccaagatggcgaccgctgctgctgtggcttaggccgcctccccagccgggtgggcacctgtcctctggtccggaaggtggccggctgtccccggcccacacagggtgctgcctcagcgcctctgtgcttccgcctgttccagaagctgtcaggttctctggcgcaccctctcacctgttcagactaatttcctaagttcggcgggtcccggaccaagatggcgaccgctgctgctgtggcttaggtcgcctccccagccgggcgggcacctgtcctctggtccgcccttttgattcttatatagaggatatggccccctccaccagcacctcctcagcctaacctacctgcacctcctcagcctcaagctcacaggtgtcctcccagcctgcttcacctccttattctgatttagcctcatcttttcttatctcatcacctccaacagttcacatctgacctctatgttattttctctactctcacccctgaaaaaaacaaaagagttggtctgggcagctgtccaaacccatatggatgatgtctaccacatggatactttctattccatggaagctgtgacagttctctgggcagatccccactggagttaccaggttggttctgagacttagtagcctgctagggcataataataaaatggttatttgccttctggctggcttctaaaaggattcctgcaaggttgctaattccaataaacttagggaggtcacccagtggacagatgaaaatcctgctgagttcctcaaccaactcatagaggctctctagtacacaaaagtagatcctaattctcaagaggacatgcttgtccttaactccctcttcctcttccagtaagtctttgatattagggaaaaaaaaagccttaagggactagatgatggccctcacatcctcagagagatctgctgaatacagcattttaaaaggtgtttaatggaaaggaggaacaagaaaagatagacaaataacagcttctggcaacagccctcaagccacctctaaagatggggaaccaatggactccatctggagcttgcttcaagtgtggcaatgtcaaccacttggcaaagaactacatttcagctgccgggagcatgttcaaattgtgggacgacaggacactggaagatggactgcaccactcagcatcaacaaggtaggttaattccccaaattctttgtctacaggaaaacctctcagattttctggaagactgataagacttccctgggaagtctacccccaacaaaactatcaaaattagcatgaaggagcctggagtgactgtgcagttacttggtctatacctctggctaactctgataaaacttactcttctcagatctctgtgattggtgttgccagctggcccaaccagctcagggctagaggtcctttcctctcttccctctgaggctacccaattgctcactctttcctcattatacctcatttcccaaccctgttattgagtagggatatcatggttaaactacacttttccttttcttttcatctaacttcttctggaatttcccctcttcttctagcctttgaagagtctctctggctaacactaatacctcatcttatccttttccagactttccagctgacagaaaagtatgaggcaccccctttctttcagtagtttctcatcatcttccctccattaagatcctactccaggattctacttcctaccctgtcactttcaatgccctatctctttaaaacatatatgaggcttaaaacataccaccatgccttcttaataagggtattgtcaagtctactactcacttgacctataacgctcttctcttgcctgtcctaaagcaacagagtacattatgatgattactattgcctagtcaagatcattcatgaagcagactttcctatacactccgtggtgcctaatcgttactcaggggtaggggtgctcaagctttgcatactacatagcatattgcttctcgtgtattacagacttaatgagacctcacaactctacaagaccaattaatcagcctagtgatgaaaatgaaacaaaacaatctcctaaaccctcactattacttccttgttattagacttcaattcaccaaataacttttcttacttaaagtgtgcgtgtatgtgtgtgtgtgtgtgcattcatgcatgcacacatgagggcacatgtttgtttgtatgccaatgtccaaggatgtatgggtgcaaatggaggcccatggtcaactcagagtcatttcttaggagctatttatcttgctttttttgttcttacatttatttaagatttatttatttatttaatgtaaatgagtgctctatgtacatgtaaatctctacatgtcagataggggatcagattacattatagatggttgtgaggttcccaccatgacaggacttctggaagaacagccagtgctcttaaccactgagccatctcttcagcctctttgtccaaacatttattaacaactgataaacaagtaaaaccaacttgtttttaaagaaaaggtatctctcttttacctgtaacttgccaactgggttaggctggctagcctgtgagtctcaatggtttgtctttgctgtctctatttcccctgaattaatttgttgttgttgttttgacataggttctggggtcaaactcaggtttaaatacttagaccacaagtactctatgtgctgagccatttttctagctttctttttagctatgtgaatgttgatttacatattgagatttgctgtatatatacacagatgtgtttcatagtgtaggaatgtgtgtgtgtgtgtgtgtgtatgatgagtgtctgtgtatgaagtttgaaggttttaataatactctagaaaagatttttgcttctctgtggcttctccatctccatctggaaaacaattaacacaccatcatacataatgcatgctgaggcattaacattctggacccagtgggatatttaaacactgagaattcataattgtcctataggagatccacaagatgtgggtttagagatacagatgttcaatgggaaaatcttccagtgtgctaggaataaactcccttgtgggactgtcctgaaaggcacagtacccgctgttttcatctgtggaatcttctggtgtgtgtgtgtatggtggataatggtgaccactttaactttctgctcaaaattttctcactgcagcaagtacttatagtataaaatcagaattatcaacattttcctttactgtcctagatttcaaggatgcttcctttaccattccttttatacccaggttaacatgactactttgccttcatctgggaggaccctgacatgggatagtgtctcagcttacatggactgtcctgagataacccccatttcttcagccaggctcttgccattgacctttttcttgacctgtctcccagatccttaatccaattatgtaatgaccttctactatgcagccccttgctctcactgttacagcaacatccttctcaacttcttcacttcctagggaaacaaaggatgcagagtctccccttccagagccaaagtttctatccttcaggtcaaatatctatgatttttttaattacccaacaactacaaactcactcttgatggcagacagtatttgtagtcctctaacctccaaataaaagattctctctttaattggcctggtaggatacctcagaatcttgtttcccaactttgcttttcttgttcacccccttgatgaagcagataagggccacttaactgactctctagatcctactaagtctgctttctcttgtttctgaaaggtacttcttcttcttcttcttcttcttcttttttttttttttttgtttgttttaagactggtttgtatttttttaaaatatttttttattaggtatttttctcatttacatttccaatgctatcccaaaagtctcccatacccccccccactcccctacccactctctccccctttttggccctggcgttctcgttctcctgtactggggcatataaagtttgcaagtccaatgggcctctctttccagtgatggccgactaggccatcttttgatacatatgcagctaaagtcaagaaaggtacttctaaaggtctctgtctctccctgactttgaccaaccctttatcttctgtatttctgaaaaatgaagaatggcttcaggatttttgggacaaatgaaaggacccacctttgccctcgtttatatttccagacatttagatacaacagatataggggaatggcaaccttgccaacagacagtagcagcagtctccctattggcaaaggaggcctctaaactcacatctgtcctcctaccacaccagcacaaggggctcctatcacgcacaagtgtaggcgtaatgttttataagcagtgtaaattttacccttgagttattcagatgccgatttctctgccttcatatcttaattcaagcagggcaccacattgtaattcttattccaagaacttccagtctcaagtgtaaacagattttaccatttattctctgccttgtcaataaatgctgatctcccaataactgggcagaatagagaatagggcagaacatccaccagcagaggcgagaggaaggagggagatggggagactcagatcagtggcaggatggaggaattggagccatgaagaaggtctgaagagccatgtcaataatatgcaagtatcatgggatggggctaggagataactagattagcataggaggtaaaggtagatcatttaactgttcagctattgacatgcagttttgaataaatcttattttttctgtgtggttattagggaatagcataaggcaaagaaatacagctgcccttttaatttatcatatatatgtgtgtttgtgtgtgtgagtatgtgtgtgtatgtatatatatatatatatatatatatatatatatatatacatatatatatatatatatatattaaggataattgatttatacacaagactctctcatactttgttcccttctaagttctaactttttcatattactctcctagaaaatcctgatatcttagttgattcctgccttcatcttatcccatccacactcctttccaagactactaccctcactcattcttgcctagaataacttgaaactctcacctataaaaccccacaactttgtcctgattattcttgattcctagatggaagctcatctctcacttttattggctccagccaaaaagggttatgccatagtcttttctgacaggttgtagagactgtctttttactgccatgcattacttctcagaagagaaagctcataaccctcattagagcccttattttaatgagataaaaccatcaacatataccatattctaaatatgcaactccacatcccatactaccatgtttccatttgacaggagaagtgcttccttaccaccaaggatacatccattatcaatgggtctctagtcctaaagctgctagaagcctcatattttccaaagtaggtgggtgttgtgaacgttaggttaccaggcccctttcaatgatatagttttgggaaatgcttctactgaagagtctgctaaagaggccaggtatcatccctatcctccttcctcttggctcctccaagcctaactccctacctactctgagtcccaatggcaagccatctcttctcagtctttctgccctccttaaggctgtcattcaggggtgctccacctattagcattccttctaggctctgcccagcagttacctggcaacagccaggtagacctggcttggtataaaaggggctgagcttcatgctgttattgagcattgatttgcttattgctctcatggttaccacacccctcataatctataaatggtataaaaactctaagggggtttccaacccctcaatgggcagtatcattggcacttacaatattagtgattgatcttttccaagcattgttgctggaatagattaatcattcaaccaaaacccttaaaaggattgagatgtaaattgttagtaaagttaggttaagttgtttttgttagtggctttgatgtggaagatcttgaggaacaacttaaagctcagaaaggcacattttttgatagttgagtgaggggctcattgaggtcagggaacaagaacagtggaagcctggctattgtaaactgacttgcctgcctttcttactaaagctgggttggtgatcaaggggatgattaatttcttgtacccatttttgcccttagcttcctgatacgatttaataataataataataataaaaaacttggtaagttgtaaaaaataaatctgttttttttccttcccagcacttgctccctgaatgatgattactctgagactaattattaatgaatgccttggctacaagctttggctcattccccgactaactgataacttatttaacctatttaaactattctatgtctaccacatggttagttacctgtcctcagcttcatgtgtccaagtccagggctaatcctctttttttagcatattttattttatttttttaattgggtatttatttcatttacatttccaatgctatcccaaaagtcccccacatgctcccccacccacccactcccacttcttggccctggcgttcccctgtactgaggcatataaagtttgcacgaccaatgggcctctctttccactaatggccgacttctgattcatatgcagctagaatcaagagctccgaggtactggttagttcataatgttgttccacctatagggttgcagatccctttagctccttgggtactttctctagctcctccattgggggccctgtcatccatccacttctgggctaatcctctttattttatctttattttatcccaagtttatgtccatctcctcagtgttcctgggcaaatcactaaccttattctaaccttagttcagctacatggctggtttacatctgtctcctcagcattccagctcaaatctctccttttattctatcccgagttcatctatgtggctggttacctctgctcagtttccatccttctgacctcctctatgttcctggatgaatctttgcacctctctgccagtgtccctatttcttgcctcagctcattggccacaggcttttttattgacaggtgatgcttataagagattctctctacagtgagtagatgtgcaacctgaagatttaaagtagaaatgactgattggcaaatataaaaaaaatgattaatcctttctttgtaacttcaaaatgcagcctgccagtaaaagaactggaaaagaagaataacttgcttgcttacactttgttaacctataacaagttgctttcatatgaatgcatgtggatccttggggacaaattgttttttacctgtaatatttaaaatgtttaattatgtaagactgttggagtacatgctgttttttacctgtattcattgtgatcattcaaaaggaaaaatagaatataaccacactgtaatttttatattgcttgaaagattttgttgggggatataagctgtaggggaaaaataaagagaacttgagcatgttccaacaataagatctctctctctctctctctctctctctgtgtgtgtgtgtgtgtgtgtgtgtgtgtgtgtgtgtgtgtgtgtgtgatattcttccttttttgctggccccagagaattaagttttgctccctaagagaaaaagtctgctgtgtgagaaaaagccactgatcccacccagcttcagtgcctggcctgctagaactaaactccagcattgatgcctcccaatactaggattaaaggtgtgtagcaccatgtctggcaaatctgacagctaattaggatatttttcctgcttattttgatcttcattgtactcatctgcttgcttttatttatacttggtttatctttttatatttttttcttttggcatttgagagacttataacctatcctgttactgattagttattatggaaaatacaacaaaatttaaactatcaacatttaatattatactttacttccaagataatactagaattttagaattctttattctatttccctcaattatgacttttatatgcttggctcagagagtggcactattagaaggtgtggctctgttgggatttttcgagacagggtttctctgtatagccctggctgtcctggaactcactttgtagaccaggctggcctggaactcagaaatctgcctgcctctgcctcccaagtgctgggattgaaggcgtgcgccaccacgtccggccaattatgacatttatgctgttgtcataatatgttctaaataaatcatcaaactgtcattataagttgtttatctcagatggttgtcatagtaatggaaagctgacataccccaccatggttaattctttgtttaaaaatattacaaaaaaattacaaaataccaaagatgatgtaaactattgctactcatattatttatggcatactaagacttgtattatgcttatagttggtatactttgttgaattagctagaaaatccaagttaagatgggccactatagttaaagttagtaaggtttggaagtctagcattgctagtgagaataagagcatcattaaacagttgtccaaagaagaaagaaagaaagaaagaaagaaagaaagaaagaaagaaagaaagaaagaaaagaaaagaaaagaaaaaaaagacctaaattgcaaccctctgtatttaattttttggcaatcattctgtatgactttcaatatgagaaacaattcttggctgtacttttttttatcccttgaaattttactcccctgttgggggtcactgtgttctctcataaagttgttcacagtgtcctgttaatgtaggtacttaataaattgtgtcctgagagggtgatcacaaatcaatctggttctatctctaaatgtcaagatcaaagacaggtgttatgtcttttgttcatttatttaaggcagggtctcagtctttaaactcaacatgacctatggctgtgtgaaagggttacaggcttgagtcaccataaacactgtgcctctcttatgagaacatacctttaccttgccattgtataaaatttgagtccagtgatggccatcttgactgctggaaataaggaactctttcacaaacatgctggtaaagagagatttcactccctgggttattattccagtgactttcattgtcttttgtaagtccacttgcaaccattgttttggatcattcacctgaggaagatatttgaataaaatctcctttgtcattatttgctctgagaaatccacaactgtctttgtaaccatactacagcacttatcactgtacataagggtttgtctgcctcctttatttgactaagaattccaagggccaaatttttcataattcttattttaatctccttaggtcactcacttaataggttcctagtaagtgctgaatgaattttaggaaccataactactagaacataaagtttggcaacgtagtagccaaactacttcattcaaaataataacacttttaaaactgaacttaaaattttatattatatttacttacttgtccaagtatatgtgtgtgtgtgtgtgtgtgtgtgtgtgtgtgcatatacacacatgttcatggccatggaacctgtatggaggtctgaggacaacttaaaggagttggctctttctttcccctatgtggatcccaagaattgaacttatgtcacctcatctggtttgggatcaagcatcttgatctgctgaaccattttaccagctttggattggactttagttaccataattatttcacagaaattactctagtactgggtacagagattattcttctaggcagttcattaaggatcatttcttcttccattgaatgctatacaaaatcatatggcacatcaaaggaatgcccatgggcattattgatccctataaacatttttcttaggaacagtgaacagatatacctatgaaaaacaagggcttctcctaattttctagcctttattttctactttaattagttaaatggtaaatatgttgcagttacctgaggtcgccaggcattagtccttccctggaggtgaagtcgagcttgtgaaggagaccaagtagcaaacatgttggtgaagtaggatgaggcagtgatttgtgtatctgatattactttactttccattcccaatggtatgctgcaacctcaaagaaatgaaagtataatgatgtcacatgggtatcctgcagcctaggtttcactgtgttgtcttcagtcctctagagatattatcatcatgataattttcaggcactgatttttatacaatttctgttattgctaaactgctcagattttctagtcaattctccttagttctgcttgattttaattttccttgttgatagaagtataggagataggtgcttctggagaactacagtaacaaactcctacttttgttattctgtttgtttcagaactatgatagttttatcactgatggtgctatatactgtgatagaaatccctcctcacagtctcagctagttattctacttatggttaggaaagaaaataatatggaaagacttggaacttactgtttaaatcacagcccatcaactccatgcgaagagtactacggatgctagaatgagtggggtgcaaacggatatatcgagcaataattggaggattaaaactattatgcttaatcccagatgagtccacattgccaaagaaaacctattagaagagattattaaaaatatgtggaaagtaaatacaaagcataaaaaagttgttcttttccttctaattttgcctctggcatttaaaaaaacagtatcaataaattcaaatgaaaatatggtgactagataaatgttagcatagtatatatatattttttaaatcaccaagaagagtgggacaaagtagtttggtgtgatctcagtcaaatgaagtggttttctaccttgggttcctcataaaagttgaggaagccattagcaccgtgtagcttcagtatatagatatcagagttacttagcttttatttcacaagaacaatgatttggcagacatccatctatgggcatcttgggatgtacttgggaggttaagaaacactatggaagcaacaaaccaagtacaactgtttgatagtggcctgctgcctgtagtcctggctatagactcagaagcagactgattacctcttgtggactcagatccaaccccactcatgtgtattctttacactatcccaatttacccaagtactttgtaaggttaactttcattggcacccctagtaacatgtagctatgagttggatgaagtttttcttaaggtttcatgtgttagaggactgatactgagtgtggtgatattgaggtattattgtggagaggataagaagctggcttgtgtagtcttaagcaatagtctcagcttgagttactccattttgagtgtaagaacaaagagagaatgactctatatcttgtttacacaattgacaaccattatctgacaacacattaggaggcacaaaatgattgtttataccagtaaatgatgttcccatttacacaagacatatgaacttatcaatttcaccagatagaaccccctcacttgggtctgtaaaagaaggaccacctcaagaccaaagtgtggtaggaacactaaccagtcacaaggtcacttgtcatgagccttgtccaggaaatttgccacatcaaaagactctgcctctgttccagagctcaagctgtagtgcagtttctagtttccctagcctgtgacacttggcccacttcgaactgacagctgaaatgtcttgtcacctggaattgcacctggcatctctgtaactaaaagcagctctgtgctgtgcttcccaagagttcttttctggtcccctaaagagtattctttggagtttgcatcagatctcttcctataacttcaagatggtatctctcaactttgtagtctctttaacattttttaatcattctgtgaccttcatatttgcttattattgtgtgaagtactttttattagatattttctttattaacatttcaaatgatatcccctttcctggtttctcctctgaaaaccccctatcccatctcccctccccctgatcaccaatccacccactcctgcttccctgacctggcattcccctatactgggacatccaataaattctgaccttttgaaaaaatacaaaatgtccacctgagcttctaacacagcatcatcatgataggtaggcaaggagttagggaagtgggagagaatacagattcattcattcattctttctttctttctttctttctttctttctttctctctctctctctctctctctctctctctctctctctctctttctttctttcttttttttgagagacaggttcttaaaaaaggagctcaaagctttcaaatgccagtgtttcactaagcaatactcaaattatttttcactgcttagttatgaaatgaactagaagaacaacttggagtcctaagttagccataaaactaagtgacggactgatgacaaataatataagtatttttttttccttcctggccccaaactagcaatagctgtaaaggaaacttgtgacagtaattttggttagtcatctcctatctcaaatatccatgctgagttttggcccatacagaacatcctttaactgactgcaaaattacaccaaagcaatagaatacagtttatttattccttaggtggcctgaggagatagaatgcagttttcacaaccatcgatcaagttattttcagcagaatgcaattttcatgcctacctcaataaaactcttgataaacaaagacttgatactactggttctttgttattttcctacatggtttgccttgtctttttatgcaagatatatcctttcctaaactctggttcattaaaggtttctgtgatggtttgtatatgcttggcccagggagtggcaccattaaaaggtgtggccctgttggagtaggtatgtcactgtgggcttgagctacctagaagtcaagtcttccactaggagtcttcagatgaaaatgtagaactctcagctcctcctgcctgtaccatgcctgtctggatgcttccatgttcctgccttgatgatactggattgaacctctgaacctacaagccagccccaattaaatgttgtcattttcagagttggtcatgttgtctgttcatagcagtaaaaccctacctaagacaatttccttaacatttttttggtctttggttctttctctggggaggcactctaggaaaggtgtccttaactttaggcaacatcaaaaaggattgaggtgattctccaattctccctaaatagtaggcactttaagagatagaacctaagcctggcatggtgcaacatatctttaatccaagcactctggaggcagaagtaaacagatctctgaatttgaagctagcctgttctacttctacttagggagtctagaacatctagaattagacagtgagatgcaggggtgggggtgggggtgggggtggcaaaggtgggtggagatggtgagaaaagacaagaaagagatgaagaaagaaaacctaataaggggagggtataggggacttttgggatagcatttgaaatgtaaatgaagaaaatatctaataaaaataaaaaaaatgcttacctcgaaaccctactctgaatttgctgcccaaccccaactattgtatttctcaatttgcattctttttaacttattatattatggcaaaattgccggatgtcccaaaaaaaaaaaaaagaaagaaagaaagaaagaaagaaagaaagaaaaagaaaatctaataaggggatggtattataattgagttggttctcaaggaattcttgttcttatacaagattcagttgtcatagaagagcaaacctcattcttttgtttgtttggttttggttttttgggttttttttttgttgttgttgttgttttgagatagggtttctctgcgtagccctggcaaacctcattcttaatcattctctgattcatatttccatatgatctttccgattcatacatagttctactattgtgatgctatctgccatctggatctcaacagtgctaaacttcctgcatcctgatgcagtgttactagtatgacagaaggttgatatccagactacatagataagtgaaaaatgaaacagatatgctcaccattaattctagcagtctggaggcagaggcaggtagatgtctataaattagagcagtagttctcaacctgtgggttatgactcctttgggttacataacatatatttacattatgattcataacactagaaaaattacagttatgaagtagcagtgaaataatgttatggatggattttaatacatgaggaactgtgctaaagggttgtaacattaggaaggttgagaaccactgagttacaggccagccttgtctacacagtaagttctaagccagccagggttacatagtgagactctgtccaaaaaaccaaaaatatcttataatagccagagctggaaagaacccagaggtcactcaacagagaaatggatacagaaaatgtggtacatttatgcaatggagtactactcatctattaaaaagaatgaatttatgaaattcttgggcaaatggatggatctagaggatatcatcctgagtgagatagcccaatcacaaaagaactcacatgatatgcactcactgataagtggatattagcccagaagctctgaatacccaagatacaattcacaaaccacatgaaactcaagaagaatgaagaccaaagtgtgaatacttcgctccttcttagagtggggaacaaaatacccgtggaaggagttacaaagttcagagctgagacggaaggaacatccagagattgccccacccggggatccaccccatataattataaccaccaaacccagacactattgcatacgccagcaagattttgctgaaaggaccctaatatagctgtcttttgtgaggctatgccagtgactggcaaatacagaagtggatgctcacagtcatctattggatggaacacagggtccccaatgaaggagctagagaaagcacccaaggagctgaaggggtctgcaaccccatagaaggaacaacaatatgaactaaccagtaccccccagagcttgtgtctctagttgcatatgtagcagaggatggcctagtcagccatcaatgggaagagaggcccttggtcttgtgaagattatatgccccagtacaggggaatgccagggccaggaagcaggagtgggtaggttggggagcagggcagggggagggtataggggatttttggagaggaatctaggaaagggggtagcatttgaattgtaaatgaagaaaatatttaataaaaaatgaacaaaaaataaatgtataaaaattaaaaaataaaaaccaccaaaaaagaatgaaaaccttcccttaaaatctgcaacatgtgggatagagagatggctcagccgttaaaggctaggctcacaaccaaaaaatgcaacatgtaactaaacagagagttctcaaaaaattttagatttctgaaaagcattttttaaaaatgttcaacatccttagccattagggaaatgcaaattaaaactactttatacctataggactccatttcatactacagagattcctgctactcattcatattcactgctgctctattcacaatagccaggaagtggaaatggcctagatgcccatcaagtgatgaatggataaagaaaatgtagtttatttgaacaatggaatattactgagatgttaggaaaaagaaaattagttgggtggactggtgcatgcctttaatccaggcagaagcaagaggatttctgtgagttcaaggccaaactggtttatgtaatgaattccagggtattcagggatatgtagagagaccctgtctaaaaagaaaaaaagaaaagaaaaaaattatgaaaatttcagataaatgaaatgaactggaaacaatcattctgagttagaaaatctagacagtatgacaaatatatttttcctaatatgtggattttagctttgaaatatatatatatatatatatatatatatatgtgtgtgtgtgtgtgtgtgtgtgtgtgtgtgtgtattcctatttggaatacccttggaagtcagaaaattagtaaggagctatagggggcctttcaagagaaggtaggtaaaactcactagtataaagggtttaaggggaatatggaacaggaagggttaaattggggtgagagtgaggaaggtagggtagaggaaggaaaatggagagatataaaactaaaaatattttgaataagtcatatggaaacctaactactactgtaggagatactaaaatatacatatatggaaagagttaaaatggaattaccttataaagagacaaccatacccccacaaggcagtagaaactaacaaatagaaagcccagtgccaagaatggattacctcttttggagttgttggtcagtgagttcacataggcccccaaacactacaggctgttgccaatgctatagtttgccctacagaactttatggtaagaccctattgctgaagacaccacctacttcagtcatagagcatagaaaaactaaactggcactaacctaaaagactcatccctattggctagtgtgttggtttgaatatgcttggcctatagggattgttactgttaggaggtgtggccttgttagatgaagtgttagaggaagtgtgccaatgtgggagtaggctttagaggtctcctgttctcaggctccacccattgaggaagagagcttcctcctagctgtatgaggatatcaatctcttctggttgcctttgaatcaagatgtagaactcttagctctttctccagcaccacctgcttgcacacttccatgctttttgctatgatcataatgaactgaacctctgaaattgtaagccactcccaattgaatatttttgtttatatgagttgccttggttggggattcattccggtcggggccagcctaacaccaccttcagcacgaaccccatgcagggtgccaaggtccccagagaactctccacactgcaggccccctagtacaccaaggaccttgggatcactggagagcacgtgggctacagaagcagcagagcttcttggacagggtcccttcaggccttcattttcagccaggaggcagagctgagacccagacccctgggcaccttccttgccagaggagagtcatactccagggagggctctgaccccaggactcaggaagtggaccggagctctagacttctagacaccttccctgcaagaggagagcttgcctgcagagagtgttctgaccacagaaactcaggtgagagttggactccctggagtgctgacagaggctaacagactcacaagaggatcaagctccagccagagacagcttgaacattaacaccagagatttccagatggcaaaaggcaaacataagaatcttactaacagggctggatgagatggctcagcggttaagattgccgactgctcttccaaaggtcctgagttcaaatcccagcaaccacatggtagctcacaaccatctgtaacgaaatctgatgctctcttctggagtgtctgaagacagctacagtgtacttacatataataaataaataaatattttttaaaaaaagaatcttactaacagaaaccaagaacactgggcatcatcagaacctagtacgcccaccacagcgagtcctagatactccaacagacgtgaaaagcaagactcagatttaaaatcatatctcatgatggtggtagaggattttaagaagggcattaataacacacttaaagaaatacaggagagcactgctaaacaggtagaagtccttaaagaattacaggaaaacactgctaaaaaggtagaagtccttaaagaggaaacacaaaaatcccttaaagaattacaggaaaacacaaccaaacaagtaatggaattgaacaaaaccatccaaaatctaaaaatggaagtagaaacaataaagaaaacccaaagggagacaacgctggagatagaaatcctaggaaaaaacccaggaaccataaaagcgagcatcagtaacagaatacaagagatggaagagagaatctcaggcacagaagactccatagaaaatatagacacaaaaatcaaagaaaatgcaaaaggcaaaaagatcctaactcaaaacatccagaaaatccaggacacaatgaaaagaccaaatctaagattaataggtagtaatgagaatgaagattttcaacttaaagggccagtaaatatgttcaacaaaattatagaagaaaacttccctaacctaaagaaagagatgcccatgaacatacaagaagcctgcaggactccaaaaaaggaccagaaaagaaattcctcccaacacataataatcagaataacaagtgcaagaaataaagatagaatattaaaagcagtaagggaaaaaggtcaaataacatataaaggcagacctatcagaattataccagatttctcaccagagactatgaaagccagaagatcctgttcagatgttatacagaccctaagagaacacaaatgcctgcccaggctactatacccaacaaaactctcaattaccatagatggagaaaccaaagtattccatgataaaaccaaatttacacaatatctttccacgaatccggccatacaaagcatactaaaaggaaaactccaacacaaggacggaaatcatgccctagaaaaagcaagaaagtaatccgtcaacaaacctaaaagaagacatcaacaagaacagaacccaaactctaataacaaaaataacaggaagcaataattacttttccttaatatctcttaatatcaatggactcaattccccaatgaaatgacatagactaacagactggctacacaatcaggacccaacatgttgctgcatacaggaatctgacctcagggacaaagacagacactacctcagagtaaaaggctggaaaacaattttccaagcaaatgatctgaagaaacaagctgcagtagccattctaatatcaaataaaatcaactaccaacccaaagttatcaaaaaagacaaggagggacacttgatactcatcaaaggtaaaatcttcctggatgaactctcaattctgaatatctatgttccaaatgcaagggtatccacattcattaaggaaacttagtaaagctcaaggcacacgttgcacctcacccaatagtagtgggagacttcaacaccccactctcatcattggacagttcctggaaacagaaactaaacagagacacattgaaactaacagaataactgctgaaagaaatgaatttaacagatatctacagactattttatcctaaaacaaaaggatataccttcttctcagcacctcatggtagcttctccaaaattgacaatataattggtcacaaaacaagcctcaacatatacaaaaacattgaaattgtcccatgtatcctatcagatcaccatggactgaggctgatcttcaataacaacataaataatagaaagccaacattcacgtggaagctcaatgacactcttctcaatgataccttggtcaaggaagaaataaagaaaaggattaaagactttttagagtttaatgaaaatgaagccacaacatacccaaacttatgggacacaatgaaggcagtcctaagaggaaaactcatagccctgagtgcctccagagagaaactagggagagcatacactagcagcctgacagcacacctaaaagctctagaacaaaaggaagcaaattcacccaagaggagtagaaggtaacatataatcaaactcagggctgaaatcaaccaagtggaaacaaaaagaactattcaaagaatcaaccaaaccaggagctggttctttgagaaaatcaacaagatagataaacccttagccagagtaactagagggcacagggacagtatcctaattaacaaaatcagaaataaaaagggagacataacaacagaacctgaggaaatccaaaacatcatcagatcctactacaaaaggctatactaaaaaaactggaaaacctgcatgaaatggacacatttctagacacataccaggtaccaaaggtaaatgaggatcagattaatgacctaaaaagtcccatatcccctaaagaaataaagcagtcatcaatagtctcctaaccaaaaaaagcccaggaccagatgggtttagtgcagagttctgtcagaccttcaaagaagacctaattccaactctcctcaaactattccacaaaatagaaacagaaggtactctacccaattcattctatgaggccacaatttctctgatacctaaaccacacaaagatccaacaaagaaagagaacttcagaccaatttcccttatgaatatcaatgcaaaaattctcaataaaattctcacaaactgaatccaagaacacatcaaaacgatcatccatcatgaccaagtaggcttcatcccagggatgcagggatgggttaatatatggaaatccttcaaggtaatccactatataaacaaactcaaagaccaaaaccacatgatcatctcattagatgctgagaaagcatttgacaaaatccaacacccattcatgataaaagtcttggaaatatcagaaattcaaggaccatacctaaacataataaaatcaatatacagcaaaacaatagccaacatcaaactaaatggagagaaacttgaagcaatcccactaaaatcagggactagacaaggctgctcactttctccctaccaattcaatatagtacttgaagtcctagcctgagcaattagacaacaaaaggagatcaaggggatacaaattggaaagaaagaagtcaaaatatcactatttgcagatgatatgatagcatatatgtgaccctaaaaattccaccagagaactcctaaacctgataaacagcttcagttcagtagctggatataaaattaactcaaacaaatcagtggcctttctctacacaaaggataaacaggctgagaaataaattagggaaacaacacccttctcaatagtcacaaataatctaaaataccttggtgtgactctaattaaggaagtgaaagatctgtatgataggaacttcaagtctctgaagaaagaaatcgaggaagatctcagaagatggaaagatctcccatgctcatggattggcaggattaatatagtcaaaatggctatattgccaaaagcaatctacagattcaatgcaatccctatcaaaattccaactcaattcttctcggagatagaaagggcaatttgtaaattcatctggaataacaaaaaaacctatgatagcaaaaactattctcaatgataaaagaacctctggtggaatcaccatgcctgacctaaagctgtattacagagcaattgtgataaaaactgcatggtactggtatagcaacagacaagtagaccaatggaaaagaattgaagacccagaaatgaacccacacacctatggccacttgatctttgacaagggagctaaaaccatccagtggaaaaaagacagcattttcaacaaatggtgctggcacaactggtgtttatcatgtagaagaatgggaattgatccattcttatctccttgtaaaaagctgaagtctaactggatcaaagaactccacataaaaccagaaacactgaaatttatagaggagaaagtgggggaaagcctcgaagatatgggcagaggggaaaaattcctaaagagaacagcaatggcttgtgctgtaagatcaataatcaacaaatgggacctcattaatttgcaaatcttcagaagatggcctagtcggccatcactgggaagtgaggccccttggtattgcaaactttatatgccacagtacagggtaatgtcagggccaagaagtgggtgagggtgggtagggtagcagggcagggggttggggggatggtatagggaactttcaggatagcatttgaaatgtaaataaagaaaatatttaagaaaaaaaagaaaaaataagatactgtcaataagacaaaaaggccaccaactgatttggaaaggacttttaccaatcctaaatctgataggggactaatatccagtatatacaaagagctcaagaagctgaactccagaaattcaaataaccccttaaaaatggggtacagaactaaacaaagaattctcaactgaggaatatcagagggctgagaagcacttgaaagaatgttcaacatccttaatcatcagggaaatgcaaatcaaaacaaccctgagattccacctcacagcagtcagaatggctaagatcaaaaactcaggtgacagcagatgctggcaaggatgtggagaaagatgaacactcctccattgctggtgggattgcaagcttgtacaaccactctggaaatcagtctggtggttcctggacatagtactaccagaagatccagcaatacctctcctgggcatatatacccagaaatgttcctacaggtaataaggacacatgctccactatgttcatagcagccttatgtacaatagccagaagctggaaagaacccagatgtccctcaacagaggaatggatacagaaaatgtggtatatttatacaatggagtactactcaggtatttaaaaacaatgaatttatgaaattcttaggccaatggatggatctggaggatatcatcttgaatgaggtaactcaatcacaaaagaagtcacttgatatgtactcactgataagtggatattagcccagaaacctagaattcccaagatacaatttgcaaaacacaagaaaatcaagaaggaagaccattgcgtggatacttcatttgtccctggaatagggaacaaaatacccatgaaggagttacatagatgaagtttggagctgagacgaaaggatggaccatccagagactgccccaccccaggatccatcccataatcagccaccaaaatgcagacactattgcctatgtcagcaagagtttgctgaaaggaccctgatatagctgtctcttgtgaggctatgccagtgtctggcaaatacagaagaggatgctcacagtcatctattggagggaacacagggtccccaatggaggagttatagaaagtacccaagcagctgaaggggtctgcaaccctataggtggaacaataatatgaactaatcagtactcccgcagagctgtgtctctagttgcatatgtagcagaggatggcctagttggccatcaatgggaggagagacccttggtcttgcaacgattatatgccccaatacaggggaatgccagggccaggaatcaggagtgggtgggttgtcgagcagggcgggggagggtataaggaacttttgggatagcatttgaaatgtaaatgaagaaaatatctaataaaaattgttttaaaaaaaagagtttccttggtcattgtgtctcttcatagcaatggaaaccataactatgaaagctatttttcacagtgatagaatgttctatgcacactgccatggcagaaaatcaactatcttacccagctatgagccctctgatcaacaatagtgactggtttagcatgatttttttccactagtttaatagtggcataaactttatataagtaaccaaccactttatgcttcaatataatgccttttctacaatattaaaccacactctatctacattgtcaggccaagtaccttttgccttgccaagctgcagagaataaaagactgcggagtgtgtaaccctgtagaacatgtatgtatgtatgtatgtatgtatgtatgtatgtatgtatgtatgtatgtatattgtgccactcctcttagctcagggattatgatggaaaagtagatagaataactaaaaagctagaaattgaagacactgtgtcttctggacacagcaggacagttacacatataaactctcttagtattgtgtcagcatacacaagacctattcaagtttaagtcagacaaaatttcatcctggagaagtgacgtggacatgaattattacccctagccatagaactatcagctttctttaaaagtgtagcctaacccaagagactccaaaacatacagtctattgctgttgaccttggttggacctagaaggtaattccccattgctgaggacaacagcatcagttcagaaacagggccaggagactcctaacctggaagtgatctgaatgtcccctccatgaggactagctttcatagtaccagaaggcaccatgcatgcgtctaaaggagggaggcaaccaacagtcttacctattatgcccatgaactacttcaattcttagattgcacaataaccctaagggtccctgcagtattggcaggcataccttaatggtaaccaaaagctctctaattggacttaagaccctctcagcaaaaaggaaaccatgaaaactgctcagtgctagtgaagtactattattggaggagaatctacaaccactacattattaaaccaacagaatccctaacaacaattcataaacatttttcatatacctacagataagtgtagttttcaccattcatcaaggaaatttctctttgtaacagatgatgaccattacagaaagccaatcaaaatccatagtggtgcacaccttcaatcccagcacactggggaaagaggcagaggcagggggcagggggcagggggcagggggcagggggcagggggcagggggcagggggcagggggcagggggcagggggcagggggcagggggcaggggcaggggcaggggcagaggcagaggcagaggcagagggagaggcagaggcagaggcagaggcagaggcagaggcagaggcagaggcagaggcagaggcaggcagatctctttgaatccaaggccagcctggtgtacagagggagttccagtacagttaggacttcacagaaaagcccagtctcaaacaaaacgaaacaaaacaaaaccagcaacaaaactcctcaacccaagcaaaacagtcaacatctattcataataaaaattgtcaagaaacagtgccaaaagaatacctcatgctatgctggtgcctggcaaatacagaagtggatgctcatagtcatctattggatgggacacagggcccccaatggaggagctagataaagtacccaaggagttaaaggggtttgcaaccatataggaggaacaacaatatgaaataaccaatacccccagagctcgtgtctctagctgcatatatagcagaggatggcctagttggccatcaatgggaggagaggcccttggtcttgtgaaggttctatgccccagtataggggaataccagggtcaggaagcaggagtgggtgggttggggagcagggggaggggggagggtataggggattttcggagaggaaactaggaaaggggatagcatttgaactgtaaatgaagaagatgtctaataattcaaaaaaagaatttatctctcacttcctgattttaatacattgcaaggctatatcagtccaaataatatggtactgacataaaaatagacacattatctaccagaacagtgtaatacttaatatcaatcatcaaattgatttgattaacaaagtatctttatgaggcctacctctctctctctctctctctctctctctctctctctctctctctctcacacacacacacacacacagagagagagagagagagagagagagagagagaaagagagagagagagactaagactcactatagacttttgtcattatgcattccctgtaatgttgaactacatccctctgaactgtgagccaaaataaatccttattctcataagttccttttttcagatatttcattatagtgaggagaaaagtaaatgtcttaggatttctattgttgtaatgaaataccatgattataaaaaaccgtggggagtaagggatttatttaatctttcaactctcagatcatattctgttactgggggtagtcagggaagaaagtcaaagcaggaaactagatgaaggatctgatacagaggctgtggatgagtgtttactgtaatgctcctcaaagcttgctcattcttcttttttttatagaacccagggccaccagactagggctgtctacatccacaatgggctgggtcttcccccatcactcactaattaagaaaatgccccaattgctctgcctgcctatagcctaatgttatggcagcatttctcaattgaggtttcttcctctcagacaactctagcttgtgtcatgttgatatatggctctgcctgcctatagactaatgttatggaagcatttctccattgaggattcttactctcagatgactctagcttgtgtcatgttgatatataatttgccagcacagtaactaatataaaaacatgaataaatttatgtgtttatcattaccagatttttaaatatagaaggatgccaagaacacacattgaggaaaaattagtttctcctataaatagtattgggtaaactaaatatctaacacatagaaaattgaaattgggatatttacttaaaatacatgtaaaaaaaaaaaccccataaactgaatggtggtggcacgcacctttaatcccagcactcagaaggcaaaggctggcagatctctgtgagttcaagttcagcctggtctatatagtgagtcccaggctacacaaagaaccctgtcttgggaaaaaagtgaaaagcaactgaaaaaaaaaccattaatagcctacaaataagaccaggaactataaacctggaagaaaattcaggaggaaattttttttttaagatttatttatttattatatgtaagtacactgtagctgtcttcagacactccagaagagggcaccagatctcgttacagatagttgtgagccaccatgtggttgctgggaattgaactcagtacctttggaagaacagtcagtgctcttacctgctgagccatctcaccagcccagaaaatatttgttgatatgtttatgggaagttattttgggtatcacatcaaaagccacaggcagaccacaaaaccaaaaatacacaagtggaatcacatcaaaatgtaaagctttgtacaacaaaggaagcaacagaattaaagggcaatgtacaaagtgagaaaaaagaaactgcaaactaaacatctgaaaaggatttacctattgtgtgaatatttcttagtaaaactcatattgaagttaaataattgctctaacagtactgaataggtgaaatttgttgagcctccaagaggcaagatggcacatgcttgcagctcctcgttctgcaggaaactctctccctcgggacaggaagtctgataagtcaccttcctaccaacttgttttatctttggggacaggtgatggaatatgtgatctagcttctgttttttgtttgtttgtttgtttttgttttgttttacttttcatttcttttgccaccatgataacttagctttttgtacctagccagttacttaaattggtgtcctccaattccattcatattgccttaaatgaggtaacttcatacttgatgctgaaggacattctacggagtaatctttctttatgcattggtcagttgctagataatgttgattcattttcctggctgttctaggtatagtgccgataaactcaggaggacagatgttcctttgcatcttaatttccttttgttttattcctggtggggtttggcatcatcaagaaacatttagaaaagattagaaatgtttgtatctcaaaaattatgaaaatttgacaatttgggcatatttccttttgtaatacattattgcttcgtttctatataaactagcacagcagtctggggagtgggaaaaccaccagatgacataaaatgtaactgttgtagcctctgtgtatctgaagatgaggactatgttaataagcagaactggcatgttctgtcatacactccagatatatttttccttctgcacactttattagcttggattcccctgaaccaaacctttcctcctggtaccaacctattttgcatttgagggacaagtgatgaaagagtgtggccctgcctttactttttttcttgttcctgttgccaccatgggaatttagctgtctgtaaattatatgtcaattaccaattttaatgatagcgggaagaagaagaaaagcagaacagaacattatgataggttctgattagaacagctattattaggcggggagagaacatatgggaaggagaatagtagaagatgtgtattgtgaaggggaaagaacaatattggaggattgggttcaaatagggagacagaactgtagggtagaagagagggtagggagggataactaacactaggggtgcttgaaaaatatggtgtgtgtgtgtgggggggggactgcaaaggcccaatcaccctacaatggaaggctctcttctgggacaaatgcctccaacaagtcaggtggaatcagggccgagatgacatcccatgaggctttaattaacattttggccagggagcattttccacaggaacccaacaaacagcacagccagtggggtattttagatcaggcgtgcctctgcttgctccaagcctgggacagaatcaccccacccctctccggctcacaagaccctgccttctccatgcttttcctccaccaaaagccagaggagctctctgtgactttattcttagaactaaaatgagcttagagacagaaattccttaccctgtagccagagaactccttcttaaaaacaacatttgggagggtatgacttctgagttcatgctggcctgccaagggctcaaaaatgaatagaatactatgatagatggcttgtggctacccaagacaggaacaatatcatatcaggtggattttgtagctcaggccttggcagcatcaataaaaacagaagggatctgctttaaatataacaaaaaacaacattggaaaaatgaatatccaaaaaagaatttccccccgagggaccccaatgtcagtaagacagtctgcccctgatgctacaaagacttccactggtaaaaaggttgtctctctgatatgataaaggtggagaacaactaaaacttttaaatttaaaacaggtcagccctcatccctgacagtaaaagggaaaactatttccatagaggctttatgggtatccagcatctcagagaacttccacccaaaagtcatcataaaaatagatgagaagcaattcaaataccttaatgatactgtggaagacaagacaattttgagacaagagattccataaaataggcagctaattcccaggtcccagcttttagaagagggggcagctcctatgctttttatcactaagcaagcctatagaccctgatagagctaccagtctaatacaccctctaataaccaacactatcaccaaacttctggggagagatatttcagaagccctagaagtggtacttgctagtcaactgtggtgcaagtggatcatgccaccagacagaagaactagtaaaggtgagcaggttcaaaccctgggtaatctcagaattgagaacggcaggtgtggaaccaactccctggcaaactacctgatctggaacatgtaaccatgacacttcactgagaggaccacaacagtcagtcacacagcataaaaacctggagttttccatgttaatggggcatctagataggccctgagtgtttggccaatgagattcccttcctgggcattccttcctgcaaaaggtatttaatctttggttcaccccgagtacccaagtaaggtgtatacattcatatcctctatcaaataaagcagtctggataggcaaggactctctccttcaacaaggattgcctgggggtgggtgggtgggggctttattgtaaagagccacacctaaatctcccagagaaggctttctctgtatcagcccctccctactcttggcactcaatctgaaccaaactggattccacacccatcccaggctcagccattcccttcctgcctggtgcatagatgccctaagggaaagcacggcccctgcttccaactcctagtggtataccagtggcatagaggtacacaggagaccaggaaccacagtatctattccagaccccactgtttcttacccagagaaacatgggctgggacccctatcatggtctctgttctacctcccctgagcagcttgctgaaggcgtgctgacaccccagcggtgaagcagacacacccaaccagaaaggaattgcatcaggctagatgattatacccataaaaattatactcccaaattcttaaagacccccttccaaatcaccccgaatctgaagagccattgttaaatttaatattccctgccttgactggttttctaacgagttcatttgagttgaacaatggcctctatcaagggagaaatttgaagcacttacgcaacttatagtaaaagagtggctctactccaatatactcacccgtccagcagttcaggcaaaacccctatgttttctataaaaatgagctcagggggtgaagactaccacaagatttaagagcaactaataaatcctcctaactaataattctcccccaagagggctgccccatgtctcacccatccttgctaatgtccctctcttggcgatagatactaaggactgctttttttctatttctctccaccctcaagatagcgaatgctttgcattttcagtatacctcattaacaacactggattggccttgtgatataaatggacagttcttctgagaattgctgacatttccactatctgacaagaggccttggccactacatttaaaccttacttagactaaggactcagtaaggacccaccttcccctcccaactttaaagatcagttaataagttccctatcctctctagaattcaaaatagctcctcatcaaatacagcttattacacccatcacattcttgggaatggaaatttccctcacctcaaaatgacctcttaaacccacacttttcttcctcaaaacctaactctcaagttgagaaaagagagaggagaaagacagttttactgtgagagttgtacagagacagattgtgtagagagaacaaactagatataggtaaagagagaatgagccacagagtgagaaggaaccagaagataagaatagacttctaggtagcgtctcggggaggttctcgctctgtccgtctcgctccgtctctcgcttccccccgccccggctcccttcgggacccccctccccggtcgccggcgtgtggcggagtgtgtgcgagggcggagggcgggggcgggcgtccgggggggcgggggcgggcgccgcggcccccgggacggcggccgggactgcgcggcgccatggacgtcgagaggctgcaggaggtgctgaaagattttgagaagagagggaaaaaggaattttgtcctgtactggatcagtttctctgtcatgtagctaaaactggagaaacaatgattcagtggtcccaatttaaaggctatttcattttcaaactggagaaagtgatggatgatttcagaacttcagctcctgaaccaagaggtcctcccaatcctaatgttgaatatattccctttgatgaaatgaagggaagaatactgaaaattgtcactggatttaatggtatcccttttactattcagcggctatgtgaattgctaaccgatccaagaagaaattatacagggacaagtttctcagaggagtagagaagaatgtgatggttgttagctgcgtttgtccatcctcagagaagaacaattctaatagcttaaatagaatgaatggtgttatgtttcctggaaactcaccaaactatactgacaggtctaatataaacgggcctggaacacctaggccacttaatcgaccaaagctttctttgtcagcccccttgacaacaaatggtttgcctgagagcacagatagcaaagattctgagctgcagctaagtgaagagaaaggccacagtgattcttcagcctctgaatcagaagtttccttactgagccctgttaaaaataaacatccagatgaagatgctgtggagtctgaggaacatgaggtgaaaagactgaagtttgacaaagaaggtgacgtcagagagacagctagccaaacggtgtctggtgaagtctcttcagttagagcagaggaaacggaaacagcaattccccctcctgacaaggacagagaaagtcgaaccaggcagcactgtacagaagaggaggaggaggaggaagaagaagaggaagaggaggaggaagaatcgtttatgacaccaagagaaatggtcccagaaagaaaaaatcaagaaaaggaatctgatgacaccttaactgtgaatgaagagacttcagaggagagccatcagatggaaggctctggtgtgtctccagctcagacagactccacttcagaaaggagtgacagtgcaggggcctcaaggagtggctctgactgcctggagacacaggagtcaggagggcctccttccagtaagaccggagaaagtgtgtcagtgccgtcgtccatggagaatgaggaagccacagaagtcacagatgacccaatggaacaagactaactacttaaaaacacttagaggcagtattttacatacagttctggttttacactgtataagacttttaagtaataaagtggacctttagttttacaagagaaacaggctgtaaaataaagaaccttaagaataaaccctgaaggttgtatgtggaagagctgtgagtacggctcctctgggtcccacttagtgctgattttcttgtttggtttggttttttgtttgcttttttcctggtgtactcaaatcagtggtttgtgtatagatttttttttaatttagaataaaagtttttaaactggaagataattataattttgaaaactttaaagatgatctcacttggtttatacatacacaaggaagatttttgtcttgtctctagcagtttccatattttggtcatagtttaaacatgttaacgtgaattaatagggtttcatgtggtttcagatttttattgttcgactgtacaatggaaccttaagtcatatatacatatatagattatcctgagggggggtgttatatttttctgtttctataagagatgaatacagtgaatacttttttattggtaatgactgagttcacttctttcagaagacatcttctcttctgagtagttgagacaaaaatctggcccctgtgagatcctgggaatctttcagtctgttgaaataccaggttaaacacattccaagagatctgtgcaaactaaattcttttgtatacttctaaggtgcctgagacaacaagacttcatttatttatggaaagtgtgctttatcttgggagttgtgctcaagcattagcttgctgtctgtagaatgagtgcttcggagcctgacatgaaaccatctcaagagcccacaggtcccataacattcggttgcttttctgaacactgtcaacatcacatctgtctttctgaataatcctatatgccgcatggcactggtgtgaaacatcactgtactggaagaattagtagaggacttcagtaatgtacctgagctaaaatgaccgaggcgttaggggtgcacagaaaccaccatgatctgtataacattttgaagtgaattaatatttttgaacatgcttcttcaacagccagtgttatatttttcagatcaacacaaagcacaatggttactactctataaactcaatattttcaaattcacatatttaaagtcatgcaagctgcaacttccctgtcagaattactggctgccaaatttatacctgtttcttcagctgtactttttgatatttagaatttttaaatttctgtaaagtaggttttgtagactgtaatgtgttcactgcctttgtgaagcggtatataattgtataatttcgtgtgtaactgaatgcttgggctttcaatacagtattcatataaagcaataaatattaatgttatgaaaaaaaaaagaatagacttctagagttagtttgagggcaagcagaacaattgatgaaaggccgagaaaaagaaagagacagggaaaaagaaaaagagagagaaaagccagattgaatccgtcagcttgaagaggagtttgagcctgaacagctgagttgattcaggcagatagagctcagaaagaacaagaaagggtgagcttatttagaagtaaggtccaaaggctgaaaaaattctaggcctagattgtatggaggctagaagctgtcaggactaagcctaggatagcagatgaaggcagtaagcccctgaggcaacaattacatcaggagaataaaagttacatttacagtcatgggtacttcttaacatattgaaaactgataatggccctgcctttaccaacttccaattcaaaacctttggctcacaatgggaaatttcccattactcagggatcttcacaacccacagggacatggtataacataaagaaaacatcaaatgctaaaagcctaacttaaaaaacaaacaaacaaacaaaagatacaccttaacataaaattaatgatggctctgactaacctaaatatatttaatatctacaagagcttcaaacatctccctatctccctccattagcactcaccaggggtaactcctacaatcctggtgcaatgtcaccatctcttggatgggatttgaaagggaccagacccgtaccttataaatggaaagggtttttcatgtgtgtttttaaattagatatttacttcatttacatttcaaatgctttctccaaagtcccctataccctcctcctgccctgctcccttacccacccaatcccacttcctgaccctagcattcccctgtactgggacatataaagtttgcaagaccaaggggcctctcttaccaatgatggccaactagaccattttctgctacatatgcagctacagacacgagctctgggggtactggttagtccattttgttgttccacctatagggttgcagaccccttcagctccttgggtactttctctagctcctccattaggggcccctgtgttccatccaatagatgactgtgagcatcctcttctgtatttgccaggcactggcatagcctcacacgagacagctatatcagggtcctttgagcaaaatcttgcgggcatatgcaatagtgtctgcatttggtggctgattatgggatggacccctggatggggcagtctctagatggtccatcctttcgtctcagctccaaactgtctctgtaactcctttcatgggtagtttgttccctattttagggacgaatgaagtatccatgcattggtcttccgtcttgattttcttgtgttttgcaaattgtatcttgggtattctaggtttctgggctaatatccacttatcagtgagtgcatatctaatgacttcttttgtgattgggttacctcacttaggatgatatcctccagatccacccatttgcccaagaatttcacaaattcattgtttttaatagctgagtagtgctacattgtgtaaatattttctgtatccatttgtccatttaaaatatattttctgtatccattcttctgttgagggacatctgggttctttccagcttctggctattataaataaggctgctatgaacatagtggagcatgtgtccttattaccagtaggaacatcttctgggtatatgcccaggagaggtattgctggatcttctggtagtattaagtccagttttctgaggaactgccagactgatttccagagtggttgtacaagcttgcaatcccatcagcaatggaggagtgttcctctttcaaaacatcctcgacaacatctgctgtcacctgaatttttgatcttagccattgtgactggtctgaggtggaatctcagggttgttttgatttgcatttccctgatgattaatgatgttgaacattttttcaggtgcttctcaggcatttggtattgagaattctttgtttaaactctgtacctcatttttaaataggggtatttgatttcctggagtccagcttcttgagccctttgtacatattggatattagtcccctatcagatttaggattggtaaagatcctttcccaatctgttggtggcctttttgtcttattgacagtgtcttttgccttacagagcagctttgcaattttatgaggtgcgatttgttgattcttgatcttagagcacaagccattgctgttctgttcaggaatttttcccttgtgcccatatcttcaaggcttttccccaatttcccctctattagtttcagtgtctctggttttatgtggagttcctagatccatttagacttgagctttgtacaaggaaataagaatggatcaatttgcattcttctacatgataaacatcagttgtgccagcaccatttgttgaaaatgctgtctttcttccactggatggttttagctcctttgtcaaagatcaagagaccataggtatgtgggttcatttctgggtcttcaaacctattctattgatctatatgcctgtcactgtatagatgtcatgcagttgttatcacaattgctctgtagtacagcttgaatttaggcatggtgattccactagaggttcttttatctttgagaatagtttttgctatcataggttttttgttattccagatgaatttgcaaattgccttttctaactccttgaagaattgagttggaattttgatagggattgcattgaatctgtagattgcttttggcaatatagccattttgactatattaatcctgccaatccatgagcatgggagatctttccatcttctgagatcttcctcgatttctttcttcagagacttgaagttcctatcatacagatctttcacttccttagttagagtcacaccaaggtattttagattatttgtgactattgtgaagggtgttgtttccctaatttatttctcagcctgtttatcctttgtgtagagaaaggccactgatttgtttcagctaattttatatccagctattgaactgaagctgtttatcaggtttaggagttctctgatggaatttttagggtcacatatatgctatcatatcatctgcaaatagtgatattttgacttctttctttccaatttgtatccccttcatctccttttgttgtctaattgctcaggctaggatttcaagtactatattgaataggtagggagaaagtgagcagccttgtctagtccctgattttagtgggattgcttcaagtttctctccatttagtttgatgttggctattgttttgctgtatattgattttattatgtttaggtatggtccttgaatttctgatatttccaagactttaacatgaatgggtattggattttgtcaaatgctttctcagcatctaatgagatgatcatgtggtttttgtctttgagtttgttcatatagtggattatgttgatggatttccatatattaaaccatccctgcattaatggaatgaaacctacttgattatgatggatgatcattttaatgtgttattggattcggtttgcaagaattttattgagcatttttgcaccgagattcataagggaaattggtctgaagttctctatctttgttggatctttctgtggtttaggtatcagagaaattgtggcttcatagaatgaattgggtagtgttccttctttttctatcttgtggaatagtttgaggagaataggaactaggttttctttgaaggtctgatagaactctgcactaaacccatctggtcctgggctttttttggttaggagactattgatgactgctttatttctttaggggatatgggactttttaggtcattaatctgatcctcatttacctttggtacctggtatgtgtctagaaatgtgtccatttcatgcaggttttccagtttttttagtatagccttttgtagtaggatctgatgatgttttggatttcctcaggccagccgagttcgcacccaagtaggtgtggggctggagccaccagaacgaatcccactcactggttgggtgggtttcctttgtccctgttcctgctggcacaagaccctctgggttttttggaacagatgttgcgttccactcaccagtgatctgggtgtgctaggcttctgcagtgtggagagtcttctggggacctgggtactctccgctgatatggggaattgcagactggtatccagttgagttgaggtcttaaccccaatggtcataattcaccttcatgacaaggtaggcgttccctcatgctcctagaactctggcccctgcctaaggtaccacctcccacaggccccacaagagaagcatggtcagtagtcacataagcaatggcccaagcttctgaccttaaggctaaactcctctccagttacttagcaacagtaaagtccataaaaagggctgttcagcccccaactgacgctcttactcttactccttcgttcctttatctctcactcacttctctctccttttccttttctctttgtcttctctctctctctctctctctctctctctctctctctctctttctccccccctcactctgcttttctataatacagctcttaaatcatagagagtctctgctccatctagatcctctgagtcactctcgccagtgttgggaactcctttcctcatccctctctcctataaccctggggcgacagggtgtcaccttggagttcctggtcgggttttgcctcttctccacccccgcctcatgggtcaagcatgctcacccggggccaagtggaaaagtgtccagcagctctgcctgcatccacctgcccagagcacaggaactctggccagacgtttggccccctttccttccccttcttccccagggcatccccagggtcccccctttttttgttcccaaaacactgagtttgtgcccaagatggcatggggctcttgtgtctttatacaggactagtccaagactatttggtcctagccagaaatgtccaacaccatcctattgaccatcaagatggcttgactcttactggcaggtcaaggaccaaggaggtggaggaggtgccactaacaaacaagatcttctggaaggacatttatgaggtagtggcagccgcccaggccacatgacctccacaggcttccctttcttccatttttatggccgtctttgattttttaaaaagatttatttgtttattttatgtatatgagtacactgtagctgtacagatggttgtgagccatcatgtggttgctgggaattgaactcaggacctctgctcgttccggctcaaagattttttttttaattttttttattaggtatgttcttcatttacatttcacatgctatcccaaaagtcccctataccctccccccaccctgctcccctacccactcacttccagttcttggccctggtattcccttgtactggggcatataaagtttgcaagaccaaggggcctctcttcccaatgatggccgactaggccatcttctgctacatatgcagctagagacatgagctctgggggtactggttagttcatattgttgttccacctatttggttgcagaccccttcagctccttgggtagtttctcttgctcctccattgggggccctgtgttccatcctatagatgactgtgagcatctacttctgtatttgccaggcactagcatccggctcaaagatttattattatatgtaagtacactgtagctgtcttcagacacaccagaagagggcatcagatctcattacagatggttgtgagccatcatgtggttgctgggatttgaactcagagcctttggaagagcagtcagtgcttttaactgctgtgccatctctccagcccccatggctatctttgctgttcttcattctaactctgctactggccagcctcttcctaaccctcccaatacccacaatgggtaattctttgctagggagacctataacagacacaataaaattataggaacccaggactattcacttgaaggatgctggaccaagattgagatttctttatacctaatcccatctccaatacccatagagctttcttctgctttccttactgcaacacagatgactgcctgcaggaggcctccatatataaaggtttcagatatttgagatgccaacactgaatccacaagctgtggtggcaccatgctcaccaactttaatacgcttttccagttttccatcagtgatccctgagaccaacaatgatgaatggaagttgtgggtaagctctaccctaatagtgataccaaataccctgtagctgatgtacacatctcccactcgctcatccctgcctgtaagtctttgcccatgttaacattcttcaacaggacgatcaaacacaaaaggagatccaagctaccctctccggttatatatatatatatatatatatatatatatatatatatatatatatatatatatatttatatgcctacctccttcccctaaccacctaccctaactcctctcaatgcctttttctgtgcttctctctcctgctaattattggcagctattcccattaacatcttgtttcacgaaccccatgaggccttatccacaaaagttacaaaacattcctctttttaaatttagccttccccattttgcctcctagagtcttcctcaaggtcctatccagcttgttcctgtaacatcaatgtcaacaagtcaatatgtgttaacatcccctctccccactttctctggtgcaataatattatcagttcctgtattaaacccccttttaaaggattctgcattcccataatgatcgttccccaggtttatctctatgaacctgaagaactcaccttgcaacctagagggggctgaaagaaaagagaggtcttcatccctctgctcatcattgtgctcaccatctgtactggctagttttgtgtcaacttgacacagctggagttatcacagagaaaggagcttcagttgaggaaatgcctccatgagatccagctgtaaggcattttcccaattagtgatcaagggggaaaggccccttgtgggtgggaccattactggactggtagtcttgggttctataagagagcaggctgagcaagccaggggaagcaagccagtaaagaacatccctccatggcctctgcatcagctcctgctccctgaccagcttgagttctagtcctgacttctttcagtgatgaacagcaatgtggaaatgtaagctgaataaaccctttccttcccaactgcttcttggtcatgaggtttgtgcaggaatagaaaccctgactaagacaccatctcactgggtgccatggaaccacccctcatccaaacacaccatttggccagtgacttccagataagcttgaccaggccacggcttccaccatgaagccatgtcttgagtcgctccattgacagatcacttccccaaaggggattgttctgcaaaattgaagaactctggacttactaagggctgaacaaggaggtacttgtgttgtactgggggaacaatgctatttttatgttaatgaacctgggttaatagaacaaaacatactggtgcttaaggatccccagtgagatttctgagatctttgagctctttgagcttgctatgcctcaggtaccacatcttgatacttaaatcctctggaggcttggctttttcacctcctcggccacatactggctattgggactcttctcctactggcttcctgtttcatctattttctaaaacagtaagtaagcaatattgccaatgtcgctaccaactaagttctggttcaatacaaaaccattcccaaaacatgttgactatggtgatgttgttgttgttgttttaataaaacaacagaaaggagctgtgggactgaaatggcccaggattacagagagtcaaaggttctccaatcccagatacctcaaatgaggatggcagaacttggctaacccccactcccaacctgacaccataaagtcagctgccccaccatcaaccctagtaagaatttattcagcctcactccttgtactcctaccttggccaactgtacgtggccacacaaagcttgcctcagagaccctgactacttccccaggggcataaatattcccctttccccccagtaaatggaaacagttctccaaaagctgctcctggatgtattctttgcccacacactcattgccaaccaagacctgtactacacccaccctagtctgtctaagttccgtccctccagttcagcttagtgtgtaacagccctgagtaccctgagggagaagcagacagacacaaagtggtagggggatggaaagagaagtttaaatggagttattctacatgggtgctatgcttcttccagtgccagatgtgggataactttctttgagtgtttattaggtgggcatcctagagactcttctataccaatccaatccaagctcttgacattgctatccacttttatggtaagatcatgttgctgaagacatcacacactttggttgcaaggcctagagaaaacaagttggtatctacatggaagctcactcactgttggctaggtttcagagcactggaaggtgctgtgttttatgttatcttgacacaggctagagtcatctgagaggagggaatttcaattcagaaaatgcctccataagatcaactgtatgacattttcttaattagtgattgatgggggagggaccagtccattggtgggtgatgctatccctgggctctataagaaaggaggcttggagggaaaaagggggcaggatcaggcatcagaagagacaggagcaaagcccagagggtcaggagaatgattagaaatatgtagcagtggggggtggagagtgggggggggactactagaaagtaccagacaccagggaagcgagaggttcccaggacccaactggcatgacattagcagaaatacccaaaagaggggagataggaactgaagaggctacctccaatagataggtatggcacccagtagaggggatgaggccattcacccatctcaaaatttttaacccagaattgttcttttctaaaggaaacacagggacaaaaaatggagcagagactgaaggaaaggctatacagagactaccccaccttgggatccatcccatgtacagacaccaaaccctgactccattgttgatgccaagaagtacttgctgacaggagcctggtatagctgtcccctaagaggctctgtcaacacctgactgaatcagatgcagatacagctaaccattggactgagctcaggaacaccaatggaagagttaggggaagaactgaaggcgctgaagaagattgcaaccccataggaagaacaacaatataactaaccagaatcttaagagctcccagggacaaaaccaccaaccaaagagtacatggatgggaccatgtctccagctgcatatgtagcagagtatggccttgtagggcatcaattggaggagaagcccttgttcctgtgaaggctcaatgcctgtattggctagttttgtgtcaacttgacacagctggagttatcacagagaaaggagcttcagttgaggaaatgcctccatgagatccagctgtaaggcattttctcaattagtgatcaagggggaaaggctctttgtgggtgggaccatctctgggctggtagtcttggttctataagagagcaggctgagcaagccaggggaagcaagccagtaagtaacatccctccatggcctctgcatcagctccttcttcctgacctgcttgagttccagtcctgacttcctttagtgatgaacagcagtatggaagtgtaagccaaataaaccctttcctccccagcttgcttcttggtcatggtgtttgtgcaggaatagaaaccccgactaagaccctgccccagcatagaggaacgctagaggagcgaggctgaatgaatgggtggggaagcacccttttagaggcaaaggggaaagggatgggatggggggaggcattgtggaggggagaccaggaagggaacaaaatttgaaatgtaagagatgtaagagagagggaggggaagggagcaggcaggctgaggaagtcatggggaggaagccagtaagcagcaggcccaccccctgcccatgacctctgcatcagctcctgcttccatgttcctgccctgcttgagttcctgtcctgacttccttgaatgatggactacaatgtggaagtgtagccaaataaaccctttccttcccaagttgctttggtcataatgtttcatcacagcaattgtaacactaactaagacaggtgccatgtaggtcaccagcagtcttactgtggactcttgagtttactctgctaatcagcttggcaaaatagaactgtggatgtaatatttctatgaataatatgggagtaaccaaatgcttttcgattggttttaaggtctattccacagctaggaaattcacatttggtactgcaaatcttgtctaaaatccatgactagtgagatcacagacactagggtgaacctgccactataatttttatgaatttacatagtatcaaattgcattctacctacctctattcccatatattagatgaactttcaatcttcatcagagtagcttattttacagtggtagtggttaatatgcaacttgtccaagtacacagaatttgcctgtggaatgcttagccctaaatgagacatttatattgcactccctgactgcaaggcttttggaagagagttttgtttcaaggatgtggccctttgtatgctgaccatgtttcattgaatggtttcacatccatgcacatttgggtagcattaatttttttacttagagagttatattttctttaaaaaaagaaagaagatagtggtagagacaagagtagttggagtaagtggaggtagatatgatcaaaatgtggtgtatacaagtatgaacttttcaaagaataaataaaaccctctgcagtagtaaaattgagaatcccttaaatcttgcttttctgaatctgtgcagcttcctaaaacatatgtaattatgaaaggaatctaaatggagccaccataaaatggtggagacaataagtaaattagacaccttatgccaccaagtaaaacttccaataccaggattcattgagtacttaaccaaaggggtcctatggacaccctccaccaagtatcacaggctattgacaaggttattggttgctttctacaacatgatggaaaggcatttttttttcttctgaagacagcacttccttaatgtcaatcaacatgaagaagttgagctggtgccctaatagaagcttcattcctactgattagtgttcatggtgctggaacatactctgcacacctactgaaaaaggaaggtaatcctgagtatcacacagccataaaccctgtgacctatgactgagacttgcctgcaagatatattggtgcaatagtgacacaaatattacagcattaaaaagtatatttatggtccactccatgaaatggaatccatacctgacactgctaaagtggccaagaacctgagactagataggtcatgggcttaggggaatatctaatattattctgctaaaggaacatagcaacagaatgactcctaatgacatactgttttatgatcagtgcctcactcaagccttatcagagaagcttcttcgtggagtagatgggaactaacacagagatccacaactagacaatgtgctcagagtgggacactttagaatactcaatcctaaatggtgtgtatttatcaacttcctccctctcaaggctcaggaactatgtggaagaagaagctgaaagattgtaagctaggtgatggatgcctccaagtaaacagtatcttccagacataacagaactgatgaacagaggaactcaaagggactgttatagcatgaataagaacaagttcaatctggggggaaatcactgagagggagaaattgaaacagagctctacccctaaccaagaagttatttgcaattgatacctgttggcaaatggaaaaatcagttttcctctatagaatgtcactgggtatatcaaccatactgcagggcagggcccatactaaggataacctgaccaacacaaaataaactctatgtttttaatgtgtgtttgtttactattttcattttagcatttttttgtcttactgatgtatgttttgactgttttcattcctcctcctcctcctcctcctcctcctcctcctcctcctcctcctcctcctccttctccttctcttctttttgggttttttgagacagggtttctctgtctaactctgactgtcctggagctcactctgatgaccaggctggcctagaactcacagagatccacttgtttcaacctcctgagtactggaatataaggcatgtgcaaccactacccagttttgatttggttttcatttttgtatttctttttgagagagagagagagagagagagagagagagagagagagagagagagaatataaagttggttaggaattggaataggaggttctaggaagaagatgggaataggaaaaagggtgctcaaaatatgatatatgaatgaatagatagggggttaagtactggtaaaatatttgataccattcaattttaattacaaacaatatagaaacaggatttttgtttagacaaagtctcattatatatccctggctgacctggaaatacttatgtagaacagactgcccctgaactcagagttccaattgaaatgcctttgacaatcaagcactaggagtaatgatgtgtaccactatacatggtatattagtcaggggtctcgagtcacagaacttatgggtagtctctacatagtaaggtaattgttaatggcttacagtctgtagtccaactcccaacaatggtcagcagcagctgtgaatggaaagtccaaggatctagcagttgctcagtcccataaggaaagcaggtaaagaagagagagagtcaatcttccttcttccaatgtccttatataggtctccagcagaaggtgtagctcagattaaaggtgtctgccaccatgcctttttaatcccagatgaccttgaactcagagatctccctgtcttaatcttctggaattcacagacactatgcctcaatatctccatgccaagatccaggtcagaaactcaattctggattgtagttcattccagatttagtcaagctgacaaccaggaatagccactacacttggctagaaggaaactttttataaacagtgtttacttaaaaccaacaagaaacctattaaacatgggatacagttgcatttcaagaacaaagtaggcatatttgtgtgtatttctgtgtgtgtgaatcacaacactttagtacaattatgctgactgcttactgggttctgtcaacatcatgtgtattctcaatgtaatagataccactgtggtatttttgtagcatgtcaagatctattttggcaattgtcactacattctatagctcttcacctttagcttctaggtcttattccctatattctcagcatatggagaatattatagcctgagtgtgagggaacaggggtttgcattgatgtaatagccatataagtgaaaatggacaaactgtggggcataaaagaaaaaagttagaatacactttgggtatagttaatcagtggtgtaaaattagagaggtgtgatggtttgtatatttttggaccagggagtggcaccctgtggaggtgtggccttgatggaatagatgtgtcactatgggtgtgggtttaagactctcacccagttgcctggaagttagtcttccactagcagcctttggatgaagatgtagaactctcagctctgcctgtgccatgcctgcctggatgctgccatgctcccaccttaatgataatggactgaacctctgaacctgtaagccagccccaattaaatgttgtttttataagacttgccttggtcacggtgtctgttcacagcagtaaaaccctgactaagacagagaggtatagccaagaatgttaaggatttatgtcatttaatttccctgagcttacctctagagaataaattccccaggcttccctattctttcatgtaaaagacagatctgaatctcaattcatggttttggctgacaaattaaagtatggactcttaagaaaatttatattctcataatttagcatttatatttctttctttctttttgatctcaacacaagccaattatttttttcatatttttattggttattttatttatttacatttcaaatgttatccccttccccattctcacttccacaacccccctattccctcccctgactccctgcctcaatgagggtgctcccccacctgccctcctattcccacctcagctccctagcagtcccctatgctgggtcattgagcctccacaggaccaagggactcccgtcccatagatgccagataaggcaatcctctgctacttatcctagagccatggtaccccccatgtgtactctgtaggtatatctacacattggagtactgctcacatattaagaacaattacttcatgaaatctgcaggcaaaggaggtaacccagtcacacacacacaaaaaaaaaaccacacacatggtatgtactcactgataagtggatattagccacaaaaaaagagctcagaatagccatggtacaactcatagaccatatgaaacctaagaagaaggaagaccacaccaaagtgtggatgctacagttctactcagaaggggaaagaaaataatcttgggagggaaggagggagggagggagagagagagagtgagagagagagagaaatatgagggagagaggagtggagggaaaaaggagggttggttcagatatgggaggagactggggaaaatacagaggatcaggaatttgaaaggaggtgttcagcagtgtgggagggggaacttggggtagccactagaaagtcccagatgccatggaaccaagaggttcccaggacccaacagagaggacattagctgaaatatccaacaaaggcgatatagaacctgtagagacaatatccagtgtataggcatggtccccggttgagggatggggctacccactcacctcaaaaataataatccataattcctcctgtcaaaaggaaatgcagggacaaagagtggagcagagtctaaaggaaaggtcatccagagattgcaccacccatctatcccatctgcagacaccaaacccagacatattgctaatgccaaggagagcttgctcacatgagcctggtatagctgtttcctgagaggatctgccagagcctgaccaatatagatgtggatgcatgtagccaaacattggactgagcacagggaccccaatggaagagttagggcaaggtctgaaggagttgaaggggtttgaaaccccataggaagaacaacaatatcaaccaactagatccccaaagcccccagggactaaacctataacatctatatttctatcatctatgaaagtattaaaacttcttttttgtttgtatgtccataaatattcatattaactcttagaaagaaaattaattttggagcttgtaggttgtaccatttgtcaaaagatctttaaacttttcatgtactcttatgaaagaactaaatacataccattaaggttccagtggaatttccttgataactcagccacttcttcccatccaggctatacatgatgataaattgagagatataaaggctggaaaatttctgacgagcaccctgagtcttgatgccatgaacaatcattggtgccaacagatctacctacaaattaaaacaacttattttaatctatttttaaaagtacatagtataccttgaaaattattagtattcattgctattaattatccacttagaaaaactctattgctacaattgccttgcatattcagggaaagcaggcactaatgttgaaatgtgaccatgtatgtatgtaaagccatggaacatatgtgtgttattttgaatattcttggcccatggagtagtgctattaggtgtggctttgttggaggaagtgtgtcaccgtgggcatgagctttaagatcctcatcttaacttcttggaatcctgtttgccttcaggtcaagatgttgaactctcagctcctcctgtaccatgcctgcctgtttgctgtcatgctcctgccttgatgataatggactgaacttctgatcctgtaagccagccctaactaattgttgttctaataagagttgtattggtcatgttatctattcacataagtaaaccctaactaagcaatatgataggaatgagtaggaaaggtatttattgaattatctatccatttcttggcaaatcagatcactttcaaatcattgagtcacttcctcctcacacacatccatggagttgcacatataaatcagaatggcctaatatgtgggcctgattgattatgggttaaatgatactattttttgatatgtttagttcaataaaatgtcttattaagatgaatttcatggaccaagtacaaggatcattgagtaatgtggttgttgtgcaggtatggaatatctgactttagaccttagcacccacagaaaacccaggaatggaaactaatgcagccactaaggaaatcagtgtggagactcctcaaaaagctagaaatagaactaccagaactattatatgatccagttttaccacacttgggcatatacccaaaaaactccattttatattatagagttgcctgctgattatccatgtacattgctgctctactcataatagccagatggcctagatatccatcagctgataaatagatcaagataatgtggtatatttacataatgaaatattatttagttattacaaaactgaaattatgacataataaagaacatgggtggatctggaaacaactattctaagtgaggtaacctagaccagacagacagacaaatgttacttgtttgctcttatatgtgagtgttagctttgaatcttcagaaatatatgtttaatttggaatatccatagaagttgggaagttacttaagggcatggaagggggggggatttcatggtagggaaaatagaacatgttagtaaatggttaaaagggatttatggaaaaaggtttgaatttgggttggagtgggaacaaccaggaaaagatggcaaataacattttaaggttttttgaaaaagtcatatagaaacctatatggctcccataagctcatatatttcaattcatggttattagtagttacaactactggagagggtttaggaagttagaggaagtgtgtcactagggcccggtatcactctcttcctgctgattaaggttctggatgtagaactctcagagacttcttcagcccacaagtcaggatgcttcctaccaagacaacaatggattaaacctctgaaactgtaagccatccctaattaaatactttcctttataagagttgcctttgttatggtgtctcttcatagcaatagaacactgactgagacagaagttggtaccacgattattgctgctacttgtggtagtatgtggattttggattaagaaagtagtttaactatttaggtgtggcttaaagggtcacactagtaggagtttagaagagagtggttctgagagcaatgtagattatgacagccctgctgttttatgcccttgtctaaaaaaatctgcctgaggataaattagagagttttggattaatatcattggcagaggagatttcaagaccacctagtattgactctggcaagtggttattagtggccactcctatgcaaatttataacgaaaaggaacaagctgagcaacgaaaaatacaaaatgtatagcttgaggagaaaagtggcatcaggaagtgtaatggagctgagctaagtctagtgctcaaggagatagaaagtttacagaaaagcctgaggttaaatggaataaaaggagtgagtgttggcctagggaaagaccccatccagcttccaacttgtggaaatgaattaatgaaaagcttaagcagtgaaggaaactattgaaaacaaaaagctagtgacgattcaaacaaatgaggggccaagtttcaggcacagaacttggcagttttggccattgtggttctggttttagagtcaaggattcaaaaaaggggatgtggtatctccttctgaggctaaggaaaactgctgaggctagccatatgtcagagaggcagttgtatggagctgtgaaagtgaagcttagatttcaacagagtccccaagaagttgtagatgcaagagctgtggaatacctgccacagagagctgcagaaccagccaaagagagaaaaatatattgcagtctgtactggctagttttgtgtcaacttgacacagctggagttatcacagagaaaggagcttcagttgaggaaatgcctccatgagatccaactgtaaggcattttctcaattactgatcaagggggaaaggccccttgtgggtgggaccatctctgggctggtagtcttggttctataagagagcaggctgagcaagccaggggaagcaagccagtaaagaacatccatccatggcctctgcatcagctccttcttcctgacctgtttgagttccagtcctgacttccttggtgatgaacagcagtatggaagtgcaagctgaataaaccctttcctccccaacttgcttcttggtcatgatgtttgtgcaggaatagaaagcccgactaagacacagtcaacaaagatgaaaggaatttgagatctgtgttggctagttttatgttaacttgacataagctaaaatcatctgacaggaagaaacctcaatttaaaaatgcctctataagattgggctgtaattagtgattgatgtagaagggcccagcccactgtgattggtgttatctctgggctggtaattcttggctctataaaatgtaggctgaacaagccatgctgaacaatacagtaagaagtacttccccatggcctctgcatcagctcctgcttatagatttctaccctgagttccttcctgactttatttgatgattaacagtgctgtgaaagtatagggaaataaattctttcctacacaggctactttggtttcatcacagtaatagtaattctatctagacaagatccaaaaattgttttgacatcagacatggatacacataatttggagtttgccctgctggttttaggtcttgctttggaccagtatttccccgctatgctccctttctcctttggaacagaaatgtatattcagtgccattgtatattggaagtatgtggtctgtgatttgattttgattttacagaggttactcttaagagattgccttgagtctcagaaaagactttgaattttggatttctaagagttgagattgttatagaatatgggggctttaaacctagtgcagtggacatgtactagaatctatgaagatgacccttgtgaggactcctagtaatgaaggatatagagcctaaactggccatctttggaaacttagaaaggcttccattagtaagatcaggatactaatacagtcacaaaacacctggcctgcctgcaagatgtgttggggcaatggtggctctgagtttgtgagagttgacaaccaatgacttgtctaacttgaagcccaagccacaagagggagcccatgaccaatactgccaggatagccaccaattggaaactgaatggcttggaaatctagggtagaatgaaacataattgattaaaaaaaaaaactacaaattgatccttaatcatattctgctatacttatataccagtgcccagttctcatcagtggggcttcttgtagcagctgatgggagtagatacagagacccacacccaaatattaggcagggctcagtgtcttagggtttccattgctgtgaagagacaccatgacttaggcaactcttataaaggacaacatttaactggagctggcttacaggtttagaagtttagtccattatcatcctggcaagcatgcaggcaggcatggtgctagaggagctgagagttctacatcttcatccaaaggaagccaggagcagactgtctcttccacactgggtagagcttcaaagccacccccacagtaacacacttcctccaatgaggccacacccactcccacaaggtcacttattcaagccaccacactctcgaaaccctgaagaagagtggaataaaggattgtaggagcccaaagggtcaaggacatgaggaaaacacattccacagcattaactaagaagggctcataggggctcacagagattaaaatagcaatcacagaccctacatgagtctgtgctaggtcctgtacatacatggtgtggttgtttagcttagagtgcttgtggaactcctaacaatgggaaaagaggtgtctctatttcttttgcaggctctggggatccttttcctcctactgagttaccttgtccagctttgatatgagggtctgtgtccactcttattgcattttgttatgtcatgttctgttgctatccctgagaaatctgctcttttctgaagggaaacagaggagtagatctggaggaaaggggagatgggggaaggactgggaggagtgaaaggaggagaagccatgtcaggatatattttatgagagaagaataaatttttaaagagttgaactaattgtatttgatgcattatgatatggttataagcctatggggaccagggagtggaatgaggtggtttaaataaaaatgatcctcataggctcatatatttgcatgcttgatcatcaaggagtgtcactacttgagaggtattgggaggtgtggccttgacaggataagtgtggcattgttggaggaactgtgtcactaggggtgagcttgaaatttcacaagcacaaaccaggccgagtgtggcattctcttcctgctgcctgtggatctagatgtagaacactcagctacttctctagcaccatgtctgtttacacactgccatgctccctgtctagacaacaatggaataaattgcaactgaaactgtagacaaactccaatttaaagcgttcctttctaagagttgccatggtcatggtttcttttcatagcaatagaacactaagacatgtatctaatattgtagaacacacagacacacagacacacacacacagacacacagacacacacacacacacagagacagagagagacagagagagagaatggagttaccttaaaatagggcaacaatgctcctacttaatatcacagctaacaaacaaaaagctcaatgctgggaatgggttacctattttagagttcttagtcaacgagtttacatagattccccaaacattataggctattgctaatgttattgtttaccctctagatggtaaaaaccaattactgaagacaccatacacttgagttatagaacatggataaatcaagctggtactgacatgtaagtttcatccatacttatctttttttcacatataatatttttattgattctcaacattatgcaccctgattacaatctctttcaagtccttccaaatctaggccctcttatgaattataccccacaaaaaaaataaaaagaacaaaaaagaaagaaacaacaacaataaaaaagttgactttatgttatctatgtattcactggagaggtgcaaactctcaacagtgtgctccctaaacagaactgaatcctttttagctttcacggtgctagacttttctatgtacgctgccaggggagaaaagtagttaaaatcttgttcaactatgaactctgtaagctataataatgcctgatctgacaatatatgtccactggtataatactggaacaaatgctattgaagggaccaactactttctgcttagatctaagatctgctccatgacctggaacccataaccattactgttaaaaggtccaagaacctgagatttgataagtcataggccctagaggaggacttaatactattattttgctaaatggacatagtattaaatttacttctaatgacttactgctatacccatagctcaatgtatttctcaaccctcattagacaagtttctccttacagtagatgacaattaacacagagactcccaactgttcaacatataaagaataaaagtgttcagcctaaagtgggacatatatattaaacacctcctacagctcagggatttttgtagaagatgggatggaaagattttaagagccagagatggtcaataacaacaaagaacagtgttttctagacacaacagggtagtaacacctatgaactcaaagcaacataacaatatgcacaaagcttccacaagcttcagccagaaaaaaaaaatcccaatatggggtggggaaaagtgggtgtaaaatcctaccactagctcatgaactttgggcatttgatagctgctgggagaaggaataccacctttcttcctcagagtaacacccagtaggttgaacacacaaagagaaggtcccactactaagactagatggacaatacaaagtggactcaaattagaaagaaaaagaagaaatctcaaaagttgggtgggaaggtaagagaaagtggagaggatggttatggaaggaattgtgggaggaggcatgaatatgttcaaagtacattatttgcaatttccaaagaataaaaaaatattgttaaacataatatggagagaaacagacaaatacaactgatatttaaccctggtctccacatgtgctatgcataagcacatgcacatgcacacacataaattcataccatacatacatacaaacaaacaaagagacattaaaataaaaagatgattttcatgttcattttaatatggctactagaaaatgccaaataatacatgtgattttatgtacatcatatttccattgatgatggctcatcttgatgaaatagcaaagtcagataatctgagagtctgtatacatttaaaatttttaagctaacctacttcaagtattagtacatcttagcttaccacagtagactatattaagtaggtacttcctaatacccaaaggatagaaatcttctgaaaaaaagacaggcttaattatataaaagaagctacaatttatttgcttttaagattaaggactaagctcctattttgtataaaaatgaagaacactagaggactcaggcacctactcagtaggagatatatcatcaaagaaaatacatggtcttgaaaatagtgtcttagttaggtttccattgctgtgaagaggcaccataatcaaggcaactcttataaagaacaaaaagttaattgaggctgtcttatagttcagaggttcagtccattataatcatggcaggaagcatggcagtatccaggaagacatggtaatgaagaaggagctgagagttctacaccttgatccaaaggcagtcaggagactaccttgtatactgagtggagcctgagcataggactcctcaaagcctacccacacagtgactcaagtactctaataaggccacatctcctccaataaagccacacctcctaatagtgtcactccctatggccaagcatacaaatatgcaaatctatgggggccaaatctatgcaagctaccacaggtagtaaattcaaatttatagaaatcattctgatgttagattccaagtagaaataaatgggattgatctgtatattaaattctattccaaatgactaattttttaatatttctgaacaaacttagttattctattctatagtttcctcatatgttaaatgatattctatgggaaagactacataatgatagtattttgaacttggtgaatgttgatacatttctcatagttttctgaccttgatccaagaaaagggctccttggtactccaggcattgattgatccggaataatgaagtcttgccaggtttggggcccactgtcctttgtccaagaaagaagagagagattatattattatatattcaattgaatttatcttaaaaacttgggaacaacagtattatctagagaaaggttaattctagctgcagaagatataaagcataaaagttttatagcatggcagtattgattattgtctaaaggatttgctttttggtgtcgtatattctatgttctagtttctttgggaggaggcagtaccggggaatgaacctggggctttgcatgtgttaagcaagtgctctaccactgagttatatatatgaaatatataagtggtactaaaatgtttctttaccatataatgtaaatttactatagaaatgctagaaaatttaaaaatagcaaaaataaataaaaagcatagtgtttctattcagaaatacattaaataaatactaattaaacctaatttccaaggagaattttcacctttaaagtagaggttgacaaacacacacacacacacacacacacacacacacacacacaagtgtaataaaatttttttctcaaggtaatattttaagtgattatttggaaatttcgcataatacaccctggtcacactcacttctcaattctctcaggtcccctccctccactattgtgaccttcccccaagaaaaggaagaaaaaagaaaaaacaaatccaatttgtgctggctatatactcactggaacacagtcaaactcccaatggcaagccccttaagaaaaactgagtccctccctacctgtgcccctgaatatttggaaagaggaagtagactggaagattgggaagaggagtatgaaaggataataggggacagtgaatagaatcaaagtatattatattcaattaagaaaacaaaaatgtcacagtgaaagcaactgttttgcagaaataatatagagtaaaatagaaaattattcttaactcatatacaaaaaccatagacaatgatctgtgagcccttattctagaacaattttctataaacactatttaagcttgactatcactgtgcagaagaaacggtagcttcttactatgctcaatagaatagactttcgggagcagttctgaaggtactagaggagggcatttcaagagttaatgtcattgtccaattaagcctgaattaaggtaaggggcctaaattaagatggtcatataggaaatggaaataagaatgtggacttgagaggagtctactgagaagaagtaagaaaagaatggagaggggctgaagagatggtgcaccaattaagagcactttttgctcttccaaaggacccaggtttggttcccagcaaccacaaggcagctcacaaaatgtaactccagcttcagggaattctatactctcttctggcctctgtgggcatcaggcatgtccatttccacgaagacaaaacacccatatatgtaaaataatataatgtaaaaaagagaaaagtatggaagggagtagattggttatttgaaactgttctacagaaatgaaaaaaaaaaatcagccctgattcttatggcaaaaataatggtatttaccataatgtcctgaagctgtaatctggaaatcacggatgcttccagaagccattccaagaggaatctgacactctgaaatcaaacacagaagctagaaatgactcataacccattaaattataatatttttaggtaagtggttttctattacttgtttaagaattgtcttagtgttttttactgttgtgacgagacaccatgaccaagacaactctggtaagaataacatttatttggggctggcttataggttaagaggttcagtccattatcatcaaggcaggagtatggcagcatgcaggcaggcatagttcaggatgagctgagagttctacattttcatctgaaggctgctagtagaagactgacttccagacagctagggttgagggtcttataggccacacccacagtgacatacctacttcaacaaggccacacctcctaatagtgccactcccggggacgagcatatacaaaccttcacaaggttacatccccaaactcttacaagtgaaatttctaagttatctctggtaattaaatcaaaattaagttcccaaatctgatattgtaaaattgaagatttttaagcaacagtctgctaaatatcacagcttgatattcaaagggcccaaagctcattcattttaaatttgatagtaatacaagcttgtatttatttttttgacaaagacagccacttcaaggaggaggaaaattatacagaaatagactgaatggttagtgaacttctatccatagttactcacgcttgctgtacaccagaaaaagagtgctcatcccagcctgtaagtgctcgccaataaggcattctactcgccatattccagctctggatggtatcatttccagagtctcaaaaacaccttttaaaatgaaaaggaagaaaaattatatttcattaaaaatgagtatggaataaattggcttatttacaatatgtaatatgaaaatagagttaccaaaattcagttccattaccttagatctctcaagtgcaaaggatttaccatgtgatgttttgctctgaaaaaaaatcctagaggtatctttactattgaccagatgtaaccttcaaggtgaatagaaatcacagtaagatcatctaggatccagggcactaagtaaagggatctcaagttataagaaacttgagggatgggagaagctggacaggtggctcaggggttaaatgtgcaagtgctcttgcagaggacctgagtttggtatccaattacctatgtcaggtcattcacaactgcctgcaattacaactcaaggggttctgatgacttcttctgaccttcgtgggcaccagacacttatatgtgcatacagacacagacatatagacacacacacacacacacacacacacacacacacacacacccctgtactatttaaaagggacaaatggagaactgaaataaaactgtgttttgatcaacactgtcattagtgcttcatcaatatattggttacatctgtaaacaaatcagtcttgacagctgctagtatcgtgggatttgagaggaatataataaaagattcttagggaagtactatctggtgttaattattattttaaagtagtttttatgcatctgaaattatctcattcatttgctaatgtatttaaatttgtgtataggataaagttactttgaaaaagtaaggcatttcagcaaggaaattctctgaaactcatatcaaatattaccatttaaagtaagttatcaataaatacagtagatagaggacagtataaactatctcacacctgggtagaggttgtacactgccattttatactcctcttttttccgtacagtgaaaacatgtccactgaaatgaatagattggatgttctcattgttgcccatgctgagaagataccatcgaatcctttgatcttgagccattactaagcctggtagggtatccattacataaccattgattgctagagaagaacacagagaaaattactaaaacctatcactgaagttcctgtttctccacagaaaatactgatatccttcagcatttcacttattacttttcaagtctctggctcatttgaaaaagtacacactatatttcacagtgagtataatttatgtttggattttattaccatggaagcgataattctctttcaaagtggggtcttccatctggaaattgcagggtgtcttgcagttccttttcacgttttcagtgaagtaccagctcttggtctcatcaaagatagtgaaaagcagagcaaattcctgtactgacacttgtctcccatgagcaggattcagtgtgttcgcgtggcaaatcagaaggggtccaattaatcccgagtgcatatctctttcctagagttcccaggagggcattaattgtattagtgtaagttctctcttatcaacttgcatgccaaagtactactcattctatgtagtagattccagagtaatatttctaacatagaaaagtgatatcacttcccttgcttaaaattctcactgtgcttaggataaataccaaaatgcttaccatagaagataaaaatcaggctggaaaagatagctcaatggttaagagcactggctgctcttccagaagatctgtgttttattcccagtacccacatttcagctcacaactgtttttaactccagttccaggggatccaaagcctccttatggtctttgagggcaataggcatacacatgatgcacagatataaacacaggcaaaacaccaatactcattaaaaattccaaaaaagaaataataaagacctttttttaagtgagaatatggatatcccaataaagaacggcttacaagatcaacatcagagaaataagcccaggccttgcagtcaaactcatcttctgtgggtgccatatgatgttgtactttccaaaaataaattttggtttcattaggcttgacaaagtttcttctaggttcttctcctctctgatcttctttataagaaatgaggctagaatagaaggagtagggacgggaggcctggtttttgaaagttacctgaagaggaaaaaaaatccaggagaataattttttagaatattaaaatcctaaggttttatatctgtatccctctatcttttggtctctatccaatttttattaacttagactttaaaaagaaagttatgagaaaaatttggattctagttttataagatgaaaattacagaggagaaaattattaaacacctaaaagtaaacagaaaatctcactatatcttgaagagtgactatttaaggtttcttataacaaattccaagatggatatatattatcttttaaattttttatttattttaatcagttctttgagaattccaaactgtaacttgattaaattcatctctactttttctcgaagatcaaaccctacatccctactcacctactttgtgtccttttaaaaaatgttttctttttagattaaaaaaaaagtatggggctggagagatggttcagcgggtaagagcactgagtgctcttctgaaggtcctgagttcaaatcccagcaaccacatggtggcttacaaccacctgtaatgagatctgatgccctcttctggtgcgtctgaagacagctacaatgtacttatatataaaataataaataaatctttttttaaaagtatgcacatttatcataaaatatatgcaaagtaaaataaattccaagttagaaaaaatgtatctataatcccatagctttagaggcttctatgtttattagcagtcagttggaaaaaatgaatgaatatttttggaataaaataaaataactttgatctttttcttaaaatgcaccaaaaattacttacattttgtaggacttaatgagatatagttgagtaataaaagtattttccttaaaaaagtatttccctaagtttactgtctcttaatttcataagattttcttaaaaaaataaaatagttttttaggttgtaactcataaaacattccactttgacaatttcactgcttttatatttataaaaaatttctctctacccataaggcttttaaatattttcttttatagcacaattttgtatttaaatacttttagttaaaattgtcactggttaatatctaatatgtagccgggcagtggtggcacatgcctttaatcccagcacttgggaggcagaggcaggcagatctctgagctcgaggccagcctggtctacagagtgagttccaggacagagaaaccctgccttgaaaaactaaaaaaacaaaacaaacaaacaaacaaacaaacaaaaaaaaccaaaaaaaaaccctaatatgtaaggtaatattaataaaattatcccctctaaaaagacaaatttacaaaggatattaacagagaattcataattcatgtatagtacagttctggagttttatcctagttaaaggaaaataattatttataaaatagaaaagagggaagctgggtgtgatggcattcacctttaatcacagcactctagaggcaaagataagatttctccaagttgcaggtcaaggctacattgtaaattgctgtctcaaagaaataaaaggaaaaaggagatgatttcaaaggttcttcaaagtacatggttaaggaacctatggttccaacaattcatataatagattattatgtagtcattcttttttcctgttttgtttttatagacagagtctctctcaagattgtcctgaccatccttgaattccctacatagatgaggctgaaatcaaactcagagatccacaggcctctaactctgcctccagagtgcatggatgggaggtaaggtggggagttgggaagaggattaaagaaaggcatgtgctactacacccagccacagtccttcctttcttacttataaagtgtttaatgatataaaatgtttattacataatacataattaaaaagaagcagaattatatatgttataatttctaatacataaaaaagtcaggcaacagatgagaaatacacaacaaaataactataggattattttcaactttttaattttatgcactttattttttcagatgggagaatactttatttttcccattgatatatattcattgtgttactatattacctaggatattttcattcatgtgcacgatgcagcttgaatatattccttatatactcctttactactctttctcttcctcctctctcacattacttccttttgtttccacaaatcagtcttctcatactgtgacatgatgttttctactgatattcacactgaagaattattcaattgagtttcaaaaaatcattcaaagtaagtttgtaattttgtgctaggacacacatatctatatttggttgcatgtgttttgcaggctgttatgttaggcctagaccagtagttctcaaacttcctactactacaaccctttaatatagttccacatgttgtggtgaccccagccataaaattattttcattgctacttcaaaattgtaattttgctactgtgatgaatggtaatgtaaatatctgatatgtaggatatctgattcatgacccttattaaagggtcaccttatcctctcaaagggttgagaaccactagtctagactatttaacttctaattttgtcatatgtacatataatatttttataattagaagcaaactaaatatacagaattgttttttggaattcaattgcctttaatttaccataatgttgtcttcaacttctgctcttatatatgggcccaacaaccccaggtgttcatttaattctccacgatataagggctgactaaaggagccatcagtaaattcctggaaaactactttcttgaactgaggtacattgtcactttgatacctggagaaaaagcagaagaaaatcagcactttgtggatccatgaggagggatatctcacacttttgttttccctttatttgagatatacttaagaaaaattcatgataaatgataaatataatggtgcaggcaggaaggaaagagatgaaagataattttcaggggctagcgatgtggctcagtttgtagtgcttcccaacatgcagggatctctgacttccatttctagtgcagcataaactagttatggtggctgtaactccagcacccagaagcctgaaacaagagaaacactacaagctttaagccagaatgggggacatagaaagtttgagaatagccttaggtacctgagactcttttacaaaaagggaggaaggaaggaaggaaggaaggaaggaaggaaggaaggaaggaaggaaggaaggagaagaaaggaaggaagggtagattttggtttcagtacacaaaacacttgtataaactaaattggcaaatgccaaatagctagaggtcagaagtccacaaaatttgtatccttattttattagatagctaacaaataatttgttgccctttgaaatattgtcttcagactttactactatgtaagttctttaaaagatggaagttttgtctattttttctactgcttcattcccagaagtcagaacattatctaatacgaggcacatactcaaaatttattattgacagctggagagaaggctcagtgtttaagagcactgactgattttccagaggttctgagttcaattcccagcaaccacatagtggtttagaaccatctgtaacaggatctgataccctcttctgtcatgctggtgtacatgcagatagaagactcatacactcattaaataaatatatctttaaaaaatttattggttcctgtctgaaagaactgcaggaacaaaaatgcagaagatcccgaggaaaaggaggtccagtgccaggctcaaattgggatccagctcaaggggaggccccaaggcctgacactattactgaggctatggagcactcaaaaaaaggggcctatcatgactgccctccaaaagacccaacaagcaactgaaagagtcagatgcagatatttgcactcaaacaatggacagaagcagctgacccctgtggttgaattggggaaaagctggaagaagctgaggaggaggaagaccctagaggaagaccagcagtctcaactaacctggccctgagatctctcagacactggcccaccaaccaggcagcatacaccagctgatatgaggctctccaacacatatacagcaaaggattgccgggtctggactcaggcaaagaaggtgcacctaaccctcaagagattggaggcccctgggagtggggaggtctggtggagtggggatggggtgagggaggggagagtgaagacatcctcgtggagaggggggaaggaggtacgggatgtggaacagtcagagggtgaaccagaaggatgataaaatctgggttgtaaaaaacgattaaataaaattaaagaagaaagaaacctgcttccctataacaagaaaaaaattattggtgagtgttgaataaatatagaccttaagaacatactctaaatataagagagcctggtttctatttcttagatctcatttttttaaaaatattactttaaaattctgaactaaaatatacacatctttcattcagaaatgcagacatctcccagaaaactatatatccctttctactcacaccttgctatctctctgctaaaggtaaccactcttctgatgcttataataatcttatttctttgcttttcatcagtttacacttctaaccacacagtcataaaataattagtccagttttgctttttattttatgtatgtaaggggcaacagtatacatatatttagttttttctttcataagcattacagttgagacattcatctatgttgtaattatagcttatgtattctctgttatttgctatgtattgtactttattagattaatatactctaatcatatatatatatacatacatacgtatacatatatacattcacatatatgtacacacacacacacacacacacacacacacatgagttaccactacatttgtacattgggacttggaaatagtcctaaaatgaaaccatcaggtaaatgtcttggagaacaaatatatgtatttgttttggtcacacatgcaggaattgaattgctggaaaggactattttattctttgtagataatggtacactgctttctaaatcagcagttatattttccatttttaacaacaataaaatgtgggagttctatttgctctaaattcttgactacatttttatacttttggctattctggtggttgcacagcagtgtttcattgtaattttattttacattttcatgatcaataaagtggtgtatttttccattctatagctaatatctccattctctttagcatactttttatgtacatcaagttcataattctattgactttaattatttttaaagatttctttttatttatgtgcatgcatgtctctgtgtatgtgccacatgcatatcagtgtccacagagaccaggaaagggtgtcagaactcttggaacttgaatcacaggcaattgtgaactgccattgggttctgggaaccaaatttagatcctctgcaaaagcagaaacttctcttaaatgctgagccaactcctcagctccaagtttataattttaaaacaatgaaatggattttatattaattcttattgtatcttgaattaatcatttttattttccaaccctgagattaatacattcttctttcttagatgtttgtggcttcatctattcatctaatatctttgttacaagtgcttgctgaggcagaatttctccttattgattctgatggaagcattttcatgtgagaagtcagctcatttgagtctctctttttttttttcatttgtattgctattacttcattctgtaaacattcagattgactgcagacttatattcatctagaaagacaagtcccctttattgttaaggctatataatagttcatctgaatcagttcaaggagaaatggagacaggaaagagttcaacatgcaaatggagtggggagaatatagtccacctctacttgccaagtcatttccaagtctcagctaatagaaaagcctgtgattttattattattataaagtgttttgtaacctgattttatccctagtcattttttattttctcttttagagacaattttatataaataggtcctttaacaaattcatgcatagagcatccagttttgagcatgatagattccacgcttttcctttgggaagcgggttcctgcttgctcatcctgtatgcctatgcagtcagcttctcaagcagagtctggatgcctctgctagtgcttttgtttttttccaaggtaggaatcagggttttcagtccaccttttcagtccacctttgactgtgtttacaacttcttggccacacctctgaagaaggctggaaagaataatggcatctccgttgatgctggcccaggacttgaggttcttcataccaacatgctctacaagggtttttgcaaaacaaccttcttttccattttctttcatctttttatcttgctctattagccatttgagatctagatgtcctgcaggatgctcagcaacatgaagctctccgtccttgccaccaggatactgttctgctgctgccaaaccagcgatggcatccatagcaggctgaccatctccagtagtagattccaggatgtccgacattagcacacatgcagacatccagcaccacctcttgagtgtatccttgcaggtggctcagcaaagctggggagatggactccaagagctcatgctggtgtattgcagtgtctttcttgctgtgtgcgctgccatcacctttctgcagaagctcaattatctctggcattgtgtgggtgggatctctgggggtcatcaagtataacaggactttccttccatatttgtcattaactatgctgagcaaggaactgatgatttctgatatgattatctgcttcacaagcttagtatcattaatacaatcaaacgctgccagtagaaccaagtgagagtattggccattggcaaccttgtccacgtccatcttcattgttttcatgatcaatttcctgtccttgggtgtgtcatgccacaggcagtgcatgaccactctggcgccatcgtgtgtgtgggcctggtacaccactgcttcccggatggcttcaattagttctgatcgaaggtttgggggtgcataggtaaaaaaaagtccaagaatattttatgaaccagtgagtacttaatcacagctccattttgggccatcggagtcagaatcttcttcatttcgtccatgataagctctagctttgctggctgcagctccagcaccttgtccagcgttggatgatctgcgacttgtaaagctgaaacgtgttcccatagagctcctctgtcagcatgttcctctgttccaaaatggctttgttgttgtatgcatattccacaatggccgatgcctctgaatgccacagcatcttcctcacatgacctttaaaacttctgattatctctgaaacttgtggtttacttccacacatgagaaatgtcttaacaatattcctggaatatttggctttacttaattcaagcaagtcaccttgtatttcttggaaagcctgcttcctctgctcctcattcccatactgaatgaagtactggatctagttgcaaaggcaatagttttaatttacccttgaatcaacttctgcaaatcactcatgagcttcacccgtttttccttgccacaatcttttcttctaaagctcttccaaatgtgctctgccatgatgtcatagttggtcttatcactgagctgcctgctttgcttcagctctttcttctttttgaagtcatcctacttggggtttcttggctgttgattcatcactttcactgtatggctggaatttccacttgaatttattagccttctgaaagttgtccttcggtcctttgcccccttgtggcttggtcttgaacagcttcacacccttcctgccaggttttttggcacctttctcaaagttctcaggtgtgactttaggtccaccttccttaacagctttccttgggaacgtctttgaagaactagactcactgtttttatgaaatctattatttgcttgtgatgtctgtggactcttttctgtaatttttttcttccctttgccttccatcatagtacttcacacatgtggggcagaagcttgtggatccgtagtcattcttatcttcccatttcattatgttttcatcttatgctaatatttagtccatttcaaaaaaaatttggtttgtaaaaacatactataaccaacaagatcctctgatggattaggtgtgagtctgggagtggggaaggagagataagcaataactttaagtttggggtctaaataaatgaaatgaaggaatggccattaataataacatgattgggagctagacagatggcttagcagtttagagtacttggtgactctccagaggacccaagttcaggtcctagaatccatgtgatggttaccaattatctggaattctagtttcaagggatctgactttttctgatctctgtgggcatcagacacatatatggtgcaatttgtacatgcagagaaaacctcatacacataaaataatctaaaatatttaaaaaataatagcatgattgatatggataacaccagtctagttgatagtgagaaactgactgtataagaaagaaaaaaaaaggaacttctagagcagcagttcttaacctgtaggtaatgaccctttggggggctgaatatcagatatcctgcttatcagatatttacattatgattcataacagtagcaaaattacagttatgaagtagcaacacaataattttatcgttgagggtcaccacaacatgagtaactgtattaacgggtcataacattaggaaggttaagaaccactggcttgggctggtgagatggctcagtgggtaagagcacccgactgctcttccgaaggtccagagttcaaatcccagcaaccacatggtggctcacaaccatccgtaatgagatctggcgccctcttctggagtgtctgaagacagctacagtgtacttataataaataaataaatctttaaaaaaaaaaaaaaagaaccacaggcttagagaaacatttttatgaggggtaaaggaatgagataaagtgcaaaatttgtgtggtgggctttatataggaacatagatggtctatttattatcattttttgtgagtcagaataacgaagggtatctcttctttctgtaggacctgtattgtgcatcagctgcccaattctgccacctcaataccctgcataccttgaactttttactctactctagtaatacctatttctgtacctcaacattctaaacatgctcattcttagagcctctgtcttttccctcttgtcttttctgagctttatcaccttgcctcattatcatttaggtctcagctcctcaaaaggatttttttttttactataacagctgaagtgacttgtaacaaaatatattattttctgaatagcacccttgaaattatcttatttctctttttatatatgtatctatacatgtatatgtttgtgaaggtcaggaatgagccttggatgtcattcctcaggagccatctaccttgtttttaaagataggtgtctctcactaaacctggaagtcaccaattaggtcaggcttgctggctaatgacacccctttcccagacatgtctgcttgcttctgcctttccagcactaggattataagttaagtgctaccacattattttttttcaagatttatttattatgtatacagtgtcctgcctgtatgtatgcctgcaggccagaagagggcaccagatctcattatagatgtttatgagccatcatgttgtagggaattgaactcaggacctaaggaagggcagtcagtgctctttacctctgagccatctgtccagccctcatcacattattttttaagacttatttttttttgagaattgtatatgtgtgcatgtgtgtatgtatatgagggtgtgtgctcatggagcctggcagaatgtaacagatttctgggagctggagttatgggtaattatataggaactgaaaactgaacttgggtcctctgctgaactcaagtccttatattctcacatcaagtactatattgactaagccatcttcctaatcctcctttaactatgttttttactagttgttatctcttgtactaagagaaggtaagctcctgctatattgtatttaagtgcctgaaacaatctatcacacagtaggtagtccattatatttattgactgattcttctaatgcctttcttctatatttgctttctctaacctagttcaatgttctttggcgcttctaaaatcaaaccacccatttttcttttggatcacccatattttagaaaacagccctatccacttggggcccatctgaggcacagccagcagaggtgagctgtgtgctgtctcctggcccatggctctccttgccttcctgaggagctttgtggaggccccaaggagcatccagattaaacctctcccagacaatcccatgcctggaaggtccacctggggcacaggcagcaaagagtcaatctgggccatagccagcagaggtgaggaacttgctgttccctgagttccaccatcaggatcaaggctctgtctgcttccccaatgagtccagttgacatcaggaaaattcattcaacaccagaaacaaccagatgactaaaggacagcataagaacacaattaacaagggccagggcaatatggcaccaccagagccctgctatcctgctacagcaagccctggatattctaacatagcctaagcacaaaaagatgacactaaaacaatcttataaagatgatagaagccgggctggtgagatggctcagtgggtaagagcaccagactgctcttctgaaggtccaaagtttaaatcccagcaaccacatggtggctcacaaccacccgtaatgagatctgatgccctcttctggtgcgtctgaagacagctacagtgtacttacatataaataaataaataaataaatcttaaaaaaaaaaaaacttacaaaaaaagatgatagacgccttgaaagaagataagaatagatcccttaaagaaatacaggaaaatacaatgagacaggtagaggcgcttaaagaggaagcaaataaatataaagaaacaaaggaaagtacaatcaaacaggaaggacatgaataaaactgttcaagatgtgaaaatggaaatagaagcaataaagaaaagacaaactgaggcaatcctggagatggaaaacctaggaaagagaataggaactacattcacaagagaatacaagagatggaagacagaatctaaagcatagaaggtatattagaaaaaattgatacatcaataaaagaaaaacctaaaaagtttctatgacactatgcaaagaccaaacctaagaatagaggatcataggatcagagtcagtctcacaacacccagaggaagctgctctaacatacctaggatcataggatcaaaggtaaggaggacataacatctgccccaacaccggaagtaactgggaccagcaggaccagggcacccaagaactctgcctgactgtggtactggttcctgctagtatgggctggtgcccagagcagaccttgggtatgaactccgcagccagtcccacaacccccagaggaagatccattcccaagtgctccaacactcccaggatcataggatcagagccagtcacacaacacccagaggaagatccactccgaggtgctctaacacacccaggatcataggatcagagctagtcccacaacccccagaggaagatccactcccaagcgctctaacatgcccagtatcataggatcagaggtgaggaggacacaacatttgccccaacactggagtaactgggatcagtggaacacaggcaaccaggaactctgacagatcagtggcatgggttccttctggtctaggctggtgccctgagcagaacttgggtgcgaactctgcagccagtcccacaacatccagaggaagatccaatcccaggcgctccaaaactcccagaatcataggattagagccactcccacaacactaagaaaaagctcaattcccaggcactctaacatgcccaggatcataggatcagaggtgccctgagcagacccttgggtcttatcactctgcagccagtctcacaacacccagaagaagctccactcccaggtgctttaacatgcccaggaccacaggatcagaggatcccaggagcttgatcacatcaggatctcagggtcccagaggtagcttgactcctaggagctctgacacacccaggatctcaggatcccagaatcagaggatcacagagacagctgaactctgaggatttctgacacaaccaggatcacaggaaggacaggctccagtcagatatatcaagggcagatagcactagagataatcagatggtgggaggcaagtgtaagaacataagcaacagaaaccaaggttactttgcatcatcagaacccaattctcccaccatagcaagtccagaatacaccatcacactggaaaagcaagatttagatctgaaatcacttctagtgattctgatagaggactttaaggacaaaaacaactcccttaaagaaatacaggagagaaggtcagtggtggcacacacctttaatcccagaatttgggaggcagaggtaggcagatttcagagttcgaggccagcctggtctacagagtgagtttaaggacagccagggctatacagagaaaccctgtatcaaaaagaaagaaagaaagaaaaagagaaagaaagaaaaaagagaaagaaagaaagaagaagaaaggaaggaaggaaataaatgaataaataaataaatacaggtgaacacaggtaaacagctagaagcccttaaagaggaaacaaaaaaaatcccttaaagaattacagaaaaaacacaataaaagaggcgaagaaaatgaacaaaatcatccaagattttttttaaggtttctttattacatgtaagtacactgtagctgtcttcagacacaccagaagagggcatcagatctcgttacagatggttgtgagccaccatgtggctgctgggatttgaactctggaccttcgcaagagcagtcgggtgctcttacccactgagccatctcaccagtccccatccaagatttaaaattgggaatagaaacaataaagaaatcacaaaaggagacaaccctagagttagaaaacctaggaaagagatcaggagtcatagatgcaagcatcacaaacagaatacaagagatagaagagagaatctcaggtgcagacgataccatagaaaacactgacataacgatcaaagaaaatgcaaaaagtaaaaagctcctaacccaaaacatccaggaaatccaggacacaatgagaagaccaaacctaaggataataggtataaagagatagaaaagagtgaagattcccaacttaaagagacaataaatatcttcaacaaaagtatagaaggaaacttccctaacgtaaagaaatagatacccatgaacatacaagaagcctacagaactccaaatagactggaccagaaaagaaattcctcccatcacataacagttaaaatattcaatgcaataaacaaagaatactaaaagctgtaaggggaaaaggtcatgtaacatataaaggcatatgtatcagaattacatcagacttctcaccagagactaagaaagctagaatatcctgagcagatgtcatacagacccaaagagaacacaaaatgccagcccaggctactatactcagcaaaactctcaattaatttagaccaagaaaacaagatattctatgacaaaaccaaatttacaaaatatctttccataaatccagccctacaaaggacactagatggaaaagacaaacacaaggagggaaactacaccttagagaaagcaagaaagtaaaactcaaaagaagatagccacacaaacataattccacctctaacaacaaaaataacaggaagcaacaatcaatggactcaattccccaataaaaagacagactaacaaactggatatgtaaacaggacccagcatattgctgcatataggaaacacaactcagtgacaaaggcagacagttcctcagagtaaagggctggaaaacaattttccaagcaaatggtccgaagaaataagctggattagccattctaatatcgaataatatcaactttcaaccaaaagttatcaaaaaagataaggaaggacacttcatactcaccaaaggaaaaatctaccaagaagaactctcaattctgaacatctatgctccaaatgcaaggccacccacattcataaaagaaactttactaaagctcaaagcacacattgcaccccacacaataatagtgggagacaatagcccatcctcagcaatggacagctcatggaaacagaaactaaataaagaaattaaacagtgaaactaacacaagttatgaagcaaatggatctaacagatacttatagaacatttcatcctaaagcataagaatataacttcttctcagcacctcatggtatcttctctaaaattgaccatatgatcagtcacaaaaaccatcctcaactaatacaagtagattgaaataatcccttgcatcctatcagattaccacagattaaggcttgtcttcatcaacaacaaaacaatagaaagcacacatacacatggaagctgaacaacactgtactcaatgataacttgatcaaggaagaaataaggaaattaaaggctttttagaatttaatgaaaatgaggacacatcatacatatcaaaacttatcagacataatgaaatcagtggtaagagggaaagtcatagctctaagtgcctccaaagagaaactgaagagagcttacactaacagcttgccagctctataacaaaaagaagcaaatacacccaagaggagtagatggcaggaaatgatcaaactcagggctgaaatcaaccaaatagaaacaaaaagaactatacaaagaatcaacaaaaccaggagtgggttctttgagaaaatcaacaagatagataaacccttagccagactaaccagagggcactgagacagtattcaaattaataaaatcagaaatgaaaagggagacataacaatgaaatataacttaaaataattattctgtttattgaatattaagagttgaaaatattaaaatcatgttctacaaacatcaggaaaatattgataatttttctcactgtgcttgaaagtagcattttcttaatgtttaacattgtttttgctattttgaaatttttaaaatatacttactggatcaagaatcaataaatgggacctcataaaattgcaaagcttctggaaagcaaaagacaccgtcaataagacaaaaaggccaccaacagattgggaaaggatctttacctatcccaaatcggataggggactaatatccaatatatataaagaactcaagaaggtggactccagaaaatcaaataaccccattaaaaaatggggctcagagctaaacaaagaattctcacctgaggaataccgaatggcagagaagcacctgaaaaaatgttcaacatccttaatcatcagggaaatgcaaatcaaaacaaccctgagattccacttcactccagtcagaatggcaaagatcaaaaactcaggtgacagcagatgctggcgaggatgtggagaaaggggaacactcctccattgttggtgggattgcaagcttgtacaaccactctggaaatcagtctggcggttcctcagaaaattggacagagtactaccggaggatcccgcaatacctctcctgggtatatatccagaagatgtcccaaccggtaagaagaacacatgctccactatgttcatagcagccttgtttataatagccagaagctggaaagaacccagatgcccctcaacagaggaatggatacagaaaatatggtacatttacacaatggaatactactcagctattaaaaaaatgaatttatgaaattcctaggcaaatggatggacccggagggtatcatcctgagtgaagtaacccaatcacaaaggaacttgcacaatatgtactcactgataagtggatattagcccagaaacttaggttacccaagatataagatacaacttgccaaaagcatgaaagtcaagaagaacgaagaccaaagtgtggacactttaccctttcttagaaatgggaacaaaacacccatagaagaagttacagagacaaaatttggagctgtgactaaaggatggaccatctagtgattgccatatgcagggatccatcccataatcagcttccaaatgctgacaccattgcatacactagcaagatttcgctgaaaggaccctgatatagctgtctcttgtgagactatgccggggcctagcaaacacagaagtggatgatcacagtcagctattggatgggtcacacggcccctaatggaggagctagagaaatttcccaaggagctaaagggaactgcaaccctataggtggaacaacaatatgaactaaccagtacccgggagctcttgtctttagctgcatatgtatcaaaagatggcctagtcggccatcactgcaaagagaggcccattggacttgcaaactttatatgccccagtacaggggatcgccagggccaaaaagggggagtgggtgggtaggggattgggggggtgggtatgggggacctttgggatagcattgaaaatgtaaaagaggaaaataccaattaaaaaaataaaaaaaataaatactaaaaaataaaaaaatatatacttactgataaaataattcctctcctagaaacactgataatcttttttatgtgaactgattgttagacaatgtacacagatatacaatgtgttttaaatactctctcactatgtcaggtggtatcatataagggcttttgactatatttcttaatgattttttttaatattttatgctcctttattatgcttaactcctaaagaatattttgtatgttttgaaacaatttagtattcaacattagatgtaggatcctcagttatggatagtattaaatattcattaatgatatttttagggtatgaatggatatgaatataaaagttgaaccattttcacatattatttgattctcaaaatactcaatattattaatatgtttgatgtataaaatgtattcaaataataaaaaagtaagaaaaaagaagaataattggaataaaagaagaagatgatatccagctcaaaggcccagaaaacatcttcaacaaaattatagaagaaaatttccctaacccaacagaaaatttccctaacctaaagacagatgcatacaacaagcttacagaataccaaatagattggaacagaaaagaaaatcttcctgccatgtaataatcaaaacactaaatatacagaacaaagaaagaattttaaaagcaggaagtgaaaaaggccaagtaacataaagacagacttatgagaattacagtcaatttctcacctgagactctaaatgctagaagggcctgggcagaggtcttgcagaccctaagagactacagatgttagcccagactactatacccaataaaaatttcagtcaccatagatggtgtaaacaagatattccatgaaaaagtaagttcaaacaattcctctctactaacctagccctacagaggttattacaaggaaaactccaacccaatgaggctaacgataatcaagaaaacacaagaaataattttgtgggaccatgaaaggcagcctgttttctagttgagctaggtttaagcctgttgacccagcaggagattatcctgcaagggaggacaggtgtttgccacttgctcctagacaccagcctcctgatacaaggttacaggtctccactccataggtctgtggtcatcagcacatagggcaacaccccaaccccctccacaggtagaggacaggaccacagatcatgtagcctcaagacagatctccatgttaatgaggttcttaaagacctgaagggcttatgcaattaagctcttcttctcagactctcctccctgcaaaaggtttttaaaccccaggcctgccctgagaacggggaatatggtttcattcatcacaactctctgccattacaataaacaccttaaaatcatggactgcctcttctcattgggacccactgagggaacaatggagcaggtcttcctataaagagctggctatctaatctctcgtaggaggcctctctgggacctcagactgcacctccccaccccctgagaggggtcctgtggcttcttgcagacaaacacctctccagcagtggcatggggtacatgcagtcaaacttcctgtgtcctgcttcacccagtgtccaagccctgggccggatgcaggtcaccattttaacccacataatttcacaccataaggccaatagaagagaaacacacacacacacacacacacacactcaaccaccaccatcaaaataacaggaagtaacaatcattgctcattaatacctctcaacatcaatgaattcaatttcccagcaaaaagacacaggctaacagaatggattcgtaaacagaatccatcattctgttgtatacaagaaacacatctcagcaacaaagatagtcattatctcagtatacaggtctggaagaaggttttccaagcaaatggacccaagaaacaagctggagtagccattataatctgtaaggaaacagactttcaaccaaaagtaatcagaatggctaaaatcataaactcaagtgatagcacatgctggcaaggatgtggagaaggaggaacagtcctccattgctggtgggagagcaaatttgtaatctctggaaatcaatttggtggttctcagaagaataagaatagttctatcttaagacccagatataccactcctgggcatatacccaaaagatgttctaccatcccacaaggatacttgctcaaatatgttcatagcaactttatttgtaatagtcagaaactggaaacaaaccaaatgtccctcaactgaagaatggatacagaaaatgtggttaatttacacagtggaatactattcagctattaaaaatgaggacatagtgaattttgcaggcaaatggatcgaattagaaaatatcatcctgagtgaggtaacctatactcaaaaggacatgcatagcatgtattcactcataagtggatattagccataaagcacagacccaaagaagtctaggagagcacaatggaggatgtttgattccttcttagaaggggaaataaaatagatattggagatggatataaggagatcatacgtaggaagagcaggggaaagagaagggagattggtgagagggggcaacttctaggatgtgtcagagacctaggatggggagagacctcagagaatctaagggggtgactagctgagagtcctagcagcggaggctatgagtccttaagtggtcacttcctatagccaggtgggactcccagtggaaggataaaggcagcagcccacccacaaaaccttcaacccaaaatgtgtcctgcctaaaagatgtgaagggacaaagagtagagacttagggaatggtcaaccaatgactggcccaaattgaaacacatacatgggcaaaaaccaatctctgacactattgatattccattatgcttgccgacaggaacaaagcttaactgtcctctgagaggctccacccaacagtcaatgcaaacagatgcaaagactcacacccaaatattagatggagctcaaggagtcttatgaatttaggagaaagactgagggacctgaaaagaacaaggactccacaggaagactgatagagtcaacttacctggacctttgggagcttccagagactgaatcaccaaccagtgagtgaccacaggctggacctaggccttctgcacatatgtagctgatgagaagtttggtcttcatgtgggtcccccagactgctggggcagggcctgttcctgagtctgttgcctgccagcctgcccacctgcctgtgtttcctgtgtgcctaaaaggacagccttgtctggccttagtaggagaggatatgcctagtctcacagtgacctgatgtgtgaaagtggggggtggggtggggaaaatgggggttggggcagatgggggtttgacacccagaggagggcttcaccttctcaaaagagaggggaggaggacatgggggacaagttttgtgaaggggtactgggagcataggaaaggctgatattgggttgtaaagggaataaatttaataaaaaaggataataactaataatacaaacctatttcgtagaacatgagatgtactcatcccatagtcccagagtcgttccacagctgcaataaaatagtgccttgttttctgttgaaagctgcggggaccttgctttatgtcctcactgtaaatgtcaaaatcctcgattgtttcaatggtgatggcatcatcatagtcagttgcttcttgttctgattgaaaagcactaagttccctttgatgtcgtttcaacactggtgggatttgagagcatgtcctttgagtttggccttgctttacccaagtggtttctctttgaggccaattttgtttctcatttgcccctattgaatgactgtttccatgaggcctcagagacaaaatggtgtcctcttgcttaatggatataatttctggtgacttctctttggatttccacatatcttttggtatctgtgcagcataatgataatcccaagcatgatgatttagcagttttgagcgagtatttttagagctctctgttttaccttttatactttctccatgcctctttgctttattccatttagtaggcccctgtattttctgaagaaagacctctttcatgagattcaagtgtccaggagatccatggctagtttctgtaggtaaaatttcttcctcttgaatggaaacttgaggaagcaattcaattttgccagattcttcaggcaaagttggtttcaagaaaataatgttctcacgtttcttatatgtgactgagtttgtgttacttttccctggggaggtaaattttccttgatctatgaacatattccatggtagaatggctaaagaagggttatttattttggtttcttttaagaaattattgctttcttgaattcttgaactttttgtcttaaagtcataaatgtaggatgatgcttgaacatgagaaaatttgttttggaatggactccttttgagatctattggtggaaatgctgatgtttttacaatgtgtgagtcagaactatttgtctgagtggtgcttttaatcacagaagaatctgataaggaagatttagtaatgaactttttcatttccttgctgtggtctatctgtttaatgatacactgtgttgaacagtttatggttttaagccattgagttgacagtctgaattgtcccaaagcccgtttactacgttgagtagtaatattcttctggcttggatagttttttaccatttctctggttttatttaccaagccttctgaatttgtttccttgtccttccttcttttaaagaaatgctccatgtgaatctgtactgtatttgttgaattgtttattgatgtgatgttttgaagtactggtacatgtacttcatataaacttatattttgcctagtgcctagtatcaatatgtctttcaagaaattcttagagccagttgcttcgtgcacctggggcaaaactactttctcttcaattagtgcttccttctctatctcttcctgaatatttttttcttgattgtgcctaccattttcatgtacgttagacaaagtggtaagaaatatgctcatattatgtggaaaagccatgtctttaagtcctatgttctttgtaaatccatcctgttctactgtgactttatttttctctgacaagaaactttgattttttacatattttttaaacattaaatatactaattgctttggactatgttcttgctcagagttcaaggaattatttccattggtctttttaaaccaatttgaagattctgacaagaacaacatcttggaaaatggcatgattgtattctcttcatcttgtggaataggatcttcatcttttctatgaaatatgtctttattttttgttgaggtagttctatttagcatatggtttagtctcaaatatgtagaatttttgcctaaaagtgttccatcatgaatcaaagctgttacttcttgaatctcactattgacctttaatatggcatcttgcaagtctgttgtactattctcaattgatgttgggctctcagtgtgtagtttttcattagttgttgaatgattatatgttttgtttgttttcattaaggagacattgtctttgaataaagtattatctttggtcaataaagcaattccatgaaacctcttctctctgagtaatctatcattctccattgataatatattatctcttggtaaactttcttgactatacattaaagttgaatccaatatgttggaatcactattttcttcactcacgtttaaaggtacatgagacccaacaagggaatatgctttcttaccaaatgcagtagtacttaatttactactagagtgaactggcatatctggaaatcctgaagaatctgtcttttcaaaagttgctttcaaattgtctgacagaattgttgtagtcattagattacttggcaaactagaaacttgcaaaccaagtttcttccactttacttctatagttgtctccaaacttttattggatcttaactggaggccgggctgaggagtaaatactattttctcactgtgatgggattctggcctgagttgggtcactttagatgggccttcattgctgtctattgcatttggtgaatgatcatcatgaatagcctcatagatggcttcttggccatctgataaaaataagccatgtggagtaggatgactctgtcccaagagcatcaacatgtcactaactgagacactctgtactttaagcatctctgctatctcttcaaactgaggctcaatcttctccatatcattttttggaattgtggaatctttgaatttctttttcctagtattaggatgatttgtattctggaagaagcttctgggatcaatgacattgttctcattcaccaactgtgttggaatatcttcatatatttcttcataataatcactagtgctcttgtcacaactagaaactttcagcaatgctgtcatacctctcttccgaaagtctgaattatgacaccccaagacccatagacctgaaaatgagaaagaataaaactctggttactcataacccaggttctaagtaagttttgtattggaagttctcttctacttctagacaaatgaagaaaagttagtcaagcctgttatgttgtaggttattttgttaaacttcaacatatattcaccaatgttaggtaaaagtcattattacattgttgctactgtgctatgcatgttgctgatcacaagaaaggaagattgaggaacactgaagagagctcgatttgcctaatgacctcaatgcaatccttagaatccatttagtagaaggaaagaaatgagtcttgcagttgtcctttaacctctacacttgtgctatagcatatttgctgacacatatacatactgtgatggtttgtatatccttggaccagggagtggcatcatttgaaggtgtggccttgttggaataggtgtgacctggttggaatgggtgtgtcactgtgggtgtgggtataagatcctcaccctagttgcctggaagtcagtcttccactagcatcctttggatgaagacatagaactctcagctccattgcatacactagcaagatttcgctgaaaggtcccagatatagctgtctcttgtgagactatgccggggcctagcaaacacagaagtggatgatcacagtcagctattggatgggtcacagggcccctaatggaggagctagagaaatttcccaaggagctatagggaactgcaaccctataggtggaacaacaatatgaactaaccagtacccgggagctcttgtctctagctgcatatgtatcaaaagatggcctagtcggccatcactgcaaagagaggcccattggacttgcaaactttatatgccccagtacaggggaacaccagggccaaaaagggggagtgggtgggtaggggattgggggggtgggtatgggggacctttgggatagcattgaaaatgtaaacgaggaaaatacctaataaaaaaataaaaattgaaaaaaaaaagaactctcagctcctcctgcaccatgcctgccatgctctcaccttgatgataatggacagaacttctgactgaacctgtaagccagccccaattaaatgttgtttttataagacttgccttggtcatggtgtctgctcacagcagtaaaaccctatctaagacacatactcatgataaagtaatgaacataataaaacatttagaatgtccaatgatgtaacatgcatatatttacttctaatgtggatattctcaaagaaggggtatagaacttttaccaataaaatagtgaacaagttacagaaaccatgaacaaggttttaatcctgaggtggagaaaagtaccaaactgataattaagcataagtctagttaggaacattcagactataataacattatgcttacactgtatgttgtgggttcgtgtgcatgccattctgtatgttttttggtcagagaacaatattggatatcaatgccttgcctcataccttgtttgaaacagggtctttctgtttgccttttcatatgccaggatagatggtctacaacttctgaagattcttctgtcttggatttccacctttctgtaggagctctagaattattgacatatactactatgcctggctttttccatgggtttcatctggtgatctatgtgacaagtactttactagttaatctatctccctggtcaaaagtatctcatttttgtttgattgctttgttctttgttgttgttttgtttgtttttgagacagggattctgtcttggggtttccattgctgtgaagagacactatgaccaaggcaactcttaaaaaggacaacatttaattaggggtagcttacaggttcagaggtttagtccattatcatcttagcaggaagcatggttgtgtccaggcaggcatggtgctagacgagctgagagatctaaagcttgatcaaaaggcaaacaggaaaagactgtttcccaggcagctaggaggagggtctcaaagcccacccccacagtgacacacttcctcccatatggccaaacctactccaaggccatacctcctaataatgccactcctagttcaagcatattaacaccatcaccttctacttcctggcccctgaagtggaaacttaagggttcttttgaaagtcagttgtgttagaaggtgttttgctggggcaaacacatgaaggagtgttttcctaaagtggacacaggcagactcgtgaaggaacgtttcactgaagcagacacaggaggaaacatgttctgctaaagcaagatcgtaaaaggacacatgatgaaggattctttgctaacaacacacatgtattggtccatcttacattgcataggtgaactccatttgttggaatgccatagagagaaatagatgaaaaatttctggtggtgtgctgcagtttcttgcagctcctatggactcaggctgattgccagagtgatgtcagctgagacagatgcacatatagagaggcaagatgcatgttgaggtaagacacatggaggatgctgatgtttggagggtataaataggactcaccagacagtgacagaggctgagctagtcttgcttacagagctagctgtgcaactcttgtgggtcttgtgccttcgctgatctttgctgatgttcagttatcttcactgatcttccctcagagaagtatagctgagaacttctagtgttcctccaagttgctcctgcttacttgtgcagcggctgaggcctggctgtctctgctaggttgtgccatggctgctgattcctgtttggtatcctgactctaatgaactacactgatggtgtttgcgagtggattgagctgccgctgctaacccataaactgaaattctgatttctagacaatacaggtgggagttactccaaagagcctttctaaacaagtccacttctcctgtatcctttctctgtcactacctctagtgggtggtgggctaaaagggaggataaagtatttaagaaccatcattaaaaataggggtttgaaaaaaaataaagtataggcctgcataaccttcttcaaacacatgactctatacctagccgtagcataatgtaaaaatacatttagtccaacttcaaaagtacctatagtctaccacagtaccatcaatgtttaagagtacaaagttcaaatcctcttctgagattcatgcaatcacttaactgtaatcttctgtacaatcaaaatcaaaaggtaggtcacatgcgtccaacatcataggacatacactaccattagaaaataccatactgtggaaatactagaccaaagcaagaccaaaaaccagctgggcaaactccaaaccctgtacctccatgtctaatgtccaattcctttcatctttgttgactgcaacacaacactttcccttgggatggttccaatacctgttagcaaatttcctcagcaggtatcctatggctctggcatttcaaatatctgggtctctaaggcatcttcaactttacagtttcttgttccaatgtctaggatccacacatgatcttccagtctcctccaaaaggcttgggtcacttctccagctctgccctctgtagcacttccagagtctggttgattgttgctgctaattttggtggtcatcccatggtaccaacatctccaatatgctggggtattctgctgcacctgggcctcaccaatagtcttttaggttctcttcatagtgacaggtttcaaattctttgcatgacaccttcagtcctaggccatcaactgcaattaaggctgcaactttgctcatggccttccatggcctctcaccatgccaagcctcagctgctctccatgacccaattgtgccttcaaaaccagttccacctgggtgactctttcccattaccttgtacagctgtagcgggaggtacaactttggctatctctagaactcagcttctttgttctctcataaaacacttcccagaagatgtcacctcaatgatcctggtctcttcttaatcactgctaatgtctaagctccagctaaccatcaccaattgtcacagtagtcccttttatttttgactctaaggccagagccacatggctgaagctgctgaattctgcttcttgctggggctggaacatggcccctccccttgttttattattacattgtcaacacctttccaattccttcatggactaagcctggctgtcctgtaaccttgaactcagagatctgctctctctctctctctctctctctctctctctctctctctctctctctctctccctctctctctctctgtctctctcataaaggtgtaaactaccatgcctggactaagcttttcatatccactattcctcaagatctggatcaaaagtctgtgtcctccatctctggatgtagttcattccatattaaaagtacacatgaaaataataaccaactagtaataatgtctaacatgatataactattccttgttaaatggcaaacacaaacaataatcttagctgggtgggattttgccccaaagtcaccagtcccttaatctgttcatctccttgaacacaggattcagctctaaggcttctaattacttgaaccatacattttgtatttttcttttctaagtttgctacacatgatcaaaatgctattcatgagagtaaaccacagcacagagtttaaacttggttgacttttacattttgtcaatgcaattaatctggtgaatctcttcaccttagcttcagacagactcttcagacaagggcaaaaagcagctacaatattcaccaaaatatcacaagaagagtctctaagtcacatactaaaagttttcttttctgaagcatctagatctaggactgcatagatcaaatcatcctcaacaccactatcttccatattcctattaggatggcccattaagtcccactgaaagcatttcattactctccaaatctgaagtccaaatccacatttcttcaaataaaaacatggtcagatctatcactgcaatattgcaaaccctggtatcaaattctgttttggttagggtatccattgctatgaagacacaccatgacgaaggcaattcatataaagaacaacatttaactggggctagtttacaggttcagaggttcagtccattatcagcaaggcagtacgcatggcagtcttcatgcaggcatgctgcaggaggagctgagagttctacatcttcatctgaagacagaggagaggacagtcttccaggcagctatgaggagggtgtaaaagcccaagtgcacagtgacacaatttctccaacaaagccatacctaatccaaaaaggccatacctcctaatagtgccactccccaggcaaagcatattcaaaccaccacagtttctcctggaactcactctgtagaccaggttagtctgtaattcatagagatctgcctgcttctgcctctcacatgctatgattaaaggcattcaccaccactaccaggccaaagtatctattctttatgctactggattaagatataagagctaattataatgttttacatttatatttagtcacatttgcaatgaagaaagctgtattacaaaagttcaggcaatgttatttaactaagtacaaaagtctcttcctttccccccagttcttgctcattttgagactggccttttttaaccactggctagtctgtagactaagctggcctcaaattcagaaatctgccttctgaatactggattgcaggaaagcattaacacaccccacatttaaccaaagtatttctggattagtattctaaattaatataaaaaagtacatgtctataatatcatagagttggaatatagagacaagcagttctctagagttcattgaccaaatgaattcaaggttcaatgagagactctgtctcagaaaacaaggtggaactcagaaggatcaccttcccagacatggaagactttttctttgactaaaaggattcttccaagagtggttttataactatggcctgaaatgagctttctaaaccagaggagagagagagagagagagagagagagagagagagagagagagaattatatgaaatgtgaaattttcgaagttaaccaaactggaaaactagaagggacaatagtaatcaataaaacaagtaaaaaaacaaatcatgatttaaatatgcttggcccagggagtgacactattaggaggtatggccttgctaaagtaggtgtggatttgttggaagaagtgtgtcactgtatacttgggcttttacaccctcctcctagctgcctggaagacagtcctctcctctttgtcttcagatcaagatagaactctcagctcctcctgcagcatgcctgcctggaaactgccatgcttactaccttgatgataatggactgaacctctgaacctgtaaaccagccccaattaaatgttgtcatttataagagttgctttggtcattggggtctcttcacagcagtaaaatcctaactaagaaaaactatatatacatatacatatacatatacatatacatatacatatacatatacatatacatatattcttttatgatatatacatatacaattatatatttacatatatatatatacatatatataactatagagggagatagagagaatcagatagagtacttaaagagcttgacaagtatttctcataattaatgtcacaccaaattatataatgaggtaagacataatcacacaaaataaactaaggccttctgtgtgcacatatgtacaagtttgtatgtccatctttgtctatttgcctgtctgtctctctatctctgtttgtctctctgaacatactatccaaactacttaaatcagaatgaaacaatgcttgatggtgtccagattaagggaagccagcaaaaatggtgtcagtaaatgaacagaaccaaagattgtttctcggaagacagaagaaaacagtatttcagtagcaaagtaaccaacttcatggttggtgatgaaaaaatctaagtcaaggtttagaacttattggtaaaatagatccactagtaccatttaacaaaaagacttaaaatttgacttatgttaaataagggttttgtttgattgtttctacagtaaaggctagtttgaggcttttatttgtttttcaatgtagagaattgaatccaggaatttatgtgtgctaggcaagcactgtagtactgaaccacaatattgagttggtgctgttatttttatattaccattttctacagtgtctggcatatataagatccttaataaatatcttaaaagaataaatgaaatatatacatttgaaagcatattatacataaggattatatgcaaaggtacagatgacagcattatttaaaaacatactaataaaacttagaagaaatatcttatgcttatgtgtttatgtctttattgtctgtaccacaaccaagttctaagcccttagttcttcattaaaatagtttacaattaccaaagccacatatcaaagtcacttgatatatttactgtctgcttaaatttgacggatcaggcaaaagaacaatgaaacaatcacagttgttagtgaaaggataatataaataactaacctgggttttccatcgacataaagacagtttctcctgagaatgggaacagggtaagtgtatcttcatagaccattttgtgtttgaaagtatatccagagaagaagatagataagaagtctgtctgtgctccaacactgagaatgtgccagtatgccacctcatgcaaacaaactgtcaactccaagctatcaaaaacatagccattgatgcctacaaaagcaattgagaataagtggtataattttgttgtaacctggatttgtcattttggatatgattgttaggatacaattagaaattaatatatactatgtctattacctcaccactgagaacagttaccaatcaggtagttgattaatatttaatcacccaactccaatcctaaagtgaggagagtcatatagcatcatgtaagaagagatttgggtcctttacgcttggtcctttctgttggggcagactgctagctagtcttcttccctgaagacaccaaatcctgagccatcccagaatatccgctgcactcagagtagttgctaagaatcctcccgaagtcccacagttgccactgggagcccagtagactcaggacccatcacccccaaccccaacccctgctagctgaataccactccccttctgccatcccaggagatccactgcacttagggttactgacaccacagcctgagacatcccaggagacctgttccacacagggcaactggcatcccaggagatctgctacacacagggcaactgatcaactgatcagcagcttgcttgctcctctaaagacaacacagcttgaaggcattgcaggagctcctttgtatacagggcaatagataccacagtctgaagatgtctagcaggctctgtggcatgcaggacaactaactcaacagactgaaagctttcctggagttctgcacacagtgaaacagaaatcacaggctgccccgccccctggtggaacatcttcacacaggacaacagcttgactgctcttctgaagatccaaccatctgaaggcctcctaggagatctaatgcagcttctctgcccctatgaagagcccctagttggaaagccccacaggtggtctgcaacagccagggtcacaggcctaccaggagacctgaagcaacccaggcaaaaaaggaggcagataccagacagagtcacccaaaccagcaaacaccagagataaccagatggtaagaggcaagttcaagaccataaccaacaaaagccaatatacatgagcatcatcagaacccagttctcccaccacagcaagccctgaatacaccaacacatctgaaaacaggaagctgacctaaaatcttatctcatgaagatactagagtcctttaaggaggatataaataagtcactgaaataagtacagaaaaacacagataaataggtagaagcccttagggaggaaacaaaaaagtccattaaagaaatgtaggaaaacacaatcaaacaggtgaaggaaatgaataaagcagttcaaggcctaaaagtggaagtaggaacaataaagaaaacaaaaatggagggaaatctggaaatggaaaaccaaggaaaggggtcaggagttacagaggtaaatatcaccaacagaatacaagagatagaagagaaaatatcaggtatagaagatgccatagaatgtgggactgtgacaggcacctgattttgggaacatggcttgcctttccgtcccttgtagatttctttattgggtaaccggagaaagccccattcaaccaaaataggctgcctaacgatgggattggctttctcctaagaagcctcttctaacctctcaccagaaggctatcctgtgctcaagccacagacctgaccaaggactctcccaccataggaaccatccagcacccccatctccctgctctctcctcccttcattaccagggccaagtactaccccagagcccctattctgttcttagctcctccacagtatcctgcacgggatgccagaggctgaaaacctggtacttggggctacctcttatccaccacccaccatgtggggtcagtggcttcccacagccagatacccaccaggagccgcatggaaagcatgcacagtcctcccacgtttgtctgcccagagcaccagaacactggcgggacaggggttctctcccactcccctctttcccccatgccttgcaatagaagagattgacacaactgtcaatgaaacttcaaaacataacaacttcctaacccaaaccatccaggaaattcaggacacaatgaaaaaaccaaatataagaaaaactgtattggaaggaaatgaagataatccaacctacaggaatagatggccataaaggtacaagaagcctatagaacaccaaataaatgggaccagaaaagaaaatcctctcatcacataataatcaaaacactaaatgcacagaacaaagaataagtattaaaagctccaagggaaaagggtcaagtaacataaataggtagacctatcagaattacaccagacttctcaacagagattatgaaagccagaagagcctgatcagaggccatgcagactctaagaaaacacaaatgccatcccaggatattatactcagcaaaactctcaatcaacatagatggagaaaccaaaatttggttttccagaacaaaaccaaattcaaacagtatctgtctatctaccaatccagccctacagaggatcctagaagaaaaactccaacaaaaggtaggtacctgcaccaaagaaagaaattgagcatctcacaacaaaaccaagaggagagaaccaccggcacataaagccatctataaaaacaaacatatcaggaagcaacagtcatctctctttaatatctctcaatattaatggactcaactcacctacaaaaagacataagctaacagactggatacacaaacaagatccagcattttgctgcatacaagaaacacatctcaataacaaagacagacactatctcaaagtaaaaggatggaaaatggttccaagcaaatggttccaagacacaagctggagttgacatcctaatatacaataaaatagactttcaacctaaggttatgaagcgttatgaggaaggacacttcatacacatcaaagggaaaatccaccaagagaaagtctcaattctgaacatctatgccccaaatgcaagagaacccacattcatgaaagaaactttactaaagctcaaaacacacatctaaccccacacaataatagtgggaaacttcaacactccactttcaccaatggacaggtcattgaaacagaaactaaacagagacacagtgaaactaatagaggttatgaaccaaatggatttaacagatatctacagaacatttcaccctaaaacaaaagaatacaccttcttctcagcacctcatggtaccttctacaaaatcaaccatgtaattgggcacaaaacaggtctcaacagacacaagaagactgaaataattccatgcatcctatcagatcaccatggactaaggctggtcttcaatgagaacaaaaacaacagataactcaaatacccatggaaacttaacaattctctactcaatgataacttggtcaggggaagaaagaaaaaattaaagacttcctggaatttaatgaaaatgttgacgcatcatattcaaacctataggacacaatgaaagcagtgctaagaggaaaattcatagcactaagtgccctggtaaagaaacttgagagatcttacactagcaacataacccaatacctgagagctctataacaaaacgaagcaaaccacccaagaggagtagaggtaggaaatagtcaaactcaaggcagaaagcaaccaaatagaaacaaagaaatcaatacaaagaatcaacaaaaccaaaagatggctctttgagaaaatcaacaaaatagataaagccttagccaaaccaattaaagggccaagaggcagtatccaaattaataaaatcagaaatgaaaagggaaacataaaaacagaaagggaggaaattcaaaaaaatcatcagatcctactataaaagtctatactcaacaaaactggaaagtcttgatgaaatggatggttttctagacagataccacataccaaacttaaatcaagatcaggtaaactatctaaaaaggcccatatcacacaaagaaatagaagtcattaaaaacctcccaaccaaaaaaagcccagggccagatggatttagtgcagaattccagcagaccttcaaagaaaacctgataccaattttcctcaaactattccataaaatagaaacaggaggaatactacctaactcgttctatgaagccacaattactctgatacctaaatcacacaaggatccaacctaaaaagaggacttcagaccaatctcgcttatgaatattgatgcagaaatactcaataaaattcttgcaaaccaagaacacatcagaacgatcattcaccatgattaagtaagcttcatcccagggatgtaaggctagttcaatatacaaaaatccttcatcaatgtagtccattatataaacaaactcaaaaaaaaaaaaacccacatgatcatcctcttagatgcagaaaaagcattttactctcaggagccataatgggacaagccaataactagcaggtgatcatcctgaagtggcctgctttaggttattatgtaatttgcaacaggtgtgccctcattaagcattgctgaaaggcactcattttaggaaagattcctgctattaatatgcttttcttgttattattaaacatgtataagaatcagtaagtaatagcacacacctttggagcaggtatctgcagatccacaaagatgtactatcttgtagtgatgctatgtagacaaatagataagtcttaatgatgatcctataagaattcctatatctgtgattattaagctcctttataatgggactgctattagatccttttctgataatcaaagctgcaatgagaactctgccagtctccaaagtgtcaccagttaattgctcttagatggtaaccagcctttcttctactcagagcacattccaaaaggttgtaaaacaattaacctaaataaataaataaataaataaataaataaattggaactaactatttattatagttgctaggacagaagataaaatatctactgggtttatctatacaaaacttcactaatgacttagttatggttttaaaccttcagtgaacctgaagagacaagtgatggatgtttagctaggtgattactcctaatggatatgaatgtaaacattcactgttgtaaacttctatttcaatttatgatttgttttttgtgtgtgtggacttgtgatgaactttgtaacatgggatcatgtattttgaaagatgtataagtactgaggacaaagatgagtgggatttatagatgagacttttttgccttttccccacttagacaagacgtttttccttttctctacatacataatttttccctttccctgcttaggatctttcaactttcccccttagaaatgtttaataggaaacttttcacaacttagtaataaactctataatcacttctctaaatgtctactcttcctgtgacatgacaagcaggttgaaagttagagcccagcatttcctgctgagatagaacacaggttgtattgcttaatcctcctctgctaggctacaggtgttaatcacctactcctgcagtctcttaccctcagaaagagcaagaaaattgttaggactttttagaaattatcatcagcatttcagtacaattagagagctagaatgccctggctttattttaaagccatcaccagagtccgactctgtgacttcacttctaccctaccccaggacaggaggctcctggcatttgacaaaatacaacatcccttcatgttaaaagtattgtagagattaggaattcaaggcccatacctaaacataataaagtaatttactgcaaaccaacaggcaatgtcaacttaaatgaagacttacttgaagcaattccactaaaatcagggacaagacaaagatgcccactctccccatatctatccaatatagtactcgaagtattagctagaacaagtaaaactacagaaagaaatcaaggggatacaaattggcagagaagaaataaaggtatcactatttgcagatgatatgatagtatacataagcaaccctcaaaaacactaccagagatcttctccagctgataagcaacttcagtaaagtggccagatataaaattaactcaaataaatcagtatccaagtgacaaacaggccaagaaagatattagttccaaagcatggaagaaaagcctcctctctttccctgtatctgccttttcctcctgggacctggaagttccacctgtccattctgtccagaaattggctcttggcctctttattaacaactcaagaaccagaccttagtagtatcagcacctccctctacacctcaccttttctgtccagtaaaacaaacaaacaatcaatcaatcaaaaaacaacaaaaacaaaaaacaacctcttctcccagatataaattgaacaaaaccataacaattaagtacattacaaaccatgaggtacaactgacatccagccaatcaatttgtgaattagacaaagtgctctaccatatttcctaactgaaagaattatgattttggccgaacttaggaaattagtctgaacaggtgagagggtgcgccagagaacctgacagcttctggaacaggcggaagcacagaggcgctgaggcagcaccctttgtgggccggggacagccagccaccgtccggaccggaggacaggtgcccgcccggctggggaggcggcctaagccacagcagcagcggtcgccatcttggtccgagacccgccgaacttaggaaattagtctgaacaggtgagagggtgcgccagagaacctgacagcttctggaacaggcagaagcacagaggcgctgaggcagcaccctgtgtgggccggggacagccggccaccttcaggaccggaggacaggtgcccacccagctggggaggcggcctaagccacagcagcagcggtcgccatcttggtccgggacccgccgaacttaggaaattagtctgaacaggtgagagggtgcgccagagaacctgacagcttctggaacaggcggaagcacagaggcactgaggcagcaccctttgtgggccggggacagccagccaccgtccggaccggaggacaggtgcccgcccggctggggaggcggcctaagccacagcagcagcggtcgccatcttggtccgggacccgccgaacttaggaaattagtctgaacaggtgagagggtgcgccagagaacctgacagcctctggaacaggcagaagcacagaggggctgaggcagcaccctgtgtgggccggggacaggcggccaccttccggaccggaggacaggtgcccgcccggctggggaggcgacctaagccacagcagcagcggtcgccatcttggtccgggacccgccgaacttaggaaattagtctgaacaggtgagagggtgcgccagagaacctgacagcttctggaacaggcggaagcacagaggcgctgaggcagcaccctttgtgggccggggacagccagccaccgtccggaccggaggacaggtgcccgcccggctggggaggcggcctaagccacagcagcagtggtcgccatcttggtccgagacccaccgaacttaggaaattagtctgaacaggtgagagggtgcgccagagaacctgacagcttctggaacaggcagaagcacagaggcgctgaggcagcaccctgtgtgggccggggacagccggccaccttccggaccggaggacaggtgcccacccggctggggaggcggcctaagccacagcagcagcggtcgccatcttggtcccgggactccaaggaacttaggaatttagtctgcttaggtgagagtctgtaccacctgggaactgccaaagcaacacactgtctgagaaaggtcctgttttgggccttcttcttcggccaggaggaggtccaaatacaagatatctgcgcaccttccctgtaagagagcttgccagcagagagtgctctgagcactgaaactcagaggagagaatctgtctcccaggtctgctgatagacggtaacagaatcaccagaagaacaatctctaaacagagtcaactataactactaactccagagattaccagatggcgaaaggtaaacggaggaatcttactaacaggaaccaagaccactcaccatcaccagaacccagcacacccacttcgcccagtccagggaaccccaacacacctgagaacctagacctagatttaaaagcatatctcatgatgatggtagaggacatcaagaaggactttaataaatcacttaaagaaatacaggagaacactgctaaagagttacaagtccttaaagaaaaacaggaaaacacaatcaaacaggtagaagtccttacagaaaaagaggaaaaaacatacaaacaggtgatggaaatgaacaaaaccatactagacctaaaaagggaagtagacacaataaagaaaactcaaagcgaggcaacactagagatagaaaccctaggaaagaaatctggaaccatagatttgagcatcagcaacagaatacaagagatggaagagagaatctcaggtgcagaagattccatagagaacatcggcacaacaatcaaagaaaatggaaaatgcaaaaagatcctaactcaaaatatccaggaaatccaggacacaataagaagaccaaacgtacggataataggagtggatgagaatgaagattttcaactcaaaggtccagcaaacatcttcaacaaaattattgaagaaaacttcccaaatctaaagaatgagatgcatatgaacatacaagaagcctacagaactccaaatagactggaccagaaaagaaattcctcccgacacataataatcagaacatcaaatgcactaaataaagatagaatactaaaagcagtaagggaaaaaggtcaagtaacatataaaggcaagcctatcagaattacaccagatttttcaccagagactatgaaagccagaagagcctggacagatgttatacagacactaagagaacacaaactgcagcccaggctactatacccagccaaactctcaattatcatagagggagaaaccaaagtattccacgacaaaaccaaattcacgcattatctctccacgaatccagcccttcaaaggataataacagaaaaaaaccaatacaagaacgggaacaacgccctagaaaaaacaagaaggtaatccctcaacaaacctaaaagaagacagccacaagaacagaatgccacctttaacaactaaaataacaggaagcaacaattacttttccttaatatctcttaacatcaatggtctcaactcgccaataaaaagacatagactaacaaactggctacacaaacaagacccaacattttgctgcttacaggaaactcatctcagagaaaaagatagacactacctcagaatgaaaggctggaaaacaattttccaagcaaatggtatgaagaaacaagcaggagtagccatcctaatatctgataagattgacttccaacccaaagtcatcaaaaaagacaaggagggacacttcattctcatcaaaggtaaaatcctccaagaggaactctcaattctgaatatctatgctccaaatacaagagcagccacattcactaaagaaactttagtaaagctcaaagcacacattgcgcctcacacaataatagtgggagacttcaacacaccactttcaccaatggacagatcatggaaacagaaactaaacagggacacactgaaactaacagaagtgatgaaacaaatggatctgacagatatctacagaacattttatcctaaaacaaaaggatataccttcttctcagcacctcatggtaccttctccaaaattgaccacataataggtcacaaatcaggcctcaacagattcaaaaatattgaaattgtcccatgtatcctatcagatcaccatgcactaaggctgatcttcaataacaaaataaataacagaaagccaacattcacatggaaactgaacaacactcttctcaatgataccttggtcaaggaaggaataaagaaagaaattaaagactttttagagtttaatgaaaatgaagccacaacgtacccaaacctttgggacacaatgaaagcatttctaagagggaaactcatagctatgagtgccttcaagaaaaaacgggagagagcacatactagcagcttgacaacacatctaaaagctctagaaaaaaaggaagcaaattcacccaagaggagtagacggcaggaaataatcaaactcaggggtgaaatcaaccaagtggaaacaagaagaactattcaaagaattaaccaaacgaggagttggttctttgagaaaatcaacaagatagataaacccttagctagactcactaaagggcacagggacaaaatcctaattaacaaaatcagaaatgaaaagggagacataacaacagatcctgaagaaatccaaaacaccatcagatccttctacaaaaggctatactcaacaaaactggaaaacctggacgaaatggacaaatttctggacagataccaggtaccaaagttgaatcaggatcaagttgaccttctaaacagtcccatatcccctaaagaaatagaagcagttattaatagtctcccagccaaaaaaagcccaggaccagacgggtttagtgcagagttctatcagaccttcaaagaagatctaactccagttctgcacaaactttttcacaagatagaagtagaaggtattctacccaactcattttatgaagccactattactctgatacctaaaccacagaaagatccaacaaagatagagaacttcagaccaatttctcttatgaacatcgatgcaaaaattcttaataaaattctcgctaaccgaatccaagaacacattaaagcaatcatccatcctgacgaagtaggttttattccagggatgcagggatggtttaatatacgaaaatccatcaatgtaatccattatataaacaaactcaaagacaaaaaccacatgatcatctcgttagatgcagaaaaagcatttgacaagatccaacacccattcatgataaaagttctggaaagatcaggaattcaaggccaatacctaaacatgataaaagcaatctacagcaaaccagtagccaacatcaaagtaaatggagagaagctggaagcaatcccactaaaatcagggactagacaaggctgcccactttctccctaccttttcaacatagtacttgaagtattagccagagcaattcgacaacaaaaggagatcaaggggatacaaattggaaaagaggaagtcaaaatatcactttttgcagatgatatgatagtatatataagtgaccctaaaaattccaacagagaactcctaaacctgataaacagcttcggtgaagtagctggatataaaataaactcaaacaagtcaatggcctttctgtatacaaagaataaacaggctgagaaagaaattagggaaacaacacccttctcaatagccacaaataatataaaatatctcggcgtgactctaacgaaggaagtgaaagatctgtatgataaaaacttcaagtccctgaagaaagaaattaaagaagatctcagaagatggaaagatctcccatgctcatggattggcaggaccaacattgtaaaaatggctatcttgccaaaagcaatctacagattcaatgcaatccccattaaaattccaactcaattcttcaacgaattagaaggagcaatttgcaaattcatctggaataacaaaaaaccgaggatagcaaaaactcttctcaaggataaaagaacctctggtggaatcaccatgcctgacctaaagctttactacagagcaattgtgataaaaactgcatggtactggtatagagacagacaagtggaccaatggaatagaattgaagacccagaaatgaacccacacacctatggtcacttgatcttcgacaagggagccaaaaccatccagtggaagaaagacagcattttcaacaattggtgctggcacaactggttgttatcatgtagaagaatgcgaatcgatccatacttatctccttgtactaaggtcaaatctaagtggatcaaggaacttcacataaaaccagagacactgaaacttatagaggagaaagtggggaaaagccttgaagatatgggcacaggggaaaaattcctgaacagaacagcaatggcttgtgctgtaagatcgagaattgacaaatgggacctaatgaaactccaaagtttctgcaaggcaaaagacactgtctataagacaaaaagaccaccaacagactgggaaaggatctttacctatcctaaatcagataggggactaatatccaacatatataaagaactcaagaaggtggacctcagaaaatcaaataacccccttaaaaaatggggctcagaactgaacaaagaattctcacctgaggaataccgaatggcagagaagcacctgaaaaaatgttcaacatccttaatcatcagggaaatgcaaatcaaaacaaccctgagattccacctcacaccagtgagaatggctaagatcaaaaattcaggtgacagcagatgctggcgaggatgtggagaaagaggaacactcctccattgttggtgggattgcaggcttgtacaaccactctggaaatcagtctggcggttcctcagaaaattggacatagtactaccggaggatccagcaatacctctcctgggcatatatccagaagaagccccaactggtaagaaggacacatgctccactatgttcataacagccttatttataatagccagaaactggaaagaacccagatgcccctcaacagaggaatggatacagaaaatgtggtacatctacacaatggagtactactcagctattaaaaagaatgaatttatgaaattcctagccaaatggatggacctggagagcatcatcctgagtgaggtaacacaatcacaaaggaactcacacaatatgtactcactgataagtggatactagcccaaaacctaggatacccacgatataagatacaatttcctaaacacatgaaactcaagaaaaatgaagactgaagtgtggacactatgcccctccttagaagtgggaacaaaacacccatggaaggagttacagaaacaaagtatggagctgagatgaaaggatggaccatgtagagactgccatatccagggatccaccccataatcagcttccaaatgctgacaccattgcatacactagcaagattttactgaaaggacccagatgtagctgtctcttgtgagactatgccggggcctagcaaacacagaagtggatgctcacagtcagctaatggatggatcacagggctcccaatggaggagctagagaaagtacccaaggagctaaagggatcttcaaccctataggtggaacaacattatgaactaaccagtacccctgagctcttgactctagctgcatatgtatcaaaagatggcctagtcggccatcactggaaagagaggcccattggacacgcagactttgtgtgccccagtacaggggaacgccagggccaaagggggggagtgggtgggtaggggagtgggggtgggtgggtaagggggacttttggtatagcattggaaatgtaaatgagctaaatacctaattaaaaaaaaatgtcaatctaaaaaaaaaaaaaaaaaaaaaaaaaagaattatgattttatccccggattatgtttagattttagcctgtgtttgccacctgaaaaccatgtcatccactcaataaaatctctatgttacacaacttgagtttgattaagagaataaaactagtcttcaaccccatcaaaaatctgagaatgacttaaacattacctgagtaaacaccacccatagactcatatgtttgaacaagcctatgggggccagggaatgtaatatgatagtttgtatctgcccagcccaggaagtggcattattagagggtgtagccctgttggagtaggtgtgactttgagtaggtgtgactttgctggaataggtgtgtcactgtgggtatatggacttttaagaccctctaggtgcctgaaagccaatattctactagaaatcttgagatgaagatgtagaactttcagcaactcctgcaacatgactgcctggatgctgccatgtttctgtcttcatagtggactgaacctctgaacctgtaagctagccccaattaaatgttgtccttataagggttgccttagtcatggtgtctgttcacaacagtaaaaccctaactaagataagagggttcaccaatacaaccatttatagagctggaactctgggatggatcagatcagcttgtatgtgtctggtggaaatggagctttgagggattcccactctggatcaccttttttaaaaagcaatatacagcataccaacagccaatatcaaattaaatggagagatacttgaagcaatcccattaaatcggggacaaggatgcccactttccccatatgtatccaatatagtacttgaagtgctagctacaacaataagacaacaaagagagatcaaggggatataaattgccaaagaagaaataaaggtagcactatttgcagatgatatgatagtatacattagcaaccccaaaaattctaccagagaacttcttcagtggataaacaacttcagcaaaatagttgcatataaaattaactcaaataaatcagtagctttcctttatacaaatgataaacaggcttagaaagaaattagggaaataactcccccaacaatagccacaaataatataaaatatcttggggtaactctaaccaaacaagtaaaagatctgtatgacaaaaacttcaagtctctcaagaaagaaatcaaaggagatctcagaaaatggagaggtcttccatgctcatggactggcagaattaacatggtaaaaatggcccttctaccaagggcaatctatagattcagtgtaatccccatcaaaatcccaacatagttcttcaaagacatggaattcttaaattcatctgaaaatgcaaaaaaaaaaaaaaaagaagaagaagaaagaaagaaagaaagaaagaaagaaagaaagaaagagaaaaacaacacaaaacaaaaacagaatacctaaaagagtacttaacaataaaagaatagctggaggaatcaccatccctgacctcaagctctacagagcaatagtgataataactgcatggtactggtacagagacagacaggttgatccatggaatagaactgaagaaccagaaataaaaccacacacttatggacacttgatatttgacaaagaagccaaaatatacaatggaaaaaaagaaagcatcttcaacaaatggtctaactgactgttgatatgtagaagaatgaaattagaacccgtatttgctaccttgcacaaagctcaagtccaagtggatcaaggacctcaacataaaacctgatacactgaatctaatagaagagaaagtgggaaagagccttgaactgattggcacagggggaaagttcctaaacagaactccaacggctcatgctctaagatcaagaattgataagtggaacctcatgaaactggaaagcttatataaggccagtgacatagccaataagacaaattggcaaactacagattgggaaaaaaatcttcactaaccccacatcgatagagggctaatatctaaaatatataaggaactcaagaagctaaccatcaaaaaaaccaaacaacccagtcaaaaaatggggtatagaactagaccgagaattcacaacagaggaatcttgaatggctgagaaacacctaaagaaatgttcaaagtctgtagtgatcagagaaatgcaaatcaaaatgatcctgagattccacctcacaccagtcagaatggctaagatcaaaacctcaggtgacagcacctgttgtcgaggatgtggagaaagaggaacactcctccattggtggtgggattgaaaactggtacaaccactctgaatcagtctggaggttcctcagaaaatttgaaattctccttttctctctatctctctctgtctctgtttttctctttttcctttctctcatagacacatacatacaaaatacattataaaatgtaccacttttaaagatttttaaaaattacgtgtatgtgaattggggtatgcgtgagatgtgtgcatgagtgcagttgcctaaagatgtcagatccattggagctggaattacaagcagttctgagttgcccaacatgggtgctaggactcagactcgggtactctgaaagaaaagtataccatctttactgctgagcaattgttttctttagctttaattgtcaacctgacagagtcatccaagagaaaccgcaattgaggaattgcctaaatcaggttggtttgtgggtgtgatagctattattggttgtcaacttgactacttctgaacttaactataactcaagaggctggatacacctgtgagggactttttcttaaagcagttattttaagtagaaagacccagttttagtccagatcttctgagctgggaagataaactttttaatctagctcttttgcaatgggaagatctacctttaatttgggccacatcttctgctgacagtctacataagggacatgcaaaaaggaagccttcttggcaagtccattctgtcactggcattagagcccacttttttgggattatggtgtatacttaagaccaactgagacatccagtcttatggacttaataggtactggatccttggaccttcccttgatagacagccattgttgaactagctggaccacagcctgcgagccattctaataaatcctctttatatataatcatttaatatgttctattcctttagagaatcctaattaatacagtggacatgtctgtgaggaattgttttgattattaattaatgtaggagggcccattccactctaggcatcatgattcctcaggcaggcagttctaggatgtataaaaaattaggtaagcatgaacaagaaagcgagctactcagactttggtaaccactactttactctctgtttttatgtattgtgatggctattcttggttgtcaacttaactatatctggaactaaaatccccaaatagaggacacacctgtaagggaccttttgcttactctgaagtaagaagatccacttctaatctgaatctttgaaatagaaagacacatgccaaaaggtctagatcttttgagatgggcaaagatacacctttaaatcagatcttaaggctggaaaacataactttaatctgggccacacgttctgctggaaaactatataagacaatggaagaagaaaggtttggctttttgcctgcctttccttgctttgctaacacatccattacttcactggtgttaaagcctacttcttctggattccaccacatattgaagacgagctgaaacatcctaaccttgttgactgagaaactacaagattattggaatttctgttcacagccagccattgttggattagctgaactgcatcctgtaagtcattgtaataaatctactttatctatatctatattgacatatatcaatatctatctatctatctatctatctatctatactgtaacttctgttattctaaagaaccctgtctagtacatgtgtttcactttgttttagattccacgtaacgatctctcttttgttttaaacaatgtctctattaaaataatgtatgttcaaatactagagatgcttattctagtatttgaaacaagctgtattaggaaatggagaaatgatggatagaataataaaatcatagatatctagtttatattacactaaggaaataataaagtgcaatattgttaggtgggaaaaaaaatcaacaacgaaatcctgaccaaaaggtaacaaaggagaaaaaaatatgggccatctgaattaactactacaaatcagcctcttggcaaaataagctatgtctttgaaacatatgaattacatatgtttatatacatatttatatgaaaaatgtaaatgcaaccgaagggaatttaaacattaaaaattttagaacagagagtaaagtattatgactctagattaaaataggcaagtattaccagaagtccaaattaaatgtgaggctcaggttgacttgaagtggaggactaatattataagacaaagggcatagaattctgatagaaggcacatcttagaatgtcctaaaatataacttttcagggttctgttcttaggcaatttttctgtgattttctatgatttgaattttagtcacattatatgaaactaacagggtaatgtgtgcttatcccatcccaacaaggaccagaacttcaaaagcatatatttaaaaatgtaataagcagggctggagagatggctcagtggttaagagcactgactgctcttccgaaagtcatgagttcaattcccagcaacgacatggtggctcacaaccatccataacaagatctggcaccctcttctggagtgtctgaagacagctacagtgtagttacatataataaataaataaatcttttaaaaaatgtaataagcaaggtaatcttcaaaagaactatagtgtttcctacttgtactgtataacagtgcccttttacccaaacctactagtaataatggtcttataatttttccagtttgataaatatgtcattgtactggctggttttgtgtgtcaagttgacacaggagttatcacagagaaaggagcttcagttggggaaattcctccataagattcagctgtggggcattttctcaattagtgatcaagggtggagggctccttgtagatgggaccatctctgggctggtggtcttgggttctataagagagcaacctgagcaagccaggagaagcaagccagtaagaaacacccctccatggcctctgcatcagctccttcttcctgacctgcttcagttccagtcctgacttcctttggtgatgaacaacaacatggaaatgtaagccgaataaaccctttcctcctgaacttgcttcttggtcatgatgtttgtgcaggaatagaaaccctgactaagacaaccatgttatctgaatcactgatagtctttttctagtaggatattaagattaaatttttattatgcttttgctattcagatctgtgtttatatataaataacacatacatattttatatgctgaattgggttccccctgttttcttgctgatgcttcaaactccaatacttccaaatgtggctggatttagagatgggttttaaagagaaaattagttaaaataaggttactagtgcagaccctaagttctttataataagagatgactacaatatagaaaggtatagagggaagaccatacaagggtacagggacacgtcaacatctaaaagctaaagagagattgaagaagaaattaaatcttctgacacattgatcttaaacttttgtttgtttgtttgttttcgagacagggtttctctgtgtagccttggctgtcctggaactcactctgtagaccaggctggtctcgaactcagaaatccgcctgtctctgcctcccaagtgctgggattaaaggcgtgtgccaccactgcccagcttaaactaccttttaacactgtgagaagataaatctaatactttaggaagataaatatcatgtttatagtatatgattatataataaaatattttgaaacgagttatcttggtatggagtagttggtaataaggaataatataggacataaaatacaaattaaagggacagggtagcaaaagaaaagtagtcagtgggtttttaaaatatatattatgtagttacagttacatacttattatagtctctatataagagatgttactagacataagttgggggcatcaattttctctttactagatatgcaatgaatccaagttattcttcacttactgtgcatgatgttggaggcctggaacccagggtcctggggctgtgttttagctgcattggggaggaagcgttgcatgttctctgtgatgtaccagctttggttctcatcaaatatagaaaacaggatgacatttcttttgtctgacatcatctgttaataacatatattaaaaaggagaaggaaatgtcactcatactataggtagaagctagcagcccagaataaagagatagcatagagtatactattaaatccatgtactggaagagggatgggcattttgagtgatgaatgtatgttcagaactaatgaaacctcaaggtaggaaggtaactagatctagtaaatttcattccttctggaccgaagatcatatactggtatagtttgtgccagtgtttttgcttttcatatgtttaaagtagagaaatgtagatcttaaaagaacatccaaatcaaataaaatcaataccattctgaattcttatcttgcaaatacctttatataaggctaccagcttataggaaattaaaaaaaaataaaaggaaataagatatgtcaggatgaacactgaataatgccataaagattttgttcaaaaaaatcccccaggatcttagaatagcactttatataatgaactaaattctcttttgattcacctgctaattgagtataagatttttttttccttttttttttttgttggatattttctttatttacatatcaaaatgttatcccctttcctggtttcccctccaaaaaacagcctccccctattccctccctccctccctccctccctccctccctcctcctgcttaccaatccacccactcctgattcctggccctggtattcccctacactggggcatagagccttcataggacaaagggtttctcctcccattgatttccgactagaccatcctctgctgcatatgcacctagggccatgagttccaccatatgtcctctttggttggtggtttagtcccagggagctctgggggtactggctagttcatattgttgttcctcctagggggctgcaaaccccttcagttccttaggtcctttttctagctccttcattgggggccctatgctcagtccaacggatggctgtgagcatccacttctgtatttgtcaggcactggcagagcctctcaggagacagttatatcaggctcctctcgggaagcacttcttggcatctgcaacagtgtctgggtttggtgattgtatatgagatgatccccaggtgagtggatggtcatttcttcagtctctactccacactttgtctctgtaactcctttcatgggtgctttgttccatgcttctaagaaggatagaaatatccacactatggttttccttcttcttgagtttcatgtagtttatgaattgtatcttgggtattctgagcttctgggcttctggggtaatatccacttatcagtgagtgtatatcacatgagttgttttatgattgggttgcctcactcagaatgatatcctccagatccatccatttgcctaagaatttcataaattcattgtttttaatagctgagtagtactccactgtgtaaatataccacattttctgtatccattcctctgttgagggacctctgggttctttccagcttctggccattgtacataaggcttctatgaacatagtggagcatgtgtccttattaaatgttggagcatcttctgggtatatgcccaggagtggtattgctgggtcctcaggtagtactatgtccaattttctgaggaactgccaaactgatttccagagtggttgtaccagtttgcaatcccaccagcaatagaggagtattactttttctctacatcctcaccagcatctgctgtcccctgagttttttattttagccattctgactgttatgaggtgggttgtttcgatttgaatttccctgatgactaaggatgttggacatctttttaggtgcttctcagtcattcagtattcctcagttgagaattatttgtttagctctatactccatttttgaatagggtgatttggttctctgcagtctaccttctagagttctttgtatatattggatattagccctctattgggtgtaggattggtaaagatcttttcccaatctgttggttgctgttttgtcctattaacagtgtcatttgccttacagaagctttgcaattttttcaccatttaaattttttattagataatttcttcatttacatttcaaatgctatccccaaagctctctataccctcccctcaccctgctccccaacccacccactcccacttcctgaacctggcattcccctgtactggggcatatgatctccgaaagaccagtggcctctccccccattgatggccggactaggccatcctctgctacatatgcaactagagacacagttcttgggggtactggttagtccattttgttgttcctcctatagcgttgcagaccctgggaggatgtggagaaagaggaacacttctccattgttggtgggattgcaagctggtacaaacactctggaaatcagtccggtggttcctcagaaaattagacatagtactaccaattcctctcctgggcatatacccagaagatgttccaacttgtaataaggacacatgctccactatgttcatagcagccttatttataatagccagaaggtggaaagaacctagatgtccctcaacagaggaatggatacagaaaatgtggtatatttacacagtggagtactactcagctattaaaaacaatgaatttatgaaattcttaggcaaatggatggatctggaggatatcattctgaatgaggtaacccaatcacaaaagaacatacatgatatgcactcactgagaagctttccaattttatgaggtctcatttgttgattcttgatcttacatcacaagccattggtgttctgtttggattttttcccctgtgcccatatgttcaaggctcatccccactttctcttctttaagtttcaatgtatctggttttatgtgaaagtccttgatccacttggacttgagctttgtacaaggagataagaatggattgatttgccttcttctacatgctaactgccacttgagccagcaccatttgttgaaaatgctgtcttttttccactggatggttttagctcctttgttaaaagatcaagtgaccataggtgtgtgggttcatttctaggtcttcagttctattccattgatctacctgtcttttgctgtaccagtaccatgcagattttatcacaattgctgtgtagtacagcttgaggtcagggatattgattcccccagaagttcttttatagttgagaatagttttcactactttttgttgttgttgttattccaaatgaatttggaaattgctctttctaaatctatgaagaattgagttgaaattttgatggggattgcattgaataagtagatagcttttggcaagatggccattttttactatactaatcctggaaatccatgagcatgggagatcttttcatcttctgagatcttctttgatttctttcttcagaggcttgaagttcttatcatacagatctttcatttgcttagttagagtcacaccaaagtattttatattatttgtgactattgtgaagtgtgttgtttccctaatttctttctcagcctctttatcctttgtgtaggggaaggccattgatttgtttaattttatatccagctactgcactgaagctgtttatcaagtttaggagttctctggtggaatttttggggtcacttatatatgctatcatatcatctgcaaatagtgatattttgacttctttctttccaatttttatccctttgatttccttttgttgtctaattgctctggttaggacttcaaatactattttggataggtaggaaaagagtgggcagccttgtctagtccctgaatttagtggaattgcttcgagtttctctccatttagtttgatgttggctactggtttgctgtagattgcttttactatgtttagatatgggtcttgaattcctgatctctccaggacttttatcttgaacaggcattggattttgtcacatgctttctcagcatctaatgagatgatcatatgatttttttctttgagtttgtttatatagaggattatgttgaatgatttctgtatattgaacaatccctacatccctgggatgaagcctacttgatcatgatggatgatccttttcatgtgtttttggattctgtttgcaagaattttattgagtatttttgcattgatattcataagggaaattggtctggagttctctttctttcttgggtctttgtgtggtttaggtatcagagtaattgtggcttcatagaatgaattgggtagagtacctgctgtttctattttgtggaatagtttgaggagaattggaattaggtcttctttgaaggtctgaaagaactctgcactaaacccatctggtcctgggctttttttgttgttgttgttgggagactattaatgacagtttttatttctttaggggatatgggactgtttagatcattaatctgatcctgatttaactttggtacctggtatctggagtataagatttaatatctaaacttcatatgtgtaaatttcattttatatgacccattagttacaaaagccaaactgctgaaaaggtaattagagaatatatatttcagccatctttcagaagcttgtggaaaagtataattcggaaatattcttaggagagatattttgtcatatccaaatattagttgaaagtcctacactctggatttgtatgctatacattctaactagtagaaatttatgtattctaaaaagtcaaaatgaattcatattcaagcctcaaaatatggcagcaagttgttctggatccaagaattgagatttttataaataactaaaattttcttactcagataattttctaaaacagtagaaatagtttaagttctaaccacaatctgagaccattttatattttcctctattttgttgaacaaatattggttctttactaaatgtcacataatgttgtagatgttagaaatatgttacttttttttcctagaccgtattcgaatttttttattgaaatatgttacttttattttctgacagggttttgctcacatgacaggctggcctagaacttcctatgttttccaagcaggccttgaaaacactcacctaactcagtctcccctgtacttagattgaaggcatgtacaatcaacatggctaattttaaggtgcttttgattcatccataatgagatgtccaggaaagaaacaggttgtaggcataattttgtagtttttaaaatttgtagaggtcaggatgtatttcagttggtagtttgcctagcatgcacaaagccatgggtatagcttgactttctcaaacctgccagcagtataaataaagatagggagggttctaatatagtttaaagtttaggccttcattagtctccgaggtagctcatctaatttaacctatcttgtctctgctccaatgcagtgtctattccccagagtgctctctgaatctctcccctgctttctttacccaggattcctctatctgtccaactattggatgtcacatcattattacagccaatcagatacaattatagattgtcttcaagctagtgaagaaggacaaatatttacaaaatacgagaccagtcatgggtcttagaaataacaataccaagatactgagagcacttagcactccgatgacacagaattaacaattgaatatacagagacaatccatcacacttgttctccaacatactagcctgatccccagtactgcttaaactggacatggtgtcacacactataattccagtattcacaaggtataggcaagaggaccagatgtcaaagaccatcttcaactacataaagagttcgaggcaagcctggaacacctgaaaccctgtctcaaaaaaaatggtaatttaaatgtaggtgcaattagatgagtaagaacggggaagactccttggggcggggggagcaaaatcccagattggaactgagttaaatagaaagaatctaggatcctggcttttatgtttcttagaagacaagttactcagaaaactaaaatataatgaaagctaagtggaactcaccttaatcacttttattgggtaatattttctataagttatagaggtatctatatcaagagaatacagggaatatctagaagttcataggcattttattcgacttttactttcaaatttagtacttggaaagaaaagatttcacctggtttcccctttgatctacagattctttgtagcagatgagaagagggccaatcagtcctgaagctagatctctctcagggttaatgaaacttgaataatagcgggtcaggcaccgtggatctgatttagttggtccatcttctactgtaactgtccacttgtacttgaatatctctcctggatgaattggcaaatccttcacgtgctttatacctatccacattcaaaccagaaacagagtattagagtataatgagctacatattttgtttttatttatttatttattttattgggtatttatttcatttacatttccaatgctatcccaaaagtcccccacccgctccccccccccacctactcccacttcttgaccctgtcgttcccctgtactgaggcatataaagtttgcacgaccaatgggcctctctttccactgatggccgactaggccatcttctgattcatatgcagctagagacacgagctccggggagtactggttagttcatattgttgttccacctataggatttcagatccctttagctccttgggtactttctctagctcctccattgggggccctgtgatccatccaatagctgactgtgagcatccacttctgtgtttgctaggccccggcataatctcacaagattttgtaatgttaaattaagtttgacccaaaccggcttctatatatacatttcaagttctctctgcatggaaactgtaacttaaattagtatatggatatttttaacctaacttggaagtatattgtaataacaaggagctgagtcttagcatatcacaacagctgaacctctagctcattaaaggctgaagctgagaaaatgttttataaaaaaaatccactgtctgcatttaatcaggctatttctatgtcactttcggttctctgtctataaatacggttctcttcctctcagtggtaagctgaagtattctgaatcatttttggtccaaaattaattcatgaattatgtcaagttcagtgtatctaaagttccccctttaacaataatcagttcttatttcaaggagactactaatccatgtgcatgcgaatttttttcagtaagcagaaagtaaaatggcacctgtagcaaatttaagattcaaacaattattttatacaatagaaatgggccaaggaaggctggagagatggctcagcagttaagagcactgactgctcttccagaggtcctgagttcaattcccagcaaccacatagtggctcaccgtcatctgtaatgaggtctgatgccctcttctggtgtgtctgaagacagtgaaagtgtactcatataaaataaataaataaacctttaaaaaaaaatgggccaaggagacttttctataaagatataaatctgttttttttttcttcttttgagcccctggtcccataatgatgactctgaaactaattatttattaataaatgcctaggccataaattgtggctcattccatgagctgctcataactcatttaatccatgtaaactattatatgtcttacacatggttagtttacctctccttctttcttaccatctacttcagcatctctcacagcatcttactcagcatctcacttgaatctcttgtctctatccagagttcagctatctgatgatatatgttcatttctctttattccttcgctctttcccagaagactctctcttcctcccagagtcacatctcctattttctgcctcagctcattggccatcagcttttataaatgaaaggtgttccttataaaagattctttctatgcttttcataacatattatttcaaaaaggtgtccctcttattacaaataatagaagtaataagaatatttgtatattcttatataatctattttattttaatagtaaaatgattaggactgtgggcaagaaaataacaacagtatattacctagttgtatggtaaatatatttgcaaattgattttgcattaataaaatggtatgaatttacaagagatagaagagagaatatcagatataggagatgccatagaagagattgacacaactgtcaatgaaacttcaaaacataacaacctcctaacctaaagcatccaggaaattcaggacacaatgaaaagaccaaatacaagaaaatcttgattagaagagaaggaagattctcagatcaaaggacctgaaaatgtcttcaacaaaatcaaagaagaaaacttccccaacctacaggaatagatggccataaaggtacaagaagcctatagaacaccaaaaaaatgagaccagaaaagaaaatcctctcatcacataataatcaaaacactaaatgcacagaacaaagaataaatattaaaagcttcaagggaaaagggtcaagtaacataaataggtagacctacctatcagaattacaccagacttctcaacagagattatgaaagccagaagagcctgatcagaggccatgcagactctaagaaaacacaaatgccatcccaggatattatactcagcaaaactctcaatcaacatagatggagaaaccaaaatttggttttccaggacaaaaccaaattcaaacagtatgtatttatctatctatctatccaaccctacagaggatcctagaagaaaaactccaacaaaaggtaggtacctgcaccaaagaaagaaattgagcatctcacaacaaaaccaagaggagagaaccaccggcacataaagccatctataaaaacaagcatatcaggaagcaacagtcatctctctttaatatctctcaatattaatggactcaactcacctacaaaaagacataagctaacagactggatacacaaacaagatccagcattttgctgcatacaagaaacacatctcaataacaaagacagacactatctcaaagtaaaaggatggaaaatggttccaagcaaatggttccaagacacaagctggagttgacatcctaatatacaataaaatagactttcaacctaaggttatgaagcgttatgaggaaggacacttcatacacatcaaagggaaaatccaccaagagaaagtctcaattctgaacatctatgccccaaatgcaagagaacccacattcatgaaagaaactttactaaagctcaaaacacacatctaaccccacacaataatagtgggaaacttcaacactccactttcaccaatggacaggtcattgaaacagaaactaaacagagacacagtgaaactaatagaggttatgaaccaaatggatttaacagatatctacagaacatttcaccctaaaacaaaagaatacaccttcttctcagcacctcatggtaccttctacaaaatcaaccatgtaattgggcacaaaacaggtctcaacagacacaagaagactgaaataattccatgcatcctatcagatcaccatggactaaggctggtcttcaatgagaacaaaaacaacagataactcaaatacccatggaaacttaacaattctctactcaatgataacttggtcaggggaagaaagaaaaaattaaagacttcctggaatttaatgaaaatgttgacgcatcatattcaaacctataggacacaatgaaagcagtgctaagaggaaaattcatagcactaagtgccctggtaaagaaacttgagagatcttacactagcaacataacccaatacctgagagctctataacaaaacgaagcaaaccacccaagaggagtagaggtaggaaatagtcaaactcaaggcagaaagcaaccaaatagaaacaaagaaatcaatacaaagaatcaacaaaaccaaaagatggctctttgagaaaatcaacaaaatagataaagccttagccaaaccaattaaagggccaagaggcagtatccaaattaataaaatcagaaatgaaaagggagacataaaaacagaaagggaggaaattcaaaaaaatcatcagatcctactataaaagtctatactcaacaaaactggaaagtcttgatgaaatggatggttttctagacagataccacataccaaacttaaatcaagatcaggtaaactatctaaaaaggcccatatcacacaaagaaatagaagtcattaaaaacctcccaaccaaaaaaagcccagggccagatggatttagtgcagaattccagcagaccttcaaagaaaacctgataccaattttcctcaaactattccataaaatagaaacaggaggaatactacctaactcgttctatgaagccacaattactctgatacctaaatcacacaaggatccaacctaaaaagaggacttcagaccaatctcgcttatgaatattgatgcagaaatactcaataaaattcttgcaaaccaagaacacatcagaacgatcattcaccatgattaagtaggcttcatcccagggatgcaaggctagttcaatatacaaaaatccatcatcagcgtagtccattatataaacactctccaaaaaaaaatatcacatgatcatatccttaggtgctgaaaaagcatttggcaaaatccaacactccttcatgttaaaagtattggagagatcaggaattcaaggtccatatctaaacataataaaccaacagccaatatcaaattaaatggagagatacttgaagcaatctcattgaaatctgggacaagacaaggatgcccactctccccgtatctgtccaatatactactggaagttctagctagaaatataagacaagaaaaatagatcaaagggatataaattgtcaaagaagaattaaaggtatcactatttgcagatgatatgatagtataaataagcgaccccaaaaattctaccagagaacttctccagctgataaacaacttcagcaaagtgtccggatataaaaattaactcaaataaatcagtagtttttctttatacaaataataaccaggctgagaaaaaaattagggaaacaattcccttcacaatagccacaaataatacaaaatatcttggggtaactctaaccaatcaggtgaaagacctgtatgacaataacttcaagtctctcaagaaagaaatcaagaagagctcaaaaaatggagagatctcccatgctcatggattggcataattaacatggacatcctaccaaatgcagtctacagattcaatgcaatccccatcaaaataccagaacaattcttcaaaggcatggaaagagcaattctgaaattcatctggaaaggcaaaaaacctagaatagtgaaaacaattgttaacaataaaagaacagttgggggagtcaccatccctgacctcaagatttatgagctgcatggtattggtacagagacagacatgttgctcaatggaatagaattgaagacccagaaataaaaccatagttacaggcaattgatctttggtaaagaagccaaaaatatacaatggaaaaaagaaggcatcttcaataaatggtgctggtctaactgactttctgtatgtagaaaattgaaaacagacccatatttgttaccttgcacaaagctgaagtctaagtggattaaggacctcaatgtaacaccagatacactgaatcaaatagaagagaaagtggtaaagggccttgaactcattggcacaaggggacatttcctaaacagaactccaatggcttacactctaagatcaagaattgacaaatggaacctcatgaaactggaaagcttctgtaggcaaagaagaaaaatcggcatcgtacagattgggaaaaattcttcactaaccccacatcgatagagggctaatatacaaaatatataaagaacacaagaagcgaatcacacaaaaaaaaaaaaaaaaaaaaaaaaacctgaacaacccaatcaaaaaatgggatataaaactaaactgagatttttcaactgaggaatcttgaatggttgagaagcacctaaagaaatgtacaaagttcttattgatcagagaaatgcaaatcaaaacgaccctgagattccaccttacaccaatcagaatggctaagatcaaaaccacaggtaacaacacatgttggagaggatgtggagacagaagaacactcctccattggtggtggggttgcaaactgttacaaccactctggaaatcaatctggaggttcctcagaaaattggaaatagatctacctgaagacccagctataccactcttgggaataaacccaaaagatgcaccaccgtgccacaaggttaagggttccactatgttcatagtggccttatttgtgatagcatgaagctggaaataacccagatgtttcagacagaagaatggatacagagaatgtgattcatttacactatggaatactactcagctattaagaatgaggacatcctgagtttttcaggcaaatggatggaactagaaaatatcatcctgagtgaggtaactcagacccaaaagtacatgcatgaactgtagggatagaaatggagaaaagcctcaagaaaggaagggccagagagaggcccaaagttggatccagctcaaggggaggccccaaggcctgacactattactgagactatggagtgctcacaaaaagggacctatcatgactgccctctggaagacccaacaagcaactgaaagagtcagatgcagatatttgcacccaaccaatggacagaaacagctgacccctgttgttgaattagggaaggctgaaagaagctgagaaaggtggccctgtaggaacaccagtagtcttaatctggagccgcccttttcccagagatatctcaaacacttgaccaccaaacagacagcatacaccagctgatatgaggcccccaacacacatacagtagaggactgccgggtctgtgttcattcagagatgatgcacctaaccctcaagagactggaggctccagggaatttagaggtcaggtggggtgtggagtggggacatccaggtggagacaggggtgtggggaggaggtgtgggatgtggagcagatagagggtagataggagggcaaggaatgaaatatagtgtgtaaataaataaatacataaataagaacttactggagaatagtgtgctttaactgaaagcaaatattactcacagtacaactgatacagttaatgatcattcttttcacctgtaatataatcatggcttttgtattgaaaatctattacttttttttttcatatttttcctgaaacgttaatgcctgaaactcaacttggatttttcttgtttccattgcctttgtatagaataaatttaaatccagaaaaaaatgcaaaaaaaaaagaaagaaaaaaagaaaaagaaagatctataaaccgagatactaattacctcttggcaatctccttgcatgtagaggactgacatcagtgattccatgagggtaaatgttatatggtcggcttgcttgattcttaaaaataatctgaaaatataagtgagagatgagatcaagtcctaagatgagtaggtttaacaagaaaactgtaacctaggtctagaaaatcaaaagctgactgtatttacattataggtgtgaactcttaataaaactcaatatattcactctgttcatgaaaaggaagctcatgtagctgcttgggtttgccacactttttcaatttcacttgctttagcaagtcttgcctgcatctcccagataaagtgaaatcttggtgtttgttaaggacagctttactgtattcttggcacttaatacttcaatacttgagaaggagatagtgatccaggttataagaattatcacttaataagcaggtataactagaagacaatgtatagcctcaagcaagggtggcaggtgacaccgattataagagctttaaataagattaaaaaataaaaagcagtaacataaaaatagcactgaatgcttgaagactacctctagatctgagggtatggtttgtattttaaaagttaatgaaggaaaataattaatgaaaaaagttctgggaggatatgtatgtaccagtctaaatagtaagaagttaaaagaggttgcatgtgtgattgttcatattaatttttttcccatatactcattagatatgagttaattttatttgtgcaatacttataaattttaaaagattctgtccattggagacaaggctgaattttgaaggatcacagaaattcaaaccatctactcttttcttttaaaaaaatatttattttatttatgtgtatgagtgtttgcctatatttatgtatgtgtaccacatatatgtctggtacccatggaggtcagcagagccttttgcattccctgagactagtgaaacaaatggctataagccaccatctgaaacaatctcatattttcccctttacttaccaacagtgtgtctccaacttctccataaagtaaaggtcccaagagtcctgattcatgctgaatagtttcacgagtcttaaaggtttcatctgtgtatgctataaatctgacttttttatatttcctaccaatccgatgaggaccattgctcagatactggcttttataacttctgtttgagaggcaaaaagattaggcgtaaggtcagaaacatttagggaatcaaaaacccacttctaatatgatttactcaaaataaagagcaagaaaaatctaagtagtcttaggcttacctattctagtatctaatgttctatgaattgccacagaatgaacaagcgttaaaggcttagtcacaagggtatggagctagtgagaggaggtagaatctttaagagctggagcctacgcagtgtttgggagagcaggccctgcaccttgcctgggcaggagagtagagctgaccctggcattggggatgcaggtgagcaggccctgagggcatgagcatttgagaactggtcctgtgcttcatctgctgtgcaatgtggcatgcgcaagacagagatactatcatcgccttacatctcactgcctgtggctgtgtttgtgtgtgtgtgtgtgtgtgtgtgtgtgtgtgtgtgtgtgtgtagatatttgctgagctactgaaataaatgtgaaaccctgaaaaaaaggaaagaattgaagcttagtgggaagaacttaggtcattgggggcatgcccttgaaggggatgatattggattcttaggtcccttttatctcactttggttcttgtatgtaataggccccttccattttgcatattattgtgaatttttgtgctgtcccaagtccaaagcggtagtcaagcaagcacagactgaaaattccaaatccacgagtcaaaataaaactttctcacttataaatccacacttatttaggtattttagcacagtagtagaatggtagatactacaacatccttatcatttgatcccatgacatactaactcttaaatatgctttaaggattcattggcttaaataagtaagacaaatttgagtacaggggagagtagtaccaagagtccaaaggtttttacccattatccgaggtaggaactgaaggtgcatagtcccagtcttcctcctcagcagaaatataatgtatccaagttttagggtactttttagcaaccgagcgaatttggataaaaggagagctgtcataatccaatgtgaacatatccatttctgaataaagatcatcatcataatcttccatttcctcattattatttttcttttgccattgggattcctcagggcagctatctactttgacataagcttccatgccatctgcagtcagacaaaccaaagaatgttcttaactttcttgagttaaaggttatatattttcccctcttattatggtttaaatattttgtcttaagtgtccctttttcaaatcagcactgtttttgttacacttctatatgaattatagtactgttagtttgtggttttgccattttatcaaactatcctctatatgatttgaactgtctccaaaattcattaatataacattttggaaaatatgtgagtatttctctttggaactgtttattttgtttccatctcatggatggactaattctgttacttcaagaattggcttgttatctcagaaagatattgcttctctatttcctccctctcttcatctttctcttttctctgtctgccatgtgcatcattttcctatactataacagaaagaaatctcctattaaatgacaaaatcttgatatttaatttcctaggctcttgaactgtgtgagataataattttctgtttgttataaattaccctatttctgatattctattctggcaatataacagactaaggcagccttaaatggacataaccaagaaaaagttattaggttgctccaagacaaaaaataacgagttaatgtacaagaagaagaattgaagtaaaaggattattcaatatgaatttgcatagctactgcctacaaagtcatgtgaccaggaattgacactgtaggcacaattgtcccaattttgtttacacaggatcttaactcctttgcaaaacctctatcagatagtcctttaaaacttcgtatgatacccatttccctagattcctgattgaatcatctctttttctcttcccacagtctgatcccattaactagtactgaagcctagttaatgggatcagactgtgaaaccactaacatactgtctttcatctttccttcttactcatccctaaactatgtctcctccttctatcacagacatttaaccaaaaccccacaatcctattgtactagcaataaagttcttctatattcaaggtaaaaattgttacatttgaagtttaacataattgtaactatacaatgccatttttgcaacatattgtattgatgtacactgcccaggacatgtcattaaaattacaatggaatcttttacattactcattttcaagatccaagattgtagtaccatgtttatgggaagagatatgacaaaatagtaggaactgcccaagatctatcaagagtgtttgagcagtaaggaaagttattggtgatatctccaatgaagcttgacggtggttcctcacaaaaaatgtgtgaccttcgaggaatattgagtgtatttcaggagtggtgcccattccaatcacgtgccagtagactgatttcctatggcatccaatcagacctgtaaaatggaaatgagacagctatggaaaataattaggaattgtaaaattaaaagtacttgatagaataggctggataaaataactctacaaattttactgctaccttaacttataaacagttaccaaggaagtttccaaaccaacagctcttgccaaagcaacaaataactaacatactgctaaatgacatgaatatgtttctttaatttactctttagttttactgtagtatatattcagttgttcctaaggcattccatggctgataacatcctctattattcactaatgctctaaattatagtttgaaaataatctttcccttggatcccttttaaagatattgctctactatactgccagtctaattcttcttctttcatatatgaaaacaaacaaataaataaacaaaccagagggtggaattcagtgaatgtagaactctctgaaagctgtagaaaagacttatgattttgaagtcccaaaaccctgagaattgttggacagtcgtgtacatacctggaagagacctgtttacatagccattgactgtgtgcattttaggccagtctctagcagatgcagaatccatagactgtgtataagagtcgtttgtttctgagtgccagctcttccctagtaagagagagaaaaaaataaggtctgtttcacgagttacagtccccctttccttctttcctttccttttttgtgacactggatttttgtcagtggagtagacacaatctcagagtcactgagaaaaaaattatatttttcccaaaccaattaactttccctgtatttgttcataatgacagaggaataatggcaaatgataactaaggagaaggaaaaatactagttagtttaagctacaagaatttcattttgcaatgttagatgatagatttaaaaagggtagtcagtccttgccctgacatttttgcctcagcctatttttgtagcaaggaaaccccaggtagttgaaggcttcccaaactactctccaaaactaacaaaagctgaagcactgaaaattacttaggcactttttttttttcaatgaacacaaccgtgtattctggagctattttgagtgactacagctcagtaacacacatttaggttaccacaaattccaagttctgatgtggaaacagtttcatagttttacagaataaagaaagtcccaaatcaaggcaagtttaaaatacatttgtgggtacatcagagaggcaggcacagagagattgggggaagctttctatagtcccaagatgttatatggtgacatcttaacttctgggttggtggaagctcacagtctgctagggtttccatctattagtcccaaggtgttagtacttaggcactttttaaaaacaagtatgaaaaacaaaacaaaaaaaaaaaagaaagaaagaaagaaagaaagaaagaaagaaagaaagaaagaaagaaagaaagacttgccaggatcaagatgacacagcctcaaatcagaaaataacagtgtaatggtcccaagaaacaagctggagttgccagtctaatatccaataaaaatagactttaaaccaaaagttatcaaaagagttggggaaggacacttcataatcagatgaaaaatccaccaagaggaagtctcaattctgaacatctatgccccaaatgcaacggcacacacatttgtaaaagaaacattacaaaagctcaaaacacacattgaacctcacacaataatagtgggaaacttcaacatggaagtcccagaagtaaaaccacacacctacgtacacttgatctttgacaaagaaacaaaaaatatacagtagaaaaaaaaaaaaaaacacggccccttggtattgcaaactttacatgccccagtacaggggaatgccagggccaagaatcgggagtgggtggataggggagcagggcggagtgggggtatagggaactttcgggatagcatttgaaatgtatataaagaaaatatctaataaaaaagaaaaaaagaaaagaaaaaaacccacatctttaataaatgtgctagtccacctggcggtctgtatgtaggagaatgaaagtagacccatttttacctccctgcataaagctcaagtccaagtggatcagaacctcaacagattcactgaatctaatagaagagaatgtgagaaagagccttgaatgatttgggacaagagacaacttcctttctgaaaagaacatcaatggcttaggcgctaaggccaagaattggtaaatgggacctcaagaaactgaaaagctcctgtaaggcaaaatacaccattaatagataaattcatgatgtctttgtttttattatctgaatagtactccattgcatagctttaccacattttctttatccgttctttggttgagggacacctaggttgttttcagtttctggctattataaataaggctgctatgaacatagatgaacaagggtctttgtgagatggtggggcatcttctgggtatatgcccaagagtggtatagttgggtcctcaggtaatactatgtccaattgtatgaggaactgccagactgatttccagagtggttgtaccagcttgcaatcccaccagcaatggaggaatgttcctcttcttccacatcctcaccaacatctgctgtcacttgaatttttgatcttagccattctgactggtatgaagtgaaatcttagggtcatcttgatttgcatttccttgatgactaaggatattgaacaattgaagtgtttctgagccatttgagattcctcggtatttagctctgtactccactttttaatatggttatttggtcctccggagcctgccttcttgagttctttgtatattttggatattagccctctatgggacgtagggttggtaaatatctttccctaatctgcgggttgccattttgtcttgttgatagtgtcccttgctttaaagaagcatttcaattttatgaagtcccatttgctgattgttgctcttaaagaataagccattggtgttctcttcagtaagttttcccccatgcccaagtatttgaggctcttccccactttctcttctattactttcagtgtttctgattttatgtggaggtctttcatccacttgtacttgagctttgtgcaaggtgataggtatggatcaatttgtattcttctacatgcagatcaccagtagaaccagcaccatttgttgaaaatgctgtttgttttccactgaatggttttagcttctttgtcaaagatcaagtaaccataggtgcgggttcatttctgggtcctcaattcttttccattgatctacttgcctgtttctgtaccaataccatgcagtttttatcactattgctctatcgtatagcttgaggtctgggatggtgattctccagaaatttttttttattgttgagaatagtttttgctaccctaggttttttgttattccaaatgaatttgaggattgctctttctaagtctatgaagaattgagtttaaattttgatggggattgcactgaatctatagattgcttttggtaacatggccatttttactatattgatcctgccaatttctttcttcagagtcttgaagttcttgtcatacagatctttcacttccttagttagagtcacaccaaggtattttatatcatttgaacatttctttaagtgtttcttggccatttgagattcctccgttgagaattccctgtttggctctgagccctatttttaaaattcagttatttgagttgttggtgtctaacttcttgagttctttatgaattttggatattagattaggttgcatttttgtcttagaatcatttttgttccccacttacttctctcctgaatagtaatatagttgtggtcttcctataatcaacatcactttttctgaacataagcagcctaaattctccaacactagatgttacatatttgttgtcatttaggaattcaaatgtttaatcgattgaaatttgctaaccttcatcaaatacagcaaaaagcagtacaaattggtacaacatctgtgttctttctttggagagactgcctgaaagagaagagaaagcatttattgtcaatttaaaatgcccttgtagaaaattgccacaataaggacaaatttcttcacagaccgtttgagtataaaaaatgaaatactttgcctaattttaacttttttctttggtgtaagggcctttaaattggtatttctaaaactattgggagtaaatggttactaatgtaagtttccaatttcttctagaaatttatttatttttttaaataaaaaaccctgaatttctgggaaatggaatttaaagtaaaacaaaacaaaacaaaaaacaaacaaacaaaaaacaaatcaaaataaaacacacaaatggatatgtggatagatatatagataggttttaacaggagaaaataacaaaaatagtaaatattgtcaatgaaatgtgtatatggataattaatgtagggaacttctattgccattataacttttacttatgtaattgcaagtagtaaacattatatgtgaagaaaacaaacaactaaggtcacattttgaaaatttattaatatagtttaaaaattgtgtttatatagtcttatattgtgtgcacatttctatgtgagagcagatgaatttctgtgcccagctttcccccccattctccttgcagcttattttacaaagtaaaagttacttattttaacatagcccacttatacattcccattttaaaatttgttgacagttttatacatgtatgaaatgatgttagtaatttttttcccacaattaccccattctcatcctatgtctgctactgaaaccgttgttcgcaagaagcccgcctccttgaattttcatggcttttttggagtcagatttatatacctttctcctatccacaataataaaaactttctgctatattttgtaaaagttttaaagcattacattttacattttaagactgtcatttgggtccacatgcggaaaagctaccataggtgagctgtgtccatcttctggcccatggccctgtcaaccttcctgaggaggccttcagggccccaagaatatccaggctagatgcctccccaaccaatccccggcctgccaggaccacttggggcacaaccaacagaggtaagctgctcactgtcccctgaccttcatcttattgcacatggctttgcttgccttcctaaagaggcttgtggggtccccaggaatattcaggtccacctgagacacagccagcagaggtgagcagcttgctgttccttgagatccattttcagatataaggcactgcacctgcctcctgaggagacctgctgacataaggaatattcatctaataccaggaacaaccagatggctaaaggacagcataagaacacaatcaacaagggccagggcaatatggcaccaccagaggtcagctatcctgctacatcaatcactgaatatcctaagacacctgaattgaccttaaccctaatacacacacacacacacacacacacacacacacacacacacacaccactcaccaccaacatcaaaataacaggaatttacagctagtcattaacatttctcaacatcaatggaatcaattccccaataaaaagacacaggctaacaaaactgatatgaaaacaggatccttcattttgttgcacacaagaaacacaccccagcaacaaagtcagacgttacctcggagtaaagggctgagaaaagtacagaattctaccagactttcaaagaagagctaataccaatacttctcaaactgttccacaaaatagaaacaaagcaaagattgccaaacttattctatgaagccatagtcattctgatatctgaactacacaaagactcaataaagaaagggaacttcagaccaatttcccttatgaacattgatgcaaaatgctcaataaaatacttgcaaactgaacccaggagtacattaaagacattatgttcatgaatacgtaggattaacatggtgaaaatggccatctcaccaaaaacaagatatagattcaatgcaatacccataaaaattctaacacaatgttttatagactttgaaagagcaatctcaaagtatcgccatttgcagatgaaacgatagtatacataagcgaccccaaaaattctactacagaattcctattgctgataaacaccttcagcaaaggggatagatacaaaattaactaaaaaaaaaatcagtagccttgctttaaacaattgaaaaatggagtgagaaagaaaataaggagacaatacccttcattatagctataaataatataaaatatcttgctgtaactctggccaagcaagtcaacgacttgtatgacaaaaacatcaagtctctgaagacataaattaataaagatatcagaagatggaaagatctcccatgctcatggatgggtaggattaacatagtagaaatggtcatcttaccgaaagcaatctacagattcaatgcaattcccatcaaaatttcaacatatttctttacagaccttgaaggagccatgcacaaattcatattgaaaaacaaaaactcaaggatagctaattttttaattgtacaattccatacaataaaataacttctgtattcttttattaactatctggagctatcaccatccctgatttcaagctgtactatggagtaatggcaattcaaaccacatgctattggcataaaaacggacaggttgatcaatgaaaaagcatttaagatccagaaataacctcatatacccatggacagttgatttttgacaaagaagccaataccatacactggaaaaagaaatcatcttcaagaaatggttccagtctaactgtaggtctgcatgtagaagaaagcaaataaactcatatctatcacactacacaaaactcaaatccaagtggatcaaagacctcaacataaaagcagatacactcaatctaatagaaaagaaagtggcaaactgggttgaatacactgttacagaagacaccttcctaaacttaacaccagtagctcaggcactaaggtcaacaattaataaactggacttcatgaaactgaaaaccttctgtaaggataaatacaccatcaataggacaaaatgtcagcctcttgattaggaaaagatattcatcaaccctacatctatcaaaggactactatccaaatatataaagaacacaggaaattatacaacaacaacaacaaaccaaataatccatttttttaaaatggggtacagaattaaacagaattctcagtagaggaacctctaatgtctgagaaccacttaagaggggaatatgattaggtatttggggggagaggcaggacagaagccctgagggggccagcagaaaaatggaaacaggcaaccatgggaggtaggaggtgggtggaccctctagaatgtgccagagacctggaaggtgagagactcttaggactcaaagggagggaccttagatgaaatgccctaaagtgaggaaagggaacttgtagagaccacctccaatagaaagacagggcatcaactggagggatgggattgccatctcagagccaaaaactctgacctagaattgttcctgtctgaaagaacagcaggggcaaaaatggagaagaaactgaggaaaaggaagtccagtgataggcccaaattgggatccaactcagggggaggccccaaggcctgacactaatactgatgctatggtgtgcttacaaacaggggcctatcatgactctcctcaggaagacccaacaagcagctaagagtcagatgcagatatttacacccaagcaatggatagaagctggtgacccctgtagttgaattaggaaaaagatggaggaagtttgaggtggaggttgaccctatatgaagaccagcattctcaactaacttagactcccgggacctctcagacactggcccaccaaccaggtgatatgaggcctccaacacatatacagcagaggaaatctgtgtctggactcagtgagagaaggtgcacctaacccccaagatacttgaagtcccagggagtgagtcagtctgatggggtgggcgtgggaggacatcttcttggagactggggccaggggtggtgggaaggaggtataggatatagaacagtcagagggcagactgggaaggggataaagactggactataaaaaaagactaaagaataataaaaaagaaacaaaagaacctagatgtccctcaactgaagaatggatacagaaaatgtggttcatttacatgatggaatactactcagcttttaagaatgaggacatccagagttttgcagataaatagatggaactataaaatatcaccctaactgaggtaacttagatctagaaagacaggcatgtatgtactcaattttaagtggctattgccataaagtataggataaccctgctacaatgcacagaccctaggaacctaagtgatagggaaagctgaaatgaggatgaatgaatctcactcagaaagggatataaaatagacattggaggtggaaggaggaagggaactgggtgatagagcaggtggggaggagacctggggtggagctcagacatgggggagtcaggtgagggctgggaaaaagaacagaaatggggggcatctgtaggatgagctggagacgtgggacaggggatgctttcaggaatctatggcagagaactagctgaaactcctagcagttgggaaattggagactgatgtggtcatttcctgtactcaagggagacttccagaagagtgataaggacaccaacccacctatatatcttcaactcaaaatttgtcctgctcacaagatatatagggataaagttggagcagaaattgagggattggccagccaatgtctggcccaacttgagatccatcccataggagaaagtcaacccctgacactactaatgacactctgctatgcttgtagacaggactagcataagtgtcttctgagaggcttcattcagtagctgatggaaacagatgcagagacccacagccaaccatcaggcagactttgtggaaacttgtggaagagtcaggggaaggattgagggaactggagtggtcaaggacactacaaaaagacttacagagccaactaacctaggcccatggggtctcatggagactgaaccatcaaccaaaaagcacgcatggactggacctaggtcccccaggacatatgtagcatatgtgtaggttggtcatcatgtaggtcccctaaccattagagcaggggctgtctctaattctgttgcctgcctctggctctccttcctctagctggactgtcttgtctggcctcagtgggataggatgagtttactcctgctgtggcttgatatgccagggagggttgatacttatgggagggtgggacaggaaggacaggaggggtctacggtcgagatataaagtgaataaagaaataaaaaagactaatatcttgtgaattaatacctgtataaggagtatggtttaggttctggttcatttttttgtgtatggctatctagttattctaacaccatttatagaagttcccctttctccattgattgtattttataccaatccattttggcatattttttgtagatctattttatctattctgtttcataacttttgacaaatgtgtcataatagtgtagctgtacagaaagttataccaatccattttggcatatttttttgtagatctactctcctatctattctgtttcataacttttgacaaatgtgtcataatagtgtagctgtatagaaagttataaatttgggttgagtgattaataaactattcttttgcaaaatatattcaactaacttagcaattgaccttctgtaaaagttttagagtcaatttgtgtatattaacaaaagctatacttaagctaatgtacacatgtaattgcattatatgtgtacattggggagaacaaatatcgttagtatgttgaatcttttagcccactgttacaatttgttttctattgctatgatatacacaatgatcaaaagtaggtagggtagtcagcttacagttgtagtccatcactgaagaaagtcagggcaggaactcaaggcaaaatacatcgaggcagaaactgaaacaggcagcagcatagaagaacagtgcatactggcttgatccctataccttgtgcagccactttcccatagcacctaggaccaccaggggttgtaccacacacaatgggttaggtcctcccatattaatctttaatcaagaaaatgctctacagtccatccttatgaaggcattttctctattgtgcttccttctcttgtatgaccctagttcatctcaagttgacaaaaaaaactaatcagtatatccaatgagagcatagtgtgtttcttctcttgagtcttcttgatttctttcacctatattttgtggttttgattttacatgcaattacatgttttgttttgttaaggttttatatttttgattctaattattctttgatagtctgttgaatacaactgatttttatgttgatcttgagtcctgcaaatcgcctatactgttatttatagtagttttatttaaaaattctcttggacttttatacatgatcaactatgttttctaaaaatgttttatgacaatgaaattgcaatttatgtttaatattatgttagtggaagacttccaatgttttatcaagtaagaatagagagtattgttccaagtcttaatgtgaaaacatttagtttttcatcactgtaagattaactgtatattgctgctgcttttttagaatttcatttgagacaaggttcatgtattttaggctggccttgaacttgctgtgtcataaggatgccacctattcctgatctgcctgcttctaccttctgaatattgggcttataggaatgcaacagcactcctggtttaacctggagttttttgggatttttttttaaaaagatattttcagattaagaagtttctttctaggtccccacaggacactccatgggatcttgggacctctggtgagtggaacacaactgctgctccaatccaatcgtgtgggacccgagacaggattacgtagggaaacagaaaacccggcctgaccagggtcacaagtcccttccggtcggtgccagcaccaacacaccttgggcgcagagtcggcggaaacccccaaagtccccagaggactttccacgggatcttaggaactctgatgagtggaatacaacttctgccaggaggcaggtccgaacaccagatatctgggcaccttccctgaaggaggagagcttgcctgcagagagtactctgaccactgaaactcagaagagagctagtctcccaggtctgctgatagaggctaacagaatcactggaggaacaagctctaaccagagacaactataacaactaactccagagattaccagatggcgaaaggcaaactgaagaatcttactaacagaaaccaagaacactcaacatcatcagaacgcagcactcccaccccacaaagtcctgggcaccccaacatactggaaaagttagacccggatttaaaagcatatctcatgatgatggtagaggacataaagaaggaatttaataactcacttaaagaaatgcaggagaacactgctaaacaggtagaagaccttaaagaggaagcacaaaaatcccttaaagaattgcaggaaaacacgaccaaacaggtgatagaattgaataaaaccatccaagacctaaaaaggggagtagacacaaaagaaaacacaaagtgagtcaacgctggagatagaaaccctaggaaagaaatctggaaccatggatgcaagcatcagcaatagaatacaagagatggaagaaagaatctcaggtgaagatgattccatagagaacatcagcacaacaatcaaagaaaatgggaaatgcaaaaagatcctaactcaaaacatgcaggaaatccaggacacaatgagatgaccaaacctatggataataggagtagatgagaatgaagattttcaacttaaagggccagcaaatatcttcaacaaaattatagaagaaaacttcccaaacctaaagaaagacatgcccatgaacatacaagaagtctacagaactccaaatagattggaacagaaaagaaattcctcctgacacataataatcagaacaacaaatgcactaaataaagatagaatattaaaagcagtaagtgaaaaaggtcaagtaaaatataaaggcaggcctattagaattacaccagacttttcaacagagactatgaaagccagaagatgttatacagacactaagagaacacaaacgccagcccaggctactatacccatccaaactctcaattaccatagatggagaaaccaaagtatttcatgacaaaaccaaatttacacattatctgtccacgaatcaagtccttcaaagattaataacagaaaaaaacaatacaagaacgaaaatgatgccctagaaaaagcaagaaagtaatccttcaaaaaccaaaaagaagacagccacaataacagaatgccaactctaacaacaaaaataataggaggcaacaattacttttccttaatatctcttaatatcaatggactcaattcccccaataaaaagacatagtccagtagactggctacacaaacaggacccaacattttgctgcttacaggaaacccatctcagggaaaaagacagacactacctcagagtgaaagactggaaaacaattttccaagcaaatggtctgaagaaacaagctggagtagccattctaatatcgaataaaatcgacttccaacacaaagttatcaaaaaagacaaggagggacacttgatactcatcaaagggaaaatcctccaagaggaactctcaattctgaatatctatgctccaaatgcaagggcagccacattcattaaagaaactttagtaaagctcaaagcacacattgcacctcacacaataatagtgggagacttcaacaccccactttcatcaatggacagatcgtggaaacagaaactaaacagggacacagtggaactaacagaagttatgaaacaaatggacttaacagatatctacagaacattttatcctaaaacaaaaggatataccttcttctcagcacctcatggtaccttctccaaaattgaccatataattggtcacaaaacaggcctcaacagatacaaaaatattgaaattgtcccatgcatcctatcagaccaccatggactaaggctgatcttcaataacagcataaataatgaaaagccaacattcacgtggaaactgaacaacactcttctcaatgataccttggtcaaggcaggaataaagaaagaaattaaagacttcttagagcttaatgaaaatgaaccaacaacatatccaaacttatgggacacaatgaaagcacttctaatagggaaactcatagctctgattgcctccaaaaagaaactagagagagcacacactagcagcttgacaacacacctaaaagctctagaaaaaaaggaagcaagaggagtagactgtaggaaataatcaaactcaagggtgaaatcaaccaagtggaaacaagaagaaccattcaaagaatcaaccaaatgaggagctggtactttgagaaaatcaacaagatagatacacctttagccatactcactagagggcacagggacagcatcctaagtaacaaaatcagaaatgaaaagggagacataacaacagatcctgaagaaatccaaaacaccatcagatccttctacaaaagtctatactcaacaaaactgaaaaacctggatgaaatggacaaatttctagacaggtaccaggtaccaaagttaaatcaggatcaagttaatgatctaaacagtcctatattccctaaggaaatagaatcagtcattacttgtctcccaaccaaaaaaagcccaggaccagatgggtttagtgcagagttctatcagaccttcaaagaagatctaattccagttcttaacaaactattccataaaatagaagcagaaggtactctacccaactcattccatgaagccacaattactctgatacttaaaccacacaaatatccaacaaagttagagaacttcagactaatttcccttatgattatcaatgcaaaaatactcaataaaattctcgctaactgaatccaaaaacacatcaaaaaaatcatccaccctgaccaagtaggttttattccagggatgcagggatggtttaacatacggaaaatcatcaacgtaatccattatataaacaaactcaaagacaaaaaccacatgatcatctccttagattcggagaaagcatttgacaaaatccaacacccattcatgataaaagtcttgggatgatcaggaattcaaggcccatacctaaagatgataaaagcaatctacagcaaaccagtagccaacatcaaagtaaatggtgagaagctggaagcaatcccactaaaatcagggactagacaaggctgcccactttctccctacctattcaacattgtacatgaagtcctagcagaggaattcgacaacaaaaggggatcaaagggataaaaattggaaaggaaaaagtcaaaatatcactttttgcagatgttatgatagtatatataagtgaccctaaaaattccaccagagaactcctaaacctgataaacagcttcggtgaagtagctggatataaacttactggtttgctgtaaattgcttttatcatgtttaggtatgggacttgaatttctgatctttccaagacttttatcatgaatgggtgttggattttgtcaaatgctttctccgaatctatggagatgatcatgtggcttttgtctttgagtttgtttatgtaatgtatcacgttgatggatatccgtatattaaaccatccctgcgtccctggaataaaacctactggttcaggatggatgattgttttaatgtgttcttggattcggttagcgatgattttattgagtatttttgcattgatattcataagggaaattggtcttaagttctctatctttgttggatatttgtttggtttaggtatcagagcaattgtggcttcatagaatgagttgggtagagtaccttctgcttctattttgtggaatagtttgtgaagaactggaattaggtcttctttgaaggtctgatagaactctgcactaaacccatttggtcctgggctttttttggttgggagacaagtaatgactgattctatttctttaggggatataggactgtttagatcattaacttgatcctgatttaactttggtacctggtacctgtctagaaatttgtccatttcatccaggtttttcagttttgttgagtatagacttttgtagaaggatctgatggtgttttggatttcttcaggatctgttgttatgtctcccttttcatttctgattttgttacttaggatgctgtccctgtgccctctagtgagtatggctaaaggtgtatctatcttgttgattttctcaaagaaccagctcctcatttggttgattctttgaatggttcttcttgtatccacttggttgatttcgcccctgagtttgattatttcctgccctttacttctcttgggtgaatttgattcctttttttctagagcttttaggtgtgttgtcaagctgctagtgtgtgctctctctagtttctttttggaggcaatcagagctatgagtttccctcttagtaatgctttcattgtatcccataagtatgggtatgttgtggtttcattttcattaaattctaagaagtctttaatttctttctttattcctgccttgaccaaggtatcattgaaaagtgtgttgttcagtttccacgtgagtgttggctttctattatttatgttgttaatgaagatcagccttagtccgtggtgatctcatagggtgcatgggacaatttcaatatttttgtatctgttgaggcctgctttgtgaccaattatatggtcagttttggagaaggtatcatgaggtgctgagaagaaggtatatccttttgttttaggataaaatgttctgtatatatctgttaaatccatttgtttcagcagttattctgttagtttcactgtgtccctgtttagtttctgtttccacgatctgtccattgatgaaagttgtgtgttgaagtatcccactattattgtgtgaggtgcaatgtgtgctttgagcttcaataagttttttttttttaatgaatgtggctgcccttgtatttggatcatagatattcagaattgagagttcctcttggaagattttatctttgatgagtatgaagtgtcccttcttgtctttttttttttttttttttgataactttgggttggaagtcgattttattcgatattagaatggctacaccagcttgtttcttcagaccatttgcttggaaaattgttttccagtctttcactctgaggtagtgtctgtctttttccctgagatggatttcctctaagcagcaaaatgttgggtcctgtttgtgtagccagtctcttagtctatgtctttttattgggggaattgagtccattgatattaagagatattaaggaaaagtaattgttgcttcctgttattttttgttgttagagttagcattctgttcttgtggctgtcctcttttaggtttgttgaaggattactttcttgctttttctcgggcgtggtttctgtccttgtattggttttttgctgttattatcctttgaagggctggatttgtggaaagataatgtgtgaatttggttttgtcgtggaatactttggtttctccatctatggtaattgagagtttggctgggtatagtagcctgggctggcatttgtgttctcttagtgtcagtataacatctgtccaggctcttctggctttcatagtctctgttgaaaagtctggtgtaattctgataggcctgcctttatatgttacttgacctttttcccttactgcttttaatattctatctttatttagtgcatttgttgttctgattattatgtgtcaggaggaatttcttttctggtccagtctatttggagttctgtaggcttcttgtatgttcatggacatctctttctttagatttgggaagttttcttctataattttgttgaagatatttgctggccctttacgttgaaaatcttcattctcatctactcctattatccataggtttggtcatctcattgtgtcctggatttcctgaatgttttgagttaggatctttttgcattttccattgtctttcattgttgtgctgatgttctctatggaatcttctgcatctgagattctctcttccatctcttgtattctgttgctgatgctcacatctatggttccagatttctttcctagggtttctatctccagcgttgactcactttgtgttttctttattgtgtctacttccctttttaggtctagtatggttttgtccatttccatcacctgtttagatgtgttttcctgtttttctttaaggacttctacctgtttggttgtgttttcctgtttttctttaaggacttgtaactctttagcagtgttctcctgtatttctttaagtgagttattaaattccgtcttgatgtcctccaccatcattatgagatatgcttttaaatccgggtctatcttttcgggtgtgttggggtgcccaggactggctgaggtgggagtgctgggttctgatgatggtgagtggtcttggtttctgttagtaagattcttacatttgcctttcaccatctggtattctctggagttagttgttatagttgtctctggttagagcttgttcctcttgtgattttgttagcctctatcagcagacctgggagactagctctctcctcagtgtcagtggtcagagcactctctgcaggctcgctctcctcttgtagggaaggtgcccagatatctcacgtttggacctgcctcctggcagaagttgtgttccactcaccagaggtcctaagatcgcatggagagtcctctagggactttgggggtgtctgctgactctgcgcccaaggtgacccagtgctggtgccgaccagaaggtgaaatatattttttgtagataaaatataaaagttttttgttttcatatacagtatgatagtttttggttttactatatttagataattacttatttttagacctaaatttatcatcattttatacttttttgtgcatttttgttcctttttctctttttatgcctcattttaatgtcttaatttctctattttaattttattatatatttttatataatattttattggttcttctcggcattaaaactgcatacttacgcttttactgtcttttacataagtatatgtgaattgaaggcaaattgagattttataaatatatttatggttgtgagagatctttccatatatatatatatatatatatatatatatatatatatatatataattttattttatttatccacaaagaaaaagaataaaattacgtcataatcaagtaattataaaccttagtcttcttcccctcttctgaaactcattattattcagaaacgatacattttagattctttgtctatcctcctacaatggatgagttttaattatatgacataatagaatgaaacagaagtgattagaagttgtagtgcagcttccaatggacaatataaaccatttatatggctcttaagaccatataaaatgtctagctcttctttattgcctaagctgaagacatcaagtagagatgatctcagttaagtcttctaatcatagatttaagtcatatgaaatacctttgaggtgatatcatctctgaccactgttttgactataaatcatgcattcatagacagttccaaattccatgacactcaagaaaaccatgagaaataacatattattttgtttcattccaccaaattatgtaattattgaacaatagataactcaaagagttataatgaagctgattttccacacaaaataattaaaataaaattataataaatttacttctttataagtttatggtattaaactataaattaaatagcagataaacaagattatctttagaataacaaaatatgagtaaatggagatttctcagatttgtgtatgtcatttgctgacaaagtacacacttgaattagttaatatgtcactgttcacacacacaaatgcgttttcctccatgaaacttttaaagccaagtttttgaaaagcaaaggagagaagaaaccctgctgagatagcccaccgatttcaggtgaaatgcagcaattatttggaaacagagatcttattgtagatcttggatattctaaaactagtgttcacttggattatgtaggatggatatcactgccttcaaaagtggattattctcctttctgtgagtataattccagggaaaagaagcccttttcagaacaaagagttcaaagactcacagttatcaatggattctgttgtttttgtcttcctctgtcttatctcaattccattttttagtataattaccttctttacatactagcagagctccaatgaggcctgaattcaaatctttcaccagatccacatgagacatatatgagtaagtgagacatggagggtcagaggccattggaccattctctttcaggacttgccaaacataagtatgactttcaccagggaaaactttatcatcttccttctccatttggcttgtctgatcttcatattcatctcctaaaaaaagaaggtataaaattgctctttttgtttctattacctataaattttgcttttatttcctctgataaagagataagatgagaaccatatactaaagctgtgtgaatacatggcttaggcagagcccgaacatttctttccctgttctaactacccctagacttagttctggaagcttctagcctctgtacaatctatcttccagactgactgattcgttctaactacccctagacttagttctggaagcttctagcctctgtacaatctatcttccagactgattcaatctggcttctcttagcttctcattaaattgttgtacttagcttcatactaactttggtaatatgttctaatcttctgcctccttactattgtctaatgcattctgtcttcacctgtgtattgcttattctctctgcaacctgcatctgtaaaactgttctagcaaaactgccatacacacacaccacccagttctctctcattacctttgagtagcctctatttcctttctgttctaatgtgagttgggcatatcctatatctgacatattcagttaaatctttctctgattcatcagttggactgccctgcaattagacatcacattcaaacatggttgctttcttttaaaaataacctcaacttcattgttaggaattaaatgtatgtactaagggtgtgtctgtattctagccacaccatactgtaatccagggcatgtttgcattctagctggatagtatctttggatactccttgccagagcaactgtgttcctggattaaaattcttctacaactttcctctttctttttttttttaaatatttttattattatgtattttcctcaattacatttagaatgctatccccaaagtcccccataccctccccaccacttccctacccacccattcccattttttggccctggcattcccctgtactggggcatataaagtttgcctgtccaatgggcctctctttccagtgatggccgactaggccatcttttgatacatatgcagctagagtcaagagctctggggtactggttagttcataatgttgttgcacctacagggttgcagatctctttagctccttggatatgttctctagctcctccactgggggccctgtgatccatccaatagctgactgtgagcatccacttctgtgtttgctaggccccggcctagtctcacaagagacagctatatcagggtcctttcatccaacgcttgctagtgtatacaatggtgtcatcgtttggaggctaattatgggatggatccctggatatggcagtctctagatggtccatccttttgtctcagctccaactttcacctctcctttaatttgtttacttccttgaacataggattcagttgtattctacttcctggtgcccctttattctttgaactatacattctgtattttttctttttaagcatcctatgcttggtaaaaatgctcttcataagactgaaccacaggataaagtctacactaggcttttttaaaacttcttttgtcaatacaattaatctgaatatttactttagacaagggcaaaaagcagccacattattctctaaaatatcataagaacagtctctagaccacatactaaaattcttctcctttgaaaactctttagccaggctctcatggttcaaatcaccctcagcaccaatgggttccttaattctaataggatggcccattaaggccccaattaaagcattctacctttttccaaatccaaagtccccaaatccacattcttccaaacaaaaaatatggtcaggcctatcacagcaatactgcactcctggtaccaatttctgtcttagttatgtttccattactgtgaaaaggcatcatcaccaaggcaactcttttaagagacaacatttaattaggcctagcttacacattcaggagggggttagtgagcaggatataaaatgaatacgtaaaaaaattaaattaaattttaaaaatgtataagtttattatggtctctatgtattagtcataaaatattggcttataaattatgatgtatggttaaaatctgtaatattgataacagaaagttggtgtaaaaataaatgactaagggttaaagccattttgggcaacaacacatggctgagccaaacaggtctctaagaatacttttaaattaggataatatttttatgtaattcctatcctaaaaaccagacttataaaagataaagtttaaaacaatgtttcttaattgacacattaaaactgcatcttcatgcattcatatacaagaaattttcttgctgacagccaaactttgtaatattagaacaatatatttggtattttacagacactagattggtaaacagttaaaatgtagttttgtggagagagagatggctcagcaggtaagagcaatgactgatcttccaaaggtcttgagttcaaatcccagcaaccacataatggctcacaaccactcataatgtgatctgacaccctcttctggtgcgtctgaagtcagctacagtgtatttatgtataataataaataaatatatcttaaaataaacaaaaagaaaacaaaatggaggtaaacctggaaaaggaaacctaggaaagaggtcaggaattacagatgtaagtatcaccaacagaatacaagagatagaagagagaatctcaggtgtaaaagaaactgtagaagagattgacacatgtgtcaaagaaaattcaaaacataaaaaactcctaacccaaagcatacaagaaatgcagaacacaatgaaaagaccaaatataagaaaaactggattagaagagaatgaagattctcagttcaaaggacctgaaaatgtcttcaacaaaatcaaagaagaaaacttcccaattagggaaacaacacccttctcaatagtcacaaatagtataaaatatcttggcgtaactctaactaaggaggtgaaagatctgtatgataaaaacttcaaatctctgaagaaagaaattaaagaagatctcagaagatggaaagatctcccatgctcatggattggcaggatcaacattgtaaaaatgtctatcttgccaaaagcaatctacagattcaatgcaatccccatcaaaattccaactcaattcttcaacgaattagaaggagcaatttgcaaattcatctggaataacaaaaaaacctaggatagcaaaaactcttctcaaggataaaagaacctctggtggaatcaccatgcctgacctaaagctttactacagagcaattgtgataaaaactgcatggtactggtatagaaacagacaagtagaccaatggaatagaattgaagacccagaaatgaacccacacacctatggtcacttgatcttcgacaagggagctaaaaccatccagtggaagaaagacagcattttcaacaattggtgctggcacaactggctgttatcgtgtagaagaatgcgaatcgatccatacttatctccttgtactaaggtcaaatctaagtggatcaaggaacttcacataaaaccagagacactgaaacttatagaggagaaagtggggaaaagccttgaagatatgggcacaggggaaaaattcctgaacagaacagcaatggcttgtgctgtaagatcgagaatcgacaaatgggacctaatgaaactccaaagtttctgcaaggcaaaagacaccgtcaataagacaaaaagaccaccaacagattgggaaaggatctttacctatcctaaatcagataggagactaatatccaacatatataaagaactcaagaaggtggacttcagaaaatcaaataaccccattaaaaaatggggctcagaactgaacaaagaattctcacctgaggaataccgaatggctgagaagcacctgaaaaaatgttcaacatccttaatcatcagggaaatgcaaatcaaaacaaccctgagattccacctcacaccagtcagaatggctaagatcaaaaattcaggtgacagcagatgctggcgaggatgtggagaaagaggaacactcctccattgttggtgggagtgcaggcttgtacaaccactctggaaatcagtctggcggttcctcagaaaactggacatagtactaccggaggatccagcaatacctctcctgggcatatatccagaagatgccccaacaggtaagaaggacacatgctccactatgttcatagcagccttatttataatagccagaagctggaaagaacctagatgcccctcaacagaggaatggatacagaaaatgtggtacatctacacaatggagtactactcagctattaaaaagaatgaatttatgaaattcctagccaaatggatggacctggagggcatcatcctgagtgaggtaacacattcacaaagaaactcacacaatatgtattcactgataagtggatcttagccccaaacctaggatacccaagatataaggtacaatttgctaaacacatgaaactcaagaagaatgaagactgaagtgtggacactatgcccctccttagaattgggaacaaaacacccatggaaggagttacagagacaaagtttggagctgagatgaaaggatggaccatgtagagactgccatagccagggatccaccccataatcagcatccaaacgctgacaccattgcatacactagcaagattttattgaaaggacgcagatgtagctgtctcttgtgagactatgccggggcccagcaaacacagaagtggatgctcacagtcagctaatggatggatcatagggctcccaatggaggagctagagaaagtagccaaggagctaaagggatctgcaaccctataggtggaataacattatgagctaaccagtaccccggagctcttgactctagctgcatatatatcaaaagatggcctagtcggccatcactggaaagagaggcccattggacttgcaaactttatatgccccagtacaggggaataccagggccaaaaagggggagtgggtgggcaggggagtgggggtgggtggatatgggggacttttggtatagcattggaaatgtaaatgagttaaatacctaataaaaaatggaaaaaaaaataaataaaaataaaaaaaaaaaaaaaaaagaactcaagaaggtagacttcagaaaatcgaacaaccccattaaaaaatggggctcagaactgaacaaagaattctcacctgaggaatactgaatggcagagaagcacctgaaaaaatgttcaacatccttaatcatcagggaaatgcaaatcaaaacaaccctgagattccacctcacaccagtcagaatggctaagatcaaaaattcaggtgacagcagatgctggcgtggatgtggagaaagaggaacactcctccatttttggtgggattgcaggcttatacaaccactctggaaatcagtctggcggttcctcagaaaattggacatagtactaccggaggatccagcaatacctcttctgggcatatatccagaagatgccccaactggtaagaaggacacatgctccactatgttcatagcagccttatttataatagccagaagctggaaagaacccagatgcccctcaacagaggaatggatacagaaaatgtggtacatctacacaatggagtactactcagctattaaaaagaatgaatttatgaaattcctagccaaatggatggacctggagggcatcatcctgagtgaggtaacacattcacaaagaaactcacacaatatgtattcactgataagtggatcttagccccaaacctaggatacccaagatataagatataatttgctaaacacatgaaactcaaggagaatgaagactgaagtgtggacactatgcccctccttagatttgggaacaaaacacccatggaaggagttacagagacggagtttggagctgagatgaaaggatggaccatgtagagactgccatagccagggatccaccccataatcagcatccaaacgctgacaccattgcatacactagcaagattttattgaaaggacgcagatgtagctgtctcttgtgagactatgccggggcccagcaaacacagaagtggatgctcacagtcagctaatggatggatcatagggctcccaatggaggagctagagaaagtagccaaggagctaaagggatctgcaaccctataggtggaataacattatgagctaaccagtaccccggagctcttgactctagctgcatatatatcaaaagatggcctagtcggccatcactggaaagagaggcccattggacttgcaaactttatatgccccagtacaggggaataccagggccaaaaagggggagtgggtgggcaggggagtgggggtgggtggatatgggggacttttggtatagcattggaaatgtaaatgagttaaatacctaataaaaaatggaaaaaaaaataaataaaaataaaaaaaaaaaaaaaaaagaactcaagaaggtagacttcagaaaatcgaacaaccccattaaaaaatggggctcagaactgaacaaagaattctcacctgaggaatactgaatggcagagaagcacctgaaaaaatgttcaacatccttaatcatcagggaaatgcaaatcaaaacaaccctgagattccacctcacaccagtcagaatggctaagatcaaaaattcaggtgacagcagatgctggcgtggatgtggagaaagaggaacactcctccatttttggtgggattgcaggcttatacaaccactctggaaatcagtctggcggttcctcagaaaattggacatagtactaccggaggatccagcaatacctcttctgggcatatatccagaagatgccccaactggtaagaaggacacatgctccactatgttcatagcagccttatttataatagccagaagctggaaagaacccagatgcccctcaacagaggaatggatacagaaaatgtggtacatctacacaatggagtactactcagctattaaaaagaatgaatttatgaaattcctagccaaatggatggacctggagggcatcatcctgagtgaggtaacacattcacaaaggaactcacacaatatgtactcactgataagtggatattagccccaaacctaggattcccaagatataaggtacaatttgctaaacacatgaaactcaagaagaatgaagactgaagtgtggacactatgcccctccttagaattgggaacaaaacacccatggaaggagttacagagacaaagtttggagctgagatgaaaggatggaccatgtagagactgccatagccagggatccaccccataatcagcatccaaacgctgacaccattgcataccctagcatgattttattgaaaggacccagatgtagctatctcttgtgagactatgccggggcctagcaaacacagaagtggatgctcacagtcagctaatggatggatcacagggctcccaatggaggagctagagaaagaacccaaggagctaaagggatctgcaaccctataggtggaacaacattatgaactaagcagtaccccggagctcttgactctagctgcatatgtatcaaaagatggcctagtcggccatcactggaaagagaggcccattggacaggcaaactttgtatgccccagtacaggggaacgccagggccaaaaagggggagtgggtgggtaggggagtgggggtgggtgggtatgggggacttttggtatagcattggaaatgtaaatgagctaaatacctaataaaaaatggaaaaaaaagttctttaaaaaggaaaaaaaatggttcctaaacagttacagctgggtttaatataatatatatatatatatatatatatatatatatatatatatatatatatatacatacctgtattgtaagtcgttatttctagttatagaagaaaagattgtgggtcttaacacaacttagtcatttagataagtgtgggatttacagtttaacaaggaaagtcatgtctaatgagtagaaaatactttgtgaaatagctcccaattaaattaggctgcttgtcctagtcattaaaattcagataatgagcttggataatagggagaccaaatcctatcagacagcaaattgagaaacttagctacaatgctaattctaacactaataaatacttttaccccaaaaatacatgttgcaaatggactggataaaagaatatcatacatgttttctgatattctttaaagccattccttcctttccctattatttccctgttatataccatactatgcaatggaaaagtaggatttaactatgtcaaaaattgtaagactgcaccaacagaaaatagttaataaataaaaatttaaatgtcaaaaaaaaaaaccttccccaacctacaggaatagatggccataaaggtacaagaagcctatagaacaccaaataaatgggaccagaaaagaaaatcctctcatcacataataatcaaaacactaaatgcacagaataaagaaaaatattaaaagcttcaagggaaaatggtcaagtaacataaataggtagacctatcagaattacaccagacttctcaacagagattatgaaagccagaagagcctgatcagaggtcatgcagactctaagaaaacacaaatgccaacccagtatactatacccagcaaaactctcaatcaacatagatggagaaaccaaaattttgttttccagaaaaaaaccaaattcaaacagtatctatctatctatctatctatctatctatctatatatctatctatctatctatctatccagccatacagaggatcctagaaggaaaactccaacaaaaggtaggtatttgcaccaaagaaaggacaagatattaagcatcttacaacaaaaccaaaaaggagagaaccacaagcacataaagtcacctacaaaaacaaacatatcaagaagcaacagtcatctctctttaatatctcttaatattaaagagtcttctcatattccacctctttcattaggaaattccaaagagtaggaagtttgtttgctatttggccacattagtttgaaaattcccaagttaagacctttccacttcagaatgacaacttataggtgtgatttattttattttatttcattttatttattattatatctatgtacactgtagctgtcttcagacacaccagaagagggcgtcacatctcattatggatggttgtgagccatcatgtggttgcggggatttgaacttaggaccttctgaagattaatcagtgctcttaactgctgagccatctctccagcccagacaacttagggtatataatatagactatgtgttccaataatttactaatgatttcctttatttgtaaatgctatagactattttgacagtattggagtcaactggcaacccattcacctctttcctatattatgaggttaagcagaaactagctagagtggagcccatggtcaaatatgttattttaatgacctcatcttaatctgctaaacagctattagcatgtgataataaggagatgaggaactattaaaagtcctttccttaaaaatcaaattcatcttcatttgatgagacataatctcccctagaaaattatttgggcaaaggatggctgacatgataggttttttaggattctcagcctgattccacaagggagaacacaggggcttagaataaaaatagcagcattccacccactcccactttccaagacatttctcattgggaggagggtcacaagaaatccaccaagtaataatttgactttgtcctaaaagttacagggttatctggtaatagtagatcttttctcaaaaatttcaaagtcctaaaggagggaacttttttcctttggcatagcttagttaggcaagatactcacctctaggccaatcaactacaaccaaaagacagcattaatagataaactgttcatctctggaccaacactgtgaccacagaggatcagacttttaaaaagtggcacatcctgtttgaaatatatttagaaggggcattaaaaaaaaagatgtctgtatttattttatgtatgtgagtacactgtcactcttctttagataaaccagaagagggcatcaaatcacattatagatggttgtgagccaacatgtggttgctgggaattgaactcagtgctcttaacagccgagccatctctccagccctgaaggggcatttttttttaatataggatctcactttatagctcaggttggcctataatttatagtgatcctcctgagtgctgaaattagaggtgtgtactataaatctttattagcaatgctttggtgcttccatggtcccaatgtaaaaaataaaacatgttagacaagtattctatcactaagctatacttcaggcctcataaaaatatgtctaatgggtgaggaacatataattttaggaagaaaaagcaaatggcgttttttatacttttgttcttatatggaacagtgactacatgctaggtattatgttatatactacggaaacaacaaatgtacacaatgaacctattttgaaatatttacattctagtatctttgaggtacaaactgtaaaactaatatcagaaaccatgaatgatgaatgcctcaattaaagattagtttgcttcttgtgtctttgcctttcttgtgaactccttatataaatttatattagtaaaactctttcttgtgtgacaagaccttttcataggcagataaaataaggttggtgctcctcttccccatatagctcttccatagtttacaatatcaataaatatttttgaaagatatttccttattatcatcaccttatgtaaaaatcaaagcaaatcttgagttttcagtggctttcccataatgttaaagaagtctacccagaaatgacagtaaaagagaaagaaatatagagtgaaattgtgagaaaaaaaatgatgcgaacgtatcacttggacccagccacaccaagtttacttcatggaaatttccagttatataaacaaaattcaacattacctatacaaatccctgcacagtagaacagtgtttcagagtttaagttttagggttggctgggtctacttgtggacctgattccactactggcaagcacatggtcttgaacatataagtaattattgctgatactgttattaaatttgaatacttatatacaaaagaatggatagaattcaaggtatgacattgctatgatttaatcatgtctctcagtttcttatgatggagactttgtcccagtgtaacagtattgagatatttaagaaagaaaggttaattttggctcattgttccaaatgtttacatctatgatcacttattatattatattacatggagtagtcactatagttgatgctcttagaacttagaactattaattaaataatcctctgactttgtaagggatccaactaagtattttattttatagtaatccaaaatggagtaacatgcccttattatcaagaacatacttcttattgttctacaactagaatggcagggcaataggagagaatttgacttaccctcagaagctttccagtaggacacaccaacagcatgaagactgacaggatgagaagccatgtttttaagtgtaatgaccactgtgtcatgaacctcagtccaaatggtaggacctagcaaacctgttaaaataagatatccctcaaaggttacttgaagaatgacataccagaaatcctgtcattataaaagtaagggttaaagtcacagcagaaaaccctatgggtggaacaacattctgaactaaccagtgccgccccggagctcgtgtccctaactgcatatgtatcagaggatggcctagtcagccatcagtggaaagagaggcccattggtcatgcaaactttatatgtctcagtgcaggggaatgccagggccgggaagtgggagtgggtgggtgggggagtgggggggtgtgggggggacttttgggatagcactggagatgtgaatgaagaaagtacctaataataaataaataaagaaataaaaataaaaagatgtcataaaaaaaaaagtcacagcagaagctgatgaacagcagttatgttttccattaacccaagtttagcctcagggttgttctgaggaactatttctgacaaacctttcaatgtattcattaatttaactatctagaagaacagcattaaaagcaaataaaacaaattcaaaagtctcaataaataaataaatttggcatcgtttaataaaatggctgaattaacataaatgattggtagaatagaaaataagattatagaagtatacagggaacataatatgtaggaccttacttatgtgagggggaaaggaaaaaaaagtagaaagatcataggtgattcctatgattgcatctagattatcacaagttagttcatgacacagaaatcaagaagaaattaagagttatagtctgtggatatttttataagatgcctctaaatggtttattgaatgaactaaagacagtggagtaaaactatgaaatacctttgtttttccaagatgacacagtttttaactgtattctgtggaatttctctttcttgaactttgaccaagtctctagtaatcatccagtattaataggtggtaatggttttccttctcaagtggcctccctcccatcttggagtagggaacatactaagaatgtcttacaaataaattctcaaaagtaaatcttatatattagtagccttctttcatacagattgcagaggagtcatgggccaaaggttgatgaaccagtttgtggctactacatgaaaaaaggcttaattctaaagagacagctctttagaattgagagtatttctttcctacaattctcagcaacaattctttttttttctcctgtggtcttttatttgtgttctctgatgatcatttccataaagggtactttaaattgtcctttccatttgcactcagctccttttttaaaaaatttttattaggtattttcctcatttacatttccaatgctatcccaaaagtcccccatacccaccccacccccactcccctacccacccactccccctttttggccctggcattcccctgtactggggcatataaagtttctcagcaacaattctaaggcaggtaataatggtgttactcagtattagaacacttgtttaacatgtgcaaggtcctgggttggatctctaccattgataaaaaacattcctaatgcaaaaaatatcttaagatcatgctacaagtttatttgacatttaagtggagataaacagttgatatttagagaaagagtcaaataaatatagaagtgcagttattagaacatatatgaaaatttaaagctacaaaactgtagaagataaaactggattgaagagggaaagagaaggaaataatccaagaccaagcttgttgaagccaagcagtggagacagaaaatactgccagtttatttccctgaaggtagttaaagatacctggttaaagaatataacctttggtaaccaccctctgtaagtgcagtcctgcctgaggttaaggatccttactaggaaatgcggtgcctagtatcataattagcactcaatattgttttcattacccatccagggtggcctgggcttggcaatgttgaaaagctggtccttgtactctacaaacacagtctttttatacatgatggaggtgttgaatggaaaagatgttgacattctaggaagaaatctggataaagaaaagaaaatgttattcattttgaaggactttgattccacttcaaaaatcagatggaaacccattttttcatcccattctcttctaatatccataaacaaattagaacttgcaaatacatcctgaaatttcttccttttcttccctataattattgattcagatattaccctgcctctccataacaattttctgcatgcaaaagaaagaacaaaagtgaggaaaattcagtaattttttgtgtgtttgtttcaaaactgtaaaatcaaggtcagcttttgctcaagcatttactgcataaatcaagacctttatccatccaaagccataaaagtcacataaagaggaacaaaagctatcagtatttgagcaatgttacttgaaagtattttttgtctaatttggtttggacaatttaatatcagctattgtaaatgtattttttaaagtggcagtatttctctatatccctggctagctcccaaatgaataagactgagacttctacttatttaaacaagctttacagcacaaaaccttgatctattctctagctacctcccagccaaaatccctgagatgcttgcattttattattggtcttgccctttgggtttcaaatgtgttctcccagcatgtaccctctcaccctctccatgtctgaataccccttcttctccctctctccctcccctgaatgtcagaagtcccaccctactctctcctctgcccaaccattagctgatcagcttttattgacaatgcagaaaataaatggtgagtattgtttacacaaacttgaaataggagatatttgggataagcattacaatgccatgtctagattgcaacaaggtgtgggggcagagaaattagcatttgagtaatacaaggataatctttacacagtgcacaaaaagattatgcctacaagctataaatgcataaaaacactaacctctaaacttgggcagagacctgcttataaatctgaaaacttaaatgaaacaagtgcattacatataaaggttaggaacaaggttataagacctcttccactgggggtggagggtaggagaaatagctcagagattaagagcacttgttgctttgtcagagcaagttcaattcccagcactcacataaccacctctcaattgtctgtaactccagttccagaggatccaatagtctcttctaacttctgcatacatgtggtaaatatacatatacattcaggcaaaacactcatacatatgaaataaaataaaataaaataacctttgtgaaacatgtagacacctaaaccatggagacactatggtgaccatgggaaaatccatctgggcacataccatgacagagctacccagtaggtccctgtatttgttccctaaaagatgtaacatacagtatggatgagaaatgtgatgtcttaattcttttagcaaaacatagaactgtgtctgtctgccaatagagcaaattctgtccttccctgccacacatgtgtgtgcaggtcctttgtagtcatctaaaacatgaatcataagaaatgagcagtagaaaggagagagtctgagacactggacagaaggctgcaccctttcagagggaagtaaatgtagaagtaaaggttggaaggagtagctgaaagaaagaggcagatttcataagaaatacctaactgggtggtggtagtggcacatgactttaatcccagcacttgggaggcagaggcaggcagatctctaagtttgaggccagcctgttctacagagtaagttacatgatagccagggctacagagaaaaatctgtcttgaaaaacaaaacaaaacatctagaagggatctcacaagtgatgaccatctttggttccattcacataaagaaaaaaaacctgctagaagaataattcatagtcacaaatccagtcacaaaggaagaccttaacagtcctctgttaggatctagcagtcaaatgtctgaactgatactctgtttttcagagacctctgtcaaggacactgaccaatcagggaaagatggagcttacctcacttctatcatattctactggcctgctcttccacttagccccaaatttcactccactccagagtttccaggatacctgagagccagttgactggctctgtgaacagaaggccttgacaaaagacattctatactggctgtgggccaaaggcccagggttgataaggaagctcttccagtaaatagagtttctttgaagaaaaatgcatggtagaactacatgggtcagaggtctaaactaagtgtaaaagttacaggggccagggaccctctcatccacttttgcctcatcatacttgtagccttgcaggagataccagatgatgaccagtttctgggtagaggcactcccctgggcttacagacgggtcaacatcatacactggtataagataaaaattgactattaatataccacaacccatttgttggtggcattggtatatagtggtagaggaaaaaatgcctcaaatgggccgaaccttaaccagttactatttagtatactgaaagagaaattgctcaggattcagttatatacagactatatggctgctatataagattatgttcaagccgggcatggtggcgcatgcctttaatcccagcacttgggaggctgagacaggtggatttctgagttcgaggccagcctggtctacaaagtgagttccaggacagccaggaatatacagagaaaccctgtctcaaaaaacaaaacaaggagaaaaaaaagactatgttcagcaagaaatgcctttgttttcttgtcagtagcctagtagaaaggattaaaagatcagtgacaaagatttctggaatagagacatactagtgagtgttccaaaagtagaaagatcttcataccacatgtcagtgctatacgaaaatttccattgttgaagaagcacaaaacaacatagacaaaatatcatacaatccatgctataggctagcctatttactgttgccacctattcctaatatgccagcaacagaaacctatactgagttcctaatatgtctgattaccatggagaccaacctgcttctccatatcacattaactactttggatccattccatgctagaaatgaccatacttcattctgataatcagacacaaattatctaggtatttgttagcctttcttatgtgtagtgtctccactcacatgactatctgaagccttacagagaattagagtctagaatgtaaagtcacaccaaggaaacattgttcatacaaggaaatgtgttggcaagctaatggtcaaggtatctactagttctgtttaactctccccatgaagaatctgtcaaaagacaaagatgaagatctagcatggaagctggtctctgtgctgatagaatggtaaagggggagggggtacattccccttgattcaccagacccccagtgatccacctatggaatttataattctcctctctgacacagtaagccaagtgggttcaaaggtccctgtaccaaaacttcaagtaccctaatgaaatagaagctaagccagctgcttgagaatttatagctaatacttgtgaaaggaagaaccagcaagtcagaggatgaatgccttcaatacttaccctctgcaagtatcttgagcaacaaagaagggtacacctaagcatactctaatcttattcatctctaaaaattttccacagcattggtcttggctatgtgtatttctgtcactattatatgtctgtatcattgagtttattctccctctagttcattctctttactcccttgcatgctctttcatactcgacaacacatctctagtttgttacctttatctttttttctatttcattttcttagttctactaagtatgttctacctattttcttcaaatattttgatgtttgtgaagaattctcacatccatatccagagataggtaactaccacggtgcttttattttaaacatttctgacttttaagacaaaagatggatacacaagagagctgtgtgtgagtgtgtgtgtgtgatggtccatgattataatctcagcatttaggagtcaaaagcaggaagatcactgggagtttacaaccagcctaatttccattgttccaggacattcaggacaaccaaaatgagaccctgtcttaagaaaatacaaggaaaaaaaaaagataagaaaatatacagagaaagttttctagggaaagctcttagatgagcacacaaagcaaaaatcaaaagcacgcagaagaaacactttttccttctctgaagaagctagaaaaaatgaaagttccaggacaagcaagctgtggttcaatttagaattctatttaaagtgacatagtagatatgtattaagtattatcagaatgagttactgagttctaggataagtctgtaccagacaacatatagctccccagcctgagacattctcagagtatttcccactgtaaccgaaacaggatttacttgctagcctcagcttcagtgacagtaagtggcagtgttccaaggttcacaaattttgtttcctcctaacttttgtgcttcccttggaatttgatatataattctgccaaaatgtacttggcaataattattcctgacatgaattgttgtttcacttttttatctaaaaccagctggaaaacccattatattttctgactcttgcttagaagaggctgagcagctgcaggaacagataatataaatttgaatccccttagctgtttatttcaaactttggcagagtccgtcaggatgtgtttagagtcagcttatcctgttgtcaaaataacttagattataaaattgtattattaaaacaaaaattctcatttttttctggtaaatacatgtgacttcctgcataataaaaagctaatgaattatttactatatgggattcactttaagagtgtgtaatatatgtgtgtactatctccctctctccttctctccttctccctgccctccactctgtgtgtgaatatggaagtcagaatttgttgtttggtgttttctttatctctatacctttttaaaaaatctttattatgtgtttgtatctgtgtgagtatatgctacataagtgcaggtacttgcagaaaccagaagacagctttgcatccctaagacctagagccacaggtggctgtgagccatcatgtgagtgctggaaactgaacgtgggtcctgtccaagagcagaaacaactaaagcactgagtcatctctcaggattcgaccttattttttgacactgaacctggagcttactgattcagataggctgactatatggtaaagttccagggatctgtctgcctctgcttccccagtgctagaatcttttacgtggttgctagtgatatgaactcagttcttcatgtttgtaaagaaagtgctttaatgtttcagtcatttctcaaccctcctcaattcaattttatagtcaaagtattattcgttgtgccaggccactagattgccattatataacacacacacacacacacacacacatacacacacacacacacacacacacacacacacggtacacaaatatatagcctcttttggactttcttcagggtgctatgcctcaacttctctgcatgacccctttaatcctgtgcctccaactgctactgaggctgcatccatgaaccctttatgtctttaaaactagtactacccgggaaactctttcactaccaagttcagctgcctgtatggggtacaatcttggcttcctatggagcacagcttctatgtgctgactctgaggaaatatttcccacatgatttttaccttaatgatgaatctcttcctaatcaccaatttctcatctccagctaaccagcaccaatttctcagtaacacaaaggtttcactttaatgatgctggtctcttcagctctagctgaccagaaccagattcttaattcaaaatgtgtaacagcttgatagagtctttaaatgactcttaaattttcctctggatctttataatccaggcctccacctgctgcatttctcttaacatacttaactttcacagtcccagagaacagtttaccaaggtctgaacactcagtgacttttctagaccaaagttccaaagtccttccatgatcctacccagaacaacagtcaggtctgtcacaggaatgccccacaatcctggtaccaatatcttagttagggtttttattaacatgatgaaacaccatgatccaaaataacttggggggggaagaaatttatttggcttacatttccacaacactattcattattgaattaagttacaacaggaactcaactagggcaggaacttggagcaggagctgctgcagaagccatagaggagttctgcatactagcatactttttctggcttgctcagcctgctttcttagagaacccaggacaactagcctagtagtagaaagattgcaagagccagaggatcatggactttgctgtgagactgtgtcccctagtaatatcaccaacataacctctcaaatgtaagctgaacaagggtgataccaatacatatgccaaagtggatggggaaacgctcaggaggtcttaccactacactaattactacaagtaactaaggaatgctgagagaggtagaaatagtctttcctagaaaagaacacactaactatccaatggttagccctgaaaacatacatacagactgaggttttatatatatatatatatatatacatacacacacacacatatatctaagcaatgaaaattaattaaaaaataggctataaatttgaaagaacaatataatggagaatttagatggaggaaagggaaggaagaaatgttgtaaccatattagaatcaaagaaagtttaaaagtaggtctttaaaaaaaaaagaatatgaacaggactggagagatggctcagcagttcagagcactgactgattttccagaagtgctgcgttcaattcccagcaacctcacaaccatctgtaatgggattcgatacccttctctagtgtgtctgaaaacagctacagtgcactcacatatataaaataagtacataatatctcttaaaaaataaacaacccaattttaaaagaaggctgtggaagtgaacagagttctcatgagaagaaataaaaaagctaataaacacttttaaaagtgtttaacattattagcaactagagaaatgaaaatgaaaattactttgagattccttctcatcccaattagaatgactattaccatcaaaataagtaaataaataaataaataaatggacaataagttctggtgaggatgtgggaaaagaggaacccttatttatggagtgtaaactggtgaagccactttggaaatcagtgtggaggttttcacaaagctacaaacagaactacaatatgagccaggtatgccactactagatatatgcctaaaaaactccatattctactatggaggttttgcatatccatgcccattactgctttattcacaataccaaagaaatggaattaacctagatagcaatcaaatgatgaatggataatgaaaatgtagtgtgtatatgcaaggaactatatgagctctggacaccccaagaccaaattctcagcacaaaggatctttattttccccagaaggacaaagagcagggaacgaaagacaagacaggagatagaggagaaggtagaaggggaaagaaacatgggagaggtttaagatgtatttgtcctggaattatgggtggacaaggactgctgctggatagaggagacacatgtggcacataggcaaagggcagttcataaaggtaaaatgggaaaccctgtgttaggatgaggtgcttaattttaattgggcatgttaattaggtgagccaaagggggattttgatcgctggacttcaatactttgaaggctgaaccttggtagtcagcctcaggaagaggaagtggccaaataaggaaatagaccttgatgactagctttaggaatgtaagctaatagcttttagtaaggcagagggaatgggagacaagggcaaggcctgccagagtcatgtttgccatgccaaggctggccagagtctttcaatatatacaatggaattcaatttaactgtaaagaaaaacaaaacaaaaccatgaaagttacaagtaaatggatgaagatggaacacagaaagagaaatgtcacatgttctctcttatttgtggatcttagctctgaatctttaggtttgattctgtaacttggactatctgaggaagccaaaaaataaacagagaccactggggaagggggacagaaggagctctagaaatagggatggcagaacatagtggtaaagaaaaactggaggggaggctttctagttgttagttgggaggactctaagagaagccccaaaacaatataggctattgtcattgctcttggctacaggccaaattatgaagataacatactattgttgaagacatcacatgctttggtcatagaagttgagaggaattcagctagtactaacctggaaaccccctccttgtgggttagcattcatagtgtcagaaggtgctatgcaagctaccaacagggataagttatcagttctacccaatgtaaagcccaagaaccacaacaatgatgagaccagcaagatgcctcaatagtttaatagtagcacttgtgtcttagaggtaaacaacagctgtctaactagatctaaaatctgttcagttgaagggaattcattgccttgccaagaacctctggctaaagagataacaggccctacaggaagatctactactaccctaccactaaagtaatatagtttccatctgccttctaaatacccatccttataccataggtaagtacagctctgatatctcaagcttctttgtgcaagagacagagtctattagagagagccacaactagtcaaaatgtagagaataggtggccatggggaccagacccaaatgggaaatctgtaataaagtatatctaggacttaggaaacataatggaaaagtagacagaaagattataagagactaaggaccagaatgactgttttgggatagtgtcttctgggcagaacaggcattctgtaccaatggacacataaatttgagaggaaatatttgggggtgcatgagaaagtcggaagggcaaatagggggtaaaaatgatgcaaataaaatttactcatgtataaaatcctcaaattaaaaaacaactcagaaatgttaaattttgtggtgcatacctgttatttcagaactcaagaggtagagacatgaggatcagaagttcaaagtcatctttatcatctacataataagttggaagccaatatgggctacatgcaatcctgtctcaaataaaataaaacctccaaattcattcttttaaagaactaccacaaacaaaacagggaaatttttggcaagcttattcacaaataactagcaaagacacaggaatttaagggcgtgtaactacagacaatttaaagattcatgaaaaagtaaaacactgtagcaaagcaattgttaaaactaaaagagctttccactggaaatgttatcaacactatcctaaatctcactggggacaaatggaatcataagtaagtcttgcctaatttttaaataacagagaattctatagaaaaggatggaatactcaccaatttatatgataaattaaaccaaactttaataccaaaactcactaatgatgattaaaaataaagctagagaggtgaatgtggtggtgcaattatgataggctatttacacagatggaagtcaagctaaatagatcactctctagataccattcaaaataaatgtcaagataaattagagtcaaaaatactaaattcttacaacaaaatctagaaggacatacatataaccttgaggtgtgaaagacattttaaccaacactgtcaaaactaaggatgtgaaaaattaatatttgactataaaaattaagtgttttcataagtaagttataaagtaaggcaagagatagataatcttaggagaaattataatataaataaaggataatgaatacatgtaataagtgtttttgcagctaaaaaaaatggaagaccccaaagaaatatgggtgaaacataaaaaaagtaaagtctgaaaaattaactctgatagccaacacgcattttaaaagatgatgaatctcattacaaataaaatattacaattaaagatacaatattctatgcttataagactggaaaaaattaagcaataatgttagacttattcctgatgcaaatgcagaggtaagtataatcccatgctctgaagatcaaaatgcatgaagagtcttgaacgttctaaaaatttaaactaaaacagctgattgtggtggctcatacctttaatcccaaacttaggaagcagaggcaagtggatattttggagttctgggccattctggtcttcatagtgagtcccaggccagccagagatataaagacaaaacaaaagaaaaaactaaaacagaactatgtcctttgttccagcaagataccaccagataatctattcactaaaataacagtaatgtgtctgggattttatctcaatgataaagcattcataaataaaacaggagacccgaagtaccacaaaatgagtgaattggtgagttaatgaacacagtacataacaatatatgataaagaccctctccattccaaatggtaatgagatgaatgtgtttattttttttgtgtagatgtgtacttttgtgtagaaataatgtgtgtaacaacaacattgtaaaagttaaaaattactgactggaccccttagtctacgcagtctaattgcttagaatgtcttttccctaccaccctctcacacacatacacacaaacaaacacacacagagttttgattagtaattattaattttataaaaatggaatattatacataatttatatgcttttacactaagaaacacctagtagacttttctccatgtcagtagaaacaaccttaattcatcatttgtaatatatgtatgagttgggtcatacaaataaacacagtcaaaatcacatcttcacaatgttgcacttgacagaggatttttaccttgagtctgtatgcagcacactgagcagatcactctgaatatagttccaggacaattccactgcaccaaggtagtatcttctgatggcactagagcagaaattgaaaaggctcagaaagaagcaagcgaagagtgctatttgcatggcttttattactagaaaatgttcaactaaagaaatgaaaatttaactcttctctaaaataactttagcttttaagaacaaaaagaaaatgtaatgatttagtaaaaagtcctaaatattttgcagagcattttctggaagtttatctactgtgagtgaaagtagcattagcacaaaacagatctgaaaggattacttccttttgggtagtaggaagcaggcacaggaaaactggaataggaagagtggctgagctaaggcttaacccatttcctgctgggtgcatcctaacaagtttgaatccttaagaaaaggaacagaatactgaggaggggcgttcaggtgtatttaaattcctagcctattctaaaagactgttccttggtacctgtagcaaagaaactctagatagtgaagattctggagtctgcatggaatgtaaaagcttccactttgggattcaccagattccagcctactttctccgcagaaactttccagctgcccacatggcctagagatccagataggatacctgtaccatatgttttatttgctgttgcttttttattaatgattactatgggaggccccaggtagtcataggcagagctactcttggacaggtgttcttgaattgtataagaaaataggcggatcaagacataatgatcagtcagtaagcaatgttcctccatgatctctgattcagttctggcacccaggttcctgcccttttgagattctgtcctcatttccatcagtgaaattgattagtgaattgtttattacatggaagtataagttgaaataaaccctgttgcttttggtcatggtgttttattacagccagagaaactttaactaagacaccctccctcctcaaaaagctggaaacaaacttatcatatgacccagctatatcactcttgggcatacatctaaaaggattgtacattccactatagagatacttgtatatccatattcattgccattcaattcataattgaatgaaaaaggaaagagccaacatccaccaactgaagaatggataatgaaaatgtggtacattcacacaatggaatatttattactcagctgtaaagaaaaatgaaattaaatttgcaggtaaatggatagagctggaaataatcattctccataaggtaacctagacccagaaaaacaaatgcctcagattctctctcacatgtgaatgctaactctgaatctttagatatctgtcttaaattggagtatccatagagatcaggaaactagcaaggggccaacaagggaaggcagatttcaagggaaatgggatatactgcagttgatatgaaaagggaacaggagaagttgaagggttacgtggggtaaggataggagggcaggagagagaagtgagtatgggtagtgattattaacactaaagatacttgaaaaaaatatgaaaacctactactgtagaagctttttaaataaaatatacatgtatacatatataagaatttaaatggagttacccctacatcaggatgacaatgtccctactaaacactgcagggtaacaaatataaagcccagtgccaggaatgggtcacctcttttggagtttgttggctccataaacccccaaacattataaggtactgccaattttttggcaatctacagaacttcatggttaagatcgtattgctgatgacacaacatagttgagtcataaaacatggggaaatcaagctggcactgacaagatttcacagtgctggaaggttacatgtgtgctatttggggtgacaagttattgacagtcttacaaagcatctaagaaccctgtgaggtactatataatgactgatatgtcaaaatagcctcattgctatggtagtggcataaatatagtaggagtaactaatcacttcatgtttgtatttaaggcccactccacaggatagaaccgatacctgttagaaagccaaaaccccatggctgcctaagtcatagggaagaactgctttcctaaatggacacaaaaataaactgtctcctcccaattttttttactattataccgataaaataggggatctttcactcctcatctaagaatcttcttttttctaatagactcacaactagtatatgtacagaggataagaggcaataaagtgctcaattctaattgagatatttgtatcactcccctctccagtcccaagggatcggaagtcctgtttggcctcaggtactgcgtacacgtgctgtactcaaacacatgcaaatactcatatacacaaagttaaaaaaaaaactttaaagcggaagaagcagcagtcataatacaagtgtacattattaagtggttggaatgcttttaaaaagtgtaagatgtgttttcctgaacttaaacagccttgaaattaatgtcagaattaacataagttcattgtttacataaatatgcaaaatctaaaataaattaaaaaaaataaaggtgagataaactctgtcaccaccaaggcagagaagctttctgcacacgtagcaagcattcattcctctgcgcaagtgtggggctgcagctgaggtggttgtagcagctgctccaggacaggaaagatgtctaatgggaccaggccccgctgtctccgactgccaagggactggaaatatctgcccccccaccccctgccggaagccagctgcggatgactaacgcctgttcctggtctcgtggtctgaagctgtgtcatcgcgatactagggtcccccccccccccgcgcccccgaaatggccgctaacagtcaaggtaaaggcgggagcacgcgcgcaagggccaggggtggaatcacctttgtcgcttagagtgaagtactgctggttgcatgctgagtcgcttgctgggttcctccctccccagggagcttcaatagcacctggatagggcagcgcggagacttttctggcgggtgttctgggatctggccaaggtcatacttaagctggcttttgagttacccagggatgttatctctgcctagctcttctagcctttcagtgccgcccctaccgaggtgtccctagggagatccagttactgttctcagaagcgatctggctccctgacaggagtgtttttgtctcttactgcctctcaaacacctacagtcctcattttcattggtactttcctaattgattgttttgaaaacagtaggagatatagtcggcccactcaaaataaaatcccagtggagcactttttttctttctttttgtccgttttcttttcttttctttagttacgttaagtcagtcaattcattaagctcacagtcattacacttgatgcaattgctgagcagaatacctagaaatttctgagaaatcttgtcttacataattgtagtgcttacaataattatcgttgttttcctgggcctatagacaaggcttgtaaatgttgtttaccagtgtttaatgagcggactctaattgttatccatcccatctcacccaccatcaacagataatttggtgtagtccagtctggcctcaaactcagctatccttgtgtttcagcctctagagtgcgtggaactatacccaactaaatcccacttttgactagagccatacgttgaatgtattgtatatggtttttaaatatatatatatgaatatctagtgcttctaacactattgaaaggacttgctttgtactgtggagttacctgagtaccttgataggaaaatgatataatagtatatgtaaatgtatttctatacttcttattcaactaattttgtgtatacttaggtcaattcaacatcctctctctctctctctctctctctctctctctctctctctctctgttttttgagacagggtttctttgtgtagccctgtctgtcctggaactcaatctatagaccaggctggcctcaaactaagaaatccgcctgcctctgccgggcatgcaccaccactgcctggctttttcttcttctttttttttttattagatattttctttatttacatttaaaatgttatcccctttcctggtttcccctctgaaaaccccctatcccatccccccttcccctgctcaccaacccacccactctctcttcctggtcctggcattcccctacactggggcatctagccctcacaggaccaagggcctctcctctcattgatgacagacaaggccatcctctgctacatatgcagctggagccatgtccctccatgtgtactctttggttggtggtttagtccctgggagtactggttggttcatattgttgttcctcctatgggcctgcaagctccttcagctccttcggtcctttctctagctcttccattgggggatcctgtgctcagtccaatatttggtcaagagcatccacctctgtatttgtcaggcactggcagagcctctcaggagacagttatatcaggctcctgtcagcaagcactttttggcatcgacaataatgtctggatcaatgcaacatcttattgaatactatagccttttgaatcttgaacttagccaggcagtgttggcactcacctttaattccagcactggggaggcaggggtgggtggatccctgtgagcttgagaccagtctggttaattctggggctccacagagaaactttgtttcactgctcccagccccaaaaacctttaatttaggtggctctaaattatactgtagttttgaaagtttgaacactcttaaactttcttcctaagttttttttgtttttgtttttgtttttttgtttttttgggtttttttttttttgccgtttatcatatagaagattgacttttctcatatggtctgttttcagtgggactttgatattcccatcccagtaagaattggaatatatattctctcttctttaatctggatgggaactactctaggccagtttagtggtagcaaaattcaatagcttctgaggccagaacttaaaatgatgacagttttttctaggtccttgacctttccttcacttgagacagtcacctcttaaacttagcttcaatggtattaaggaagtccactctagcctctgagaaaaatagtctgtatatgcaactgtagactttttagattattatttattattatattattccagaccctgccctgtaagttttctagctgaagcctcagatatcacaaaatgacagagaagccttaatggtgtgattgaattccacatgcacagaaccaaccagagataatagacaaaataactttgtttcatgatgtttgagcaatttgttgtacagctattataacttcaacactatttttggttctttgcctgtctatatacattttaaaatcccttaacccagtggttttcaaccttcctaatgctatgcccctttaatgcagtttatcatgttgtagaaacaccaagcatagaattgttttgttgctacttcataattgtaattttgctactattataaattgtaatgtacatatctgatatgcagggtagctgatgtttaaccccaaaggagtctggatacacatgttgagaaccactgccttaacctgtaaaggacattttggttttgctaaggattatataataatgagaatgaacatcttaatattgaaactcaggtaggaatctagctcacaggcttagctttttaatccccttaaatttaggaggggagtgctctatagtttatcatttttttcttttgcctgctaatatttagaaagcacctgcttaattttatatatatataaagttttacaagataatttaggtattgttttgtacaatagcattcatttagatagcagcctggatattcattcaagtactcttcattcccttgttcatttctagagttctacttagcatttcttggttgagttacatcagtttgcctcttgaatgttatttctctcttattctggtaatcttcttggactccaattatatatgtgtgaaatattctgaaaatttttgctttgtttaattttataaaaattatttatttatgtatttatttatttaataatgtatatgagtacactgtagttgtgttcagacacaccagaagagggcatcagatcccattacagatggttgtgagccaccatgtggtttctaggaattgaattcaggacttctagaagaacagccagtgctcttaactgctgagccatctctccagcccctcatgtaatttcttgatcatttctgattctgcctctattttctattctttttttaaaatgacaattcttgggtttttcttttgtttgtaaacagtcttacatgctgagtttttaacatttgttatcttaatgcagtatgtttccaaggaagaaggattggacatagtaggtaaatccaagatgatctttgttcaaaccaggcattatacttttttttcccctttggttttttgagacagggtttctctgtgtagccctggctatcctggaacttactctgtagaccaggctggcctcgaactcagaaatccacctgcctctgcctcccaagtgctggaattaaaggctgcaccactactgcgccaccactgcctgggacattatacattttgttagcttgtttcccattccaaagctttgtttcctgattacaaaatgggattaataagtagtacctatcttttcctgtgcatttaattaaatagtttgttactaagtacattgtctagtaaaaagcacccggtcaaatattgtttacttattcattggagatctatataatacagaaaattggtttgtaggtggctcctaaagaggggaatttaaaaatacatatttagaatgcttttattccatagcactgtttttccctatgtcagttcaattgtttttaaatttgagaggaaaaacaatagcagactaagcctaagttttcaaggtgctacaatacatatattcaaatttatttattttagtcagaatttctaaaattccaatccagaatttcagagatattttactatttaaaatagttacctgtctgctttaaaaatctcttaatcttgttaggaatagtggaaaactattatgaaagtaaatattttcttattttcttagttctttttttagttttttatttgcatatactaatcatacaccatgatggattttattatgatttttatacatttatacaatgtgttttaatcatatttacttttgtccttccctattccttctgatccccttcaattgttgtcttgtcttcactatacttttttttgatgacccattgagtttcattaggcttatttataggaacatgtgtgagagattgtttactagcccataggcaccttaccataccactgaagaaaatgtctactcctttggcagtaaccagtaactacatatcttcattcttttataggaaactttgatggaaaatttgaagcactggatcttgcagaattaactaaaaaacaaccatggtggcgtaagctgtttgggcaggaatctgggccatcagctgaaaaatatagtgtagcaacccagctggtaattgggggtgttactggatggtaagtagtgttaaagatttgtagttttttgtgcctgatttagtagcatagttatagaaactgtctactctaattaatgaaaacacactgactttactgaaattgttcaatatgtagtggaccatcaaattaaagtactatttgatatttatgcatgtactgtcaggtccaaaagaaacttcacccccccccaaaagacactccaaatatccagaaataagctcaacctggactataagaggatttctggtggttagatgaaaagtcaacattccttaagaacttttgaaagattctcttctgtcaaaaggagtcattcccttatctctggaaaaagagatatatggctctccaattaacacatatcagcatattaaggtccatgctagttttcaggctccctaaagtccctattcacaagtacttgttatacatttcaaagccctagcattggactttctctcctcacagctactcacacttcatataacctggctattctctcctaagatgcccatgtccagactgctgactatgtgtaatttactcctctttctgctctggactcttccagatacctctggctgctctctctctcatatctacaataaaaatcacccccttaactgtaccatggaatgtctggtgccaaaaaccttgcatataggcaggcactatttaaagcttatatataggtatctcatctccttcttaaaatgacttggtaattgtaatatctatgtccattttgtagaaattgaggctcagaaagtttatctagattctaggtcaaggcaacatagtaagtggtagattaagatgttaaccatttatattagctgtgccagatgttaatgttgcagttttcatttgttgatgtgtataaaatgtttagagccaattcagtgagtgagtaatgaattcatcaatctcagaaagtccgtttgaaaaatgttattgtaatgcaaatacacagaacagctatctataaggaatagttggagaacaaattcccatataacaaccactgaggctaaaaaatatggctagtgtcccccagaactctaaaagttgttggggagttgcttctttacttaattttaataatttagtgcagtcaatttggttttgaactttggataaacacaatcactatgaattcttttgattattgcttctttgttgttgttttgtttttctgagacaggatttatttgtagttctgggtgtcctagaactcatactatataacaggttggcctcaaactcacagagacccacccacctctgcttcccgagtgctgggattaaagacatacactagcactgcctggcttgattcttgcttttaaaaatgttttctgtattcaaccatatcatatgaagctctagcttcttcattgtcatttgtatttagaattccactgtactaatataccataggatattttcccagttgaccattttcaatttttaaataatgtagacaatgatgatatgaaattattatgcaaatttcctattgtgaatgggtacattacttccttggtgtctgtacctagtagtcactaaattattgggtgtatacgtctttaccttcatgagatagtgtcaggctgatgcctaaaagtggttacattgccaccaaggaccaagtgtttctgttacactacatccttgaccatatttgttgttgccatactggtaatttcttgctagcctttacaagtagtgtttttctcattgagattttgtttgcattttttccaagtaggggtaaaaactgaaggcttttatatgtatttatttactacttagacttgtcttttattaaattccatgttttccccctctgaaattgtcattttttgtagtattcatttttaagagttttgagtgtgtgtgtgtgtatgttgtgtgtgtatgttggttttgttttgtttagttttgttttgcaatggagtctttggctcagcaatgaagaaacttagcagggccaggcctggcaaacatggtaatgccctcttccttctcccatgtaaaccatagattacatccttagtgctagccatcaaggtctcttcccttatttggacatgttcttatgctagacgcattcctcagggatgcaatctatgtgagagggaaggggaaagggcaagatgctgccagtaccatgtttggtaggcctgagtctgagaagtcccttcaagcatggttcagaacttgtgatcctcctatctctgtgtcccaagtgctgttgtatacacagatatttatattatgactcataacagtagcaaaatgacagttatgaagtatcaatgaaaataatgttatagttgggggtcagcacaacatgaggagctgtagtaaagggtcgcagcattaggaaggctgagagccactgcgttaggatgattcctagaactcagagctgttttactcacagttacaacttcataacaaaatcaggcaagaaaagatacacacaggacagcagccagaagaaacacataaatggattttctacttgtcttttatagagtcttctatataaagtggatttcttgtatataacttatagatagattttacttttttaaagcacccagttttatatggatttgacctttagtcctcatgcttacacagtaagtactttgttcactacactatctcctcagcctccttctcttaaaattccagtttgaaatatcttccttaaaaagaaaaaaaaagaactatcttccttttgaagagagtgtttagactctttgtgtataatttcttgaggcagggtctctctacatagccctagctatctggaactctctatgtagaccacactggcctctgcctcctgaatgaatgtcaagattaaagacatgcattactatggccagcttgcatatacactttttgttgacaagcttcatatagggtggtacatgcatgtattcttggtatatgcaaggggcctagttaaaaaaaaaaaaacccgaaatggatgctccatggttagaagtgggaagaaatttttattgtggataagagagagaaagaacatccaaggccatctgaaaaagtccagagccaagagaaaaagaatcagactggacatagccatatctgcaaaacaagggagaatagcagggaatagcaagagatagagtagtgggaatggtagtgagagaacagtggaaatagtgagaattcgggggagggggtacctggtctatacagagaataaagtgggtctgggggaaaggaaacctgttaactgaaacaaactcggggtttggggtaggggtggaggtgaaatgggctaggatgctaatgtggactttgaaatgtataatgggtactcatgaatagggactctaggagcctagaggctaacatgagcttctgtttctatacattgtaagaaggagctaaatcatttcaaagtaagtaggatattgttagaagtttgtgcttgtgtgcatctgacagcgtgtcacgtccgatcttggtttggtttcataggtgcactggtttcgtattccagaaggttggaaaattggctgcaacagctgtaggaggtggattctttctccttcaggtttgtctgttaagtttttctaggtgtttggaaattctacctgctcattaacatattgtgagaaattgtagccttggatatattacattaaaatataatgtaattgtttttgtgtgctatttttcaatgctactaatcatttgagtgaaatcttaattcctagtcacattttatttcatgtttatactgttaagagccaccacgtggttgctgagaatcaaacttggattctttggaagagtagctagtgtcttaaccactgaactatctctccggctaattttttttttcttattgacttctataacaacttcactgtttataagtgctaatgttttactttacatatacatgtgttctctaatttatttgggtaactaattggttgatggtgttatggataaccctaatttatcagaaacaacatacttgaatcgattttattctgtccacatttccatgaaaaattatttacattgaacttactactttggctttcattttaacatcttatttttaaattttatgtaaaactttgtaaaactcagtgtatacattaaatgattgccaacagttgaagacagttctttatttctattaccaaatatggaacattgaatgtagtatgtacattttgcccaaaagtcacaaaaataactaatttctccaataatgtaagtcaaaagagttttgattacctatttgcaagatttatcttgacaaaaagaaatgccaaagaccatgttccttattacttttttattactgttaaatttgtagctggcaaaccatactggatacatcaaagttgactggcaaagagtagaaaaagacatgaagaaagccaaagagcagttgaaaattcgtaagaataagcaaataccaactgaggtcaagagcaaagctgaggaggtaagacttgttttgttcagatttaatatatgaaaagtacaggcagttttgtgtagaaaacaggatatataattatcttagcagtataaaaagctttatgataacaaagaacttggagcagtgagacaaaaactatattctatgtcactcttagaatatcattactgtaaaaacaatttgcatgggacaaggtctcattatataacccaggctggcctaaaattcctgcttcaacctcttaagtgctaggataacatgtatgtgctacct

SEQ ID NO: 13 - DNA, 143350 bp, Homo sapiens
taatcctagaacattaatttgccttatgttcatatcctttccccgggctaaataatcttacagaagtatagcatgttcaaatttgaaagtatttcatgatgatataatgtagccctctcatttgccaaagaaggaagctaagtcctaattgtcttgctcagaatgatggagtgcatggatgattcagaggggcactgcccagatatcttctcctgctctcctactggagtgcccttcttggattccaatctcttgctgctgtaacctccacacgagagtctctttctacccaggctctgcattgcaaatctatggcccagggaagcagcttggtataggctggcgagggagcataactgtggggcaagaaccccctccccaccccattctcccttttgaggggtaagttggctttaatgagtcctccctgcccccagctgcctctctcttgctcctgtttcatggcagctgttgccaatttcagcaattttcttccggtgaattgaaggctccaggtgacaaagggagttggccatatcctcctggaaaataagatagcctgggttccactctcaccccacccctgaccctggactgggtggctagggctcactttcccagtgagcatgtcacaacccttcccatcaccaccccccaccacatacacacacacagcaggcttccaggtgtatgtccatttcttaaaccctgtttgaaaggaacttcagattcttcctcagttcattctcagctcatctgttttcctaagaccaccaagattttgatcatttgcctaacccttggaatgagcacccattctggcttctaaaatcacaggaagaatgggaaataggacacacacacacacatacacacacacacacacacacatgagtttcgtacaaagcctaggacactggcctctccatctgtgaccatctcccagggtgcttggaaggggcatgatctctctagttaaaccatttatgcacaaatgaagcagacccatgagcactgattttatgtaaccctccctgcaaagcagaaaatgaatcagtatcactcaggtaaaactttcctgtcagtttttccttaataacaatgtgacacttttgttttgtttgttttatatttctgttatgagttattggttagacagaagggaggtagcttaatagttgttccacttctctgcctaaggatatcagtgtgaacgttgggtgtctagctgtgaacaaaacaagctcaacttttgctttcagggagcttacaaggtattggaaggagacaaacattaaacagatacatctacaaataaggatgcaataacaactgtgaaaatgtgaagaaggaagagcttcaaatctagaaggatgtacccaagtgatctcttagaaatctctctcaggaaaagaaggaaggaaggaaggaaagaaggagggaaggagggaaggagggaagaagaaaaggagggagggagggagggagggaagaaggggaaaaactgaggatggtgagatattcgacaatttgtttagtcctcactttctctaatacagctgaagccttcattttcaagtctccaggtttcctaaagataatctatcttcaaaatgcatgacatcagggtaggatgcattatctgatataggagcatctactgttttatttgcagttgtttggaatagcatgcttgttcctttgggagggaagatgatctccccaagaatcccaagaacaaaaatctggggcagtggctctagtccttcaggccccccccctccccaggccccctgtcttgttttcctaagcaatggtcaggaatgtggggcggggggcagcccagccctctgtgcccagcccaggcagccccagtcacagtcccaggctggcctttcacctcattgctctcccggctgctcttattaagcagcaaaatgtttcaatatgtggaactctgggggagggatgggagagaaaaatcgggatattgttgagaaggaaataacgaataaccctgccgccagccctcataccccccacgtggggagatctggatgataggtgtgttttctcctgaaatggaatcctactaattgccttttggtcagaaatgtccagagccaattggggaagggggtagggggagcaggtactaaataaattttctcgaaggttccagagcaaagcagtcagggatctgggtacccaagaaggaaggaagagaacgcttgagaaacagaagccaactcagagtggtgcaggaagctgtggggtttgcttttgctaactgacatactcccatctccatccttacctgtcacctctcccctgccaccctgcccccccccccacacccaggttagaaacaactgtgaacaactccctgttgccagagatccacagaggagagtgaggggtggggtgccgcccaccccaaagcacaaccaactcagcaatgcagattctattttgtgggtaatggccctgggattgggcagtggaaagggcccatatgagcattgactcagaaatctgagccccattcgagtgaaagaatgagcaacgttccaaattttaagaaaacacaaatttgacaacccagaaacaactccttaacaagaatgcttttaaatgtttgaggttttttaaattaaaacctcataatatggctatttctatggcatttgcaatccactttgctcttatagatactgcctagaaaaagtggatcaagaagaggtgtattctcggtggtggttgggagggcgggcgcaataggactcaataaggggaaggagtaacccttacgaaagaaaaacataagggctcaaaaagtaaaagataacttcaccgatatcaagtttgaggaatgattacttgcatatcgataatttggaactttcaaagaataaataatcagctcaaagaagcctgggtctgcatgtcttcttttggcttcgcttagttgtatgtctttatttatgatatgcgttcatgatttctagcgttctttaaagtttcctagtaacaccgagtggtttctagaaaagcagctgggggcaaactggtggctgtcctgtaagaataattcatcagacagcagttggaatattgataagaaagcggaaatcaaattacaagaaagggaaagagaaaggaagagggagtgggacccagagagctggcgggaggcagcgaaggggaaagcttcagtgcacgcatagctcctgcacagcggctcctgcagccccccaggatgcgcctgagctgaggctgcttgtgggcaggccctagagagaggcaaactttgactccaggcacgcagcaggtttaactcctcactggctgggttctgggagctctgggcacacaggataggcaccaagaactaacacatcctggagctgcccggagttccgctcctgcgggcttagcaggaaagggtgcctaaggtgagtgcccacttgcgtccgatcctctgggggcgatgcagggtcggggcgcctcagtgtgtctcgctgcttgttctggttgcagtcgggaaatgtgggactttggggtcttctcctttctccggctttcttttttctccttctttcctctctgttttcttgtaaattacacttcgactttcaaaaaaaaaaatgtaggggaccggtggggtcgctggggttgggggagagactgaagaaagtgcgcctgggcggaggcggcgaagggaatctctgggcccgaggaatataccttgtccctgcactagtgtgtgttctcttgtggcttgaggagccaaaaaaaaaaaaaaaaaaaaaaaaaagctggaatttgttagtggggagaaaagtgctttatcagaaacacattggctgccagagaagctgtgagccgccacgttaaagatggttaagagaaggaaggaaaggaagaggagagatacggccgccagactgggctaagtcagggagagacccactcacgcagaggcacctggcaacctagggtggcttttgcgccttccagcccaaattatcagacctaagtaagactctcctgccactaaaaatgaggacctgacagtcattgtagcagtctcttcccaaaaacctattttctaaggggcctccacagacctccctaaccttgcgttagtcttcctccgtccccgggccaccagcagggaagagcagcgcagctggatgctggcagagaaagggtggtgaggaagtcaagcaggtctgtgcactgaggggcgagtgttggcagctctgtaagcttctgctcctcagcctgcaagaaaggggagtcctacctctgtcctggtcgcgttctctcctcaacacgcaccaagaactagaacatcctggtttccagaacaagctgcgggcatccccagttcgaaactgcccaggccctgggggaggcggcagtctgatttcgggcaggggagagtaaaaggactgtagggaggagacccaatggtgtgaggtggctctcagttctcaccgtcccctggcctgaagcccggggacgggactgaggcgtagggagagtgctcaacacccaaccactcggaccctccctcgccggactaggcggatctgagcttcccaaacccctacagtctctccatctgcatccccacttcatcaccatcccaccgtctctccctcgctccactcgcgggtaaccgaggcttctccctcccaggctggttcttgggcgttcccgacccttagctacccacgatgtttcagacagtccccgacacgtcgtcttacatcaaggtaagacatggcagcgtctttaaacaggtgatgacccccagcttctaccccacccgggcctatggtcccttttccctttccccgggaaaaaggggtaggggtggaagtgggccctactctcggctcgtggatctcaagctagggcgctcctggccagatgagagtggcacagaccctcgggaatcctaggttgagaagcaacgctcctggcggctagtgtttgggaaacttggagcaggagagcctggcgaagcctgtgcaggaagaccgagcagctcgccgcgtcaggtcccaacgggtggggtgctctgagcggctggcgcacagcgtgttccctgcattaagcgcgtgcgcgcgcttgtgtgtgagcgcgtctgtgcatgtgtgcatgcgtgcgcctgtttgcatgtgggcgtgtgtatgtggggttgtgtgcgggtatgcgggcgccacgcgcttctcctacaggtgagacacgcgctcagtcctcgagcccaccttctttggccccgcccgcccttcggaagcgcagattgctatatttgacagcacatcgaagggttttggtttttttttttcttttccacaacagtttccaagaatgtaaacaaactgaagctgggacacctgggttacaagttaaatgaaaatccgctggctgggtggggcggggagtgcgcaccaggaggccctgctcatgggaggggcggtgactgggtcccctcacgccatgcagccgcgacctgacgccctccgagtagggacccaaagcttaggaccatctgagtcagtccgagagcggaggaggaaggactctccgcagtgctgcaaacacccgcatacttttcccagatctctgccccgccctccccatcctgaagccccgcctccaagtgctccccagaccggtcagtgaggcccagctgagctccctcgagtgtcgggcaaatgccagggcagtccctggccctgtgtgatgggatgcagactctcgggtcctgtccaaggattgccaattatgcgtccaaccctcctcagatctctctaaaggaaaacttgtcacacggacgcatcttcccgtgtgaagcagtcactcgtcatttcaggaagggaaggcctaatcctagaggcttggcccaaaaaggggtgtttcattgacaatgcctgagtgagtgaatgaatgaatgaaatacagtgtaattcatgtagcaataaccagtgaatggatggatagcaaaatgactcccaggaggttacagagcatactttaaggttagactaaggcgcgcacggattcgctgtccccagttttcctgagaagtttaggaagagtactcgggtactcccaccactcggagtacccgagcccggcaagaggagctctcacttctagctctgcactgaggattgtaaatggccccggggaggggagctgcagtctctctcccactcataggaaccctcgagtccatacacaccccgggacccaggacctcagggatgaggagccctagaggggcacgtgggagccccggaacccgactcaggccacgggtcagggacaaagcggaggcgaggagacggcagtctgggagctgtgggccgccagagaagctgctcgctgcaggagctcttttcaaggtggaaaaatggatttttcagcagccacaaagtttgtattgttgcacaaaggggtgcattgatggcggcgaaaggtctgcgtggcagggacaatcttgagtctgttccaccggctccctccatcgaacatttgccagaggggcacaaacagttgcaggctgccaagcccctgccgttgtccggcaggcacccggctcaggagttgttgacaaacaccgcaggcccaggcgcccaggccccatgagggaggagcccagcctggcccctaggggccaagggtgccggctccaccggggtcacgatctgaacagtggtctgggctctgaggggtcccacagagaggtaaaggaggtaattgcccacataagagcgctttaggtaggaaaggggcagggaagaacaagggaaagggagagagggaagagggtgacacttggagacactgacatgcagtagttgatggataaccgcaacgacattcatagctacctctcagatcttaccttcgccagccgctgctctaagcgttgtgtctgtattagctcatttaatattaacaacaatcttaggaggtagtccattctgcaggcgagaaactgaggcattgtgaggttaatgtgatgtgaggggcagagccaagatacatagagtaatgacaaagttgtgctggctgccaggcaagttctaaaggcttatttcgtctttacaacagccctttgagataagtcctattataaccccattgtacagatgaggacagtgaggcacagggaggttaagtaacttgttcaagccctcagagctagtaagtgtagagctagaattcaaacctaggtgcgctagtcctcaaactggaacttccgctcctgatattttgtttaaggatggaggcgtggagggaccaggagacccagtggagtaaccctgacccgcacctgcacgatgcccgcggagtgcaaagcactttctcctagcgcgcagagcatatatctgaaagcttctcgcccgtcctccgcccaacacccccgcaggactggcagggtcctcctttttttctccttgtgtaccccccaggttccttgctctaactccttcacttatcagcctgaggattgggcccaggctgcattctgagggagatgccgtcttccgcctgtcccccggacgaaaggaggttgctagccccagaatgttcacagtgacccacccctaaggtggtcttgccggcgggtctcgaagctgagtttcaagaccacggatctgttcttagaatgaatgctgtttggggcggctgggaggagggggtgtgatggagattggagaagctgaacccaccttggccccatcccaacggccccatcttggatccgccactgggcgagggtctggacacctggctggtctccacctcttgtcagcctgctctctctggtcaggattggactccctcggggtttcctcagcgacgccgcgtggtctgggggctcggagaccctcctcctccccaacccgcccgcccccggccctcccgccgccgcggcctcccacgtagcgttctgaacccgctcagcgctaaggcaagaaccagcgtggggagcgggccaggcgagcagaggctctaaatcttccttcactctgtgagtagatgaagtctgagaaacaaattcaaagcaggcgcgcctgcagagccttcctgcagaaatattccccggcattcaagcgcatccaggggcggcttgagctgccttgtttggctaaggtcagacgagactcgagttctccaataaaaataaatctcaaattaattatggcctcgagcgagaggccagacacttgaagctgcatttgtgcagtctggagttttggcgcttgcccgcccacccctccggttttctcccgccctctcctcctccccctttgccagctcggatacccgctgcggcctcgctggaccagaggggcatgggaggggaggacgaaggacggagggagaggagcggcccgagacattctgccaggcctggcatcctgcggagtttcaagtgacggagccacccctgggtctgttaccccagggaccaggctcagatcgtcaggtccgcccaccccaaacccagtctggggccgaagaagcccgggaagcccgtgtctggaaagtcttgaccgggtcaaaagggctgacattgagcgagccaagacacgtttcgacccgccgctcccctcccgggggaagcaggacttccgcatctttgaaaatactgtcaagtgcgaatggtgcgaggcaagtcgtctcaccagcgttccaaatgaaaatgctccaaatccaaatatttcctgagtattcacgcccatgtgcacggtttctgtaagtgaccccagacttggaaacatgtggtgggctgttttgttgttgggacatttttttctccagttggtagcttttgttttaaatactgggaagagcttccttggctgtgagctgcctctgacttgaaaaccagccccgagctgctggaaagtgagctgtcgccgatggcactcataccagctcctgttcagcagctctgcccagtctgggaaagggcgaggccattggagccatggtaagccaggaaagagggtgtgcacaagtgtgtgggcaggggcagccttccccaagctgggcccagagactaaggaaagaggaaggagagaagagaggagggagaggagagggaaggggaggtctgccccactaacacaagacagttttcatttgtaggccctcaccgcaggctctctatcaatttgtctcaatgcaaacattcaaaatatcccctttggctgctcgtgaaaacaatgtgagctgccaggatcaaaccatctttccagatgtctggtggtaaccacattaaacagggtagacttgtttactattgtgcttggttagggcgcttcccccatcccctttcaggatttaaaaaagcagcagtagcagtggagttgaccatcaaaccctgagttacataaaagtggggcaaactgacctacgggcatgccaacactggatggaggaaatccgagattcccgcaggcatctagtcagagttaggtggggtcttctttctgggtggagacctctgtgaatggacaggagcttctcccagggggctgaaaatcgccaacaacagtggcaccagtgccagtctgtgagtcccaaagggccggggtgcctgtgtctatgcatctagtggtgcctgtgccaggctctccactaccccccgcccatctccaaaaccatgaaattgccgtagctttggagaaacagaaagtgcgatggagttccacagttaaaaactaaagggcaagtcttcaatttaatctagttccatattgaataattccagtgggggaggcagctggtgctgaaaggaattgggggacagtataggaatgttcgggtgactactgattaatgtagtgaagatgatctgtcacttgccagaccaacaggagttggaaagagaaacctagccatggtgtctgccacagagggaccctctaaagtgctaggaggagggtggggggcagtcgccacctgtgggatgccatgaacagcctctgcaactggccagcaccaggaaggggggcctcctggtggtggagttggagtcctttctggctgaatgaggagcaatgtggctggggtgtgcgggtttctggtgaggtccgggtgggaagccgtctctccgcattctcctgaaagctctgttgtagtttgaaggtcggtagagcctgggctgaaaaggaaacaatttggggtttgaaaggatgtaattcattcttcctttcccgttaacctctttcctctctggaaagcacgtggaaacgctgaagggaggagtgagagggcaggcagcctgccgcggggaggaaagggttaagcctgatttcttttaattgaactccagaactggtggccccaggcaaagggggggactgaccccgctagcggtaaccagatgtggcggtcccaggggagccccggagcagacccctggattgagaagcagacaggagcggggggagtcagcccggcccccatcccaccatccaccccacccccacccccaacacgcacaccaagtctcaattgctggcaggctgcacccgccactccaggtctggtcacgttcagacccgtgtctgtattcgaacccaaaattggagccgaattgatgagactaatttctagagagggagggggagggagggagacgagtgagctctcgggctcaattgctcctgaagaaataaagaattaataagtcaccttttttcgcctctgtggacacccttttgaaattttttcttccaattgacttggatctcctctggattttttttccctctttcccccgtcggactcttaaataaaagtgagcaagtccaaagcgtggtccggagagcgtggacaaggtaacctgttttggatgtccgggagaagggagtccggccgaaagggcccagcccctcgaggctgctccaactggggcgcgcggcggcccaggagggaggcggggaggtctccgggttgggccggggaacgccggcctccaggctgggtagggaggacggtccagagcgcgggcctccgggtctcaccccgggaaaagtctgggtctgctctgcgctgttgcgtgctgcgctcctgggacctgctgactgtcctagagggaacgtcccgcggtagtgtcagttccctggggaccaggaagggcgactcttgcctgggagtcagtgcttgggccgtcgggtccgggtaagcgctgggggtttggctcgagaagatgcggataggtggcctagggcgccgcggatctccgccctctgcgggcaccgggagcccagggtcgaggcgcgccgccccgaggggccccttctcctaacaatgcgcccggaatggagtccgcgccctgacagcgcgggtcagcccgaaaccgcccagaatccgcttcgatgagtgggtgagccgctctgggagtctgccgcgtctcggcagcggagggcctgagtggaaaaattcttattggatgcactttttaatggttggtttgcctcggttttcgtccgagtcttccccggcagtaggcgctgggttacccgcagccctagccaactctccctccataccccccctaccccacccccaaaaagtttgtctccggctggaaaaagcattaatgaacgtatctgtgggaagaaacggaaagtgaatgagtcaggagggccaccttcggccaaccgcctcaggaaaagcaaagaagccaaaggtctttggctttggattttgggggaaggtgatggggggaggttcagacttcgggaatcagggcgcggacgctgggcgtggaccccgtcattgttcccggctagctcttatctcccaggagcaagtatcctgtgtgcgcagcgcatgaatgtgtctgggcatctccgcgtatatttatatagtgtgtgatgcgaaaagcaggaccagcaggggaggaagagggggtgtggggggggagggaagacgagggagagcagaggggagagaagagagaggagagctcgaggcgagagagagagagagagagagagagagagagagagagagagagagagagagataggacttcctccccgattcgcaaagtgaagtcacttcccaaaattagctgaaaaaaaagtttcatccggttaactgtctctttcgctccgctacaacaacaaacgtgcacaggggagtgagggcagggcgctcgcagggggcacgcagggagggcccagggcgccagggaggccgcgccgggctaatccgaaggggctgcgaggtcaggctgtaaccgggtcaatgtgtggaatattggggggctcggctgcagacttggccaaatggacgggactattaaggtaagcggcggggcaacggacgcgggcggcggggaccggccggggaggcgaagcggcgggcgggtaggtgcggggcccgcgtcccggaagacgtggcctctctcccttccctccgcgccccggcttcgcgccggctcctccggcgctcgggtggcgagtcctactcgcgggccagccggccaggcgcccgcattgagggcgaccctcccccgaaatcccagcccccaaagtggagccccggcccccctcccacctcgctgcccgccggggctgcaggaggggacggcgggaaaccgggggaccccagggtacggaacggagtcaagggcgagagacctcggggtccaccactcccaccgacacccggggctcccgtggccccagcgctaggcactgggcttcctctccgcagaggcggaacacggcgggggcgggggctgcagtcgcccgggctcgggtccctgcctggtgggccctggggtgggtaagtggcctcgttgcacgagggtaggggtgcaagtgagtgtgtcgggggatctatctgagcgggctcctccagatggaagcccctgtttacatgtcagcgctttcccttcctctcggcactcagtcgcccggctctaggcgctggagagccgccggctccgcgggactcctgggccggcctcgccgcctctccggcggggaaccttccccagcccccgtccgcacagatccctagcgccccgagcccccgcccttcgcgcctaggcgtgcgccggctccaggaccagggctcctggagctgtcgcctccgaaagggtcctgcgtccttcggagccgcctccgttgcaggggccggctgtgagcccgcgccccgcgcccgcccggccattcccaccccagccgccgccgccaagcctgggtctaggttgcaaagtgcaacccaggcggaaaggtgagggtttgggttcgcgtctcacttcagaaaagttgactgctgtctctgaaagggttcgccaagtagggccaggagcagagaggagggacaccccctaacgtgacgggccttagaggacctaggggaatgaatgggaccaggggttagcttcgaggctgccgcgcaacaccaagcgggagtctgtctggaaaaactattaggctggcgaggtggggactggcagagcccgccattccccagaacccgaaagaatcgactccctgctcagggctcagcaagagaaggctaagatgttgggctcagagaattcaagagatttttatcttctgggtggggtcgtggtttttattttctaagttttttttatgaaagtttgaaatatgctgacttaggtaaaagacaccaaccgaaggaacttgcaaatctggagatgagataactgactgtgatgggttaaagggagctataagagcctataagagcctgggttcctcaaacccaaagtgagtaggtgagaagtaggtgagaggggattcctgcaaagacccgagagtgggggtcattgggccattttatgcctgtttctctgcttcctgttgatgtgttcatgcaagtgtctctgtatttctgggtttagtaatgagatgctcccctctagaaaactccctcgccccaatcaggacagttaccacttactctgaaggcctcttctgatccagaagggtggtaagatggcctcagggtcttgatgtggacaccctaaggaaaagtgaagaaatatctccacactgcttaaactctacgcacaggccctgagcaaaaggaggaagctgtggtctgtgtacccaggatgtgctaacctctttagatacacacagggattggcatggcaggcctcgagaacaggcttagagcaggaacctgacacttcaggccaaggatgggagtgaaagtccttcctttttttgtgggtggtaggagccatgagctcctccaaaccctccctgtgagcaacctgtcattcacctaagttacctggctaggctgagtccccacagagctaccttcagtctccaagcattctgcaagattgagcctttagtgtgtgtgttggtgtttaagttgtgtgaaagccacagttttctgttcgcatgtgacctctggatcttggggtttccagatcctgttcccacaatagttcaaatactgtgcttggagaggacagtggaccaggagagaggccagcattcttctgctctcttggtgagaatgaaccgtccattaagcctgtttgagattcatagtcatcacaaaaatgaaacagtggaactaggttacctctacagtagtatctaaccaatcttctcagtgcctaaaatgtgctcatatgtgtttacaagaacacttgcctgtatgtgcactaaatccagccctacactgatcgaggttgacgacactctagagagaatctaatttgtgtacacaaatccagggtgtccatttccagtttgaactgcctggaaaaatcaggtttgagtgattctaggatgtgattttatgcacctgcatagttcttcctcaaatataagtcatgtctatatttcaaaatacctgtgggtcttggcacttaggtggtatttggtgcaggaagccagggaagtctggatttcttcacagaagccctttattttgtgcataatttgcacaactctatgtgattacaaaatcccaatcttgttgccctccttataagtccctccatattatattctcttctcttttccaagaacggctcctggaaaggctctgaccgtcacattgggagaagcaatatttgctggagccacgctactcttttgtcacagacaggttaacttgcagtattaaacaacacccgacccacgcccctgcttcccacactgatattatcagtgttaaaaagcacatgatactgtttgctgctttaagaaatgacctggtttcaaaaactgcatcttaattttaggctggcttcagttgaatccagttaattttatctatgaatgcctgactcagtgcacgtggtgtcattacagatggggagacagagaagacagacatggtgaatgaaggtgggaaatagagaatgaacagtggatttggagtcagaaagcccgggttcattctcagctctgctacctagtagctgtgtgccttatagcaaggcacttcttgtatctgtttccttatctagaaaatggggccaaagcacctccttgccacaagccataggaagaatttttaaagtctgctaccttagctggatacacattaaattaacttcatgtgccttatagcaaggcacctcttgaatctgtttccttatctagaaaatggggccaaagcacctccttgccacaagtcacaggaataatgttttaaagcctgccaccttagctggatacacattaattgaactttgcttttgggaatgggcataccaggacagattggtcagaaaattagaacacaggtccaaatttaccatcatgcatatttcattaattcaacaaatgtttatgatgcatctattatgttgcaaggctctgcactgtgtattgaggataaaacaggggtcaaaaccctccaggaatgtagacgctagtggagggagctgacacatacagagaacaatctcagttgagtggtgatatatcttctgaagaacaataacgcaggttagggaatggaaagtaatgacgctatatagccaggatggtgaggagaagcgtgtctaacaaagtcacagtcgggcagaggcactctctcgtcattaactccagaagagtacagcaccaaccacacagccagtcaacaatggacaagcacagcccgaaagaagggccagggttatggctggctctgcaaggctctggagggcaggttgtcactggcagggcagggaaacatctggacaaggtttggaagaagcagcagagtgaggaatacttgggaacagaggcttgacttctgtcctcaagaaggtgttgctgcctccctctaccacacacaccttgtaatctccatgtcacctggattcacaagaactccagacaagatggcctctgtctattgatctgtccccgtgaccacacagaattgctcccctcaggtggttaccaagtggaatcctgttttgtgtgtgaataatttccaccaaaaggcttccttccagttccactgccatccaaatttaagtttataggttggcaactttaaagctttagagagtgtttagcttgaatttctcactttatgggtggggaaactgaggtctaggttgttaaatgaattgtccaagatcatacagctaactaccaacagagtcatagtgaaagttcagggctctgcacccttaggccagtgttctttccactataccatgaaaatatcatttgcttttgttacatttttatgaattatagaatcgtggaggcagtgtgtgtatgtgtttgcgtgtgtgtgtgtgtgtgtgtgtgagagagagagagagagagagaagtctttaaaagaaaaatcataaagaatttggcactttacactaaagacacctctggtatttaatgaaaaataaataaaattgtatcactaccatcttgaattatttttatccttaaagaaaagaagaaattccaaatttttggatagaatttttatacaactgttttccaaaataagtccttcttttccagcagacaaagtaaacagtctccattacaaggagacaaccaaaaatatagtagtttactgaaatacccaggcccttctacagatcatgggcaggtagacagacggaattcttatttcagctcctttaataatggaatattggactatttaaataaaatctattagaaggcatcttatggatccatcagactgtgtcataagtaggtcttgaataacaattgcattaaaaaagatttgggattttcatgtctctttctgtttggggttaaacagttaacttggcatttgtttaaaaaacagttgatttaaaccaagcctctttctaggtatatagcattagtctaatgccagtactaagttacccccagccaaaaaaatagaaagaaagaaaagagttgggaaaatttttatattgatagtttttttgttctgtacttaaaacattccttttaagtctatattttgcttgttgttttgtaacgaattaagtaggctaagggacattgtctgttacgtacacacaaacacacacctacacacacaatctcataaaaccttcaaccagccacaatagcttttttcgtaatctcagagttatacaggtgtcttttcctctgcagaagactacaccctgtttcaatttctgttgctttaatgatttcatatctatagcgttcttcccattatgtattaattgatccatgggatgatatcattaagtgatgtcactctttgtgtattacagttctgccactgacctgatagacccaccatcagttgcctgtgcactgagatgtttccccagaggctatggatagggttatatgtccccacactatctgcagggccaatatagtgcaaatctgacaaaatttaggtaatctatggaataaacctttcctgtgcaaagctagctggccttatgggaattggtggtacctcagtctcaggggcatcataaactgaccaaccatatgaaggtgattgcatgtctgttaggcagggactaaactatgttctgtgaagatagaaccccaatggcaaaagggctctgccaggagatctagcgagaagataagccacatatgtgtgccctgcagagcacagcaagtgttaccatagccctgagaaaagaaaggatgatttgaactggagagacagacaaagacctcatgataatagttgtttatgtagtccctttcataaatctcttcacagatcatacagtccctccacagatcactggcccacacactcttgcatcccattctcacagtagccctatgggagataataccatgatgtctctacttcatatggaagaagttaaagttcagaggagtgaggtaacttgcccaagagtataactaacaggggacagatctgggtttcaagcccagtgtttctcattcctgattcctgcttttactacacacactggccacactgcctcttggcacaggtggatctaagcctggccttgaaagataggtaggtcttgcataggaaactatggtaaagggctttctaggagagtggagggtactttggggaggaaagtgtacaggtgatggagaggatgggagtggaaagactgaattgaactagactacagaggaccttacatactataacaaagaatttgggggtgagtatggtggctcatgcctgtaatcccagttctttgggagacggaaatgggtggatcacttgagcccaggaattcaagaccagactgggcaacatggagaaacctagtctctacaaaaactacaaaaattagccgggcatggtggcactcacctgtagtcccagctgctcagggagctgaggtgggaggatcacctgagccaagggaggtcaaggctacaatcagccatgagcgccactgtattccaccctagatgacaaagtgaatacctgcctcaaaataataataacttgggtcttgtaacatgtatagaaaggaggaatgaaaacttgtgactagagggatgatctacatagctgtacaagtctcttagaaacaaatccttcgtactctcttctccttaggaaatgaagatggaagtggctccatcacttatcagaggccacacaagaaatgagcagcagtcaggattagacaaccagagatagattcaggcaaccagcagtgctgtcttctgtcttcaaagacacctgttgattaaatatggcattaggggagggaggagaaactctatttcaccagatgacataaaactgtgattatccttctcatcccttccttcccaggggatttcaccatgagcaatcttttcaattgggccttctatcctgggctacaattttagttccttttgagaatgagtcagcagatagtgcttgagaggagaaaaaagaaaaaaaaaagtctctctaaaactcaaatcaaatttctgtgggccttcagacaagtctgacattcttccatgagttggctgggccgctggtctcagttaggaatactgacacttcaccccagcaaaccaaaaacgcagagactcatcaccgtcattccaagtaggatcagagatggagtgttcagacgcattttcagataattcagatcaactttacagtaccttcaaaattgctcatccctacaaaaatgaagcaaacactaatgtatttaagagatttgccatctttgggaaacaatgtgtctgccatttagtttaagatcaaaatctcagagtatgagaatttttcaaatcacctcaaagggaaggcagacttgaacactgaaatgctttcccaagagcaagccccatttacccagccagtgctatgtgtccaaggcaatgaaagatcttatgtcacatctcagtgcacacatgcaagaggctggaattacaggtgccatgggagctttaacctcgaatttctagacattgtgtgggtttcacatgtctactggaatctaacactccagtagcagaattgttaggtctgaatatatgggtattcattgatgttatgggaaaggaatcggagagtgagcaattctgcagtaccattcatgtagcaaaagtgtgaaaacaaacaggttaatattagaaaattactctgctcatgagttgttttaagttactgctgttacagtctatggaaaagcgtatgtttcaattgaaattctcatgtctacagagtcattttgtctttagacatttatgactgaattcatactcattcatgtattcaatactcattcatgtattcattcacccaaatgttgaataatattaccaggcaccaatctcaatagagcattcatgtaaatgaacaagaataaggtttctatgctatttcttccaggctttgagagagtagacatttctcttctttctgatttttagctctgagtattggaaattccaaaagaagcaatactcattggagaaatctttatttgtggcttataatcataaggatggttagacacattttcttaaaggtaacaaccagtttatattctccattgccccttcacccttggtgatataatttactgtaaggatatttttggaaggctaggtcttcagccaaggatatttcttcttctgattctccctttctcagctttagttcctctatttatatattaacatggggccaggcacggtggctcacacctgtaatcccagcattttgggaggccaaggcgggtggatcacctgaggtcaggagttcaagaccagcctggccaatatggtgaaaccctgtctttactaaaagtacaaaaattagctggtcatgctggcgcatgcttgtagtcccagctacttgggaggctgaggcagaagaattgcttgaacataggaggtggaggttgcagtgagccaagatcgtgcctctgcactccagcctgggcaacagggcgagattctgtctcaaagaaaaaaaaaaaaaacatggagaaaaataccataggtaaggtgaaaactaaatgagaaacggagaaagaatatttatcatacataaagcataaatgtcctatcatacaaagactacttacaaatcaataagaaaagacacaccacttaacagaaaataggcaaaaatgctatgaatagacaacactagaaagaaaatacaaatgggcaataaataaatgaaaagaatttcaagcacatgcataaagacattcaaataaaaataataaaattccaatgtttatgacctaggaggacagcagagactaaaacagcttaatgtctcatgttggaaagagtaaaggaaatgtcactgtcttatcctcttggtaggagtatgacttggtataatctttccacagagcaacatctatttgagaagttaactatttacacaaatttgataatgccaattctacagctatgttcactcagatatatgtacaatgtgtttattgtagcattgtttgttacagcaaaagttggaaataatctaaatgtccaccagtaggggactagataaacaaaggaggaaagattcatgtaagaaaatgccatgcaactacaaaatgggataaaatcaattgtcgtatacactgatttagaaaattctccaatgtatattattacatggaaaaaagcaaaaagttccaaaatattgggccgggcacggtggctcactcctgtaatcctagcactttgggaggccgaggctagcagataatgaggtcaagagattgagaccatcctggccaacatggtgaaactctacctctactaaaaatacaaaaattagctgggtgtggtggtgcatgcctgtagtcccagctactggggaggctgaggcaggagaatcgcttgaacccaggaggcagaagttgtggtgagccgaggttgcaacactacactccagcctgggtgacagagcgagactccgtctcaaaaaaaaaaaaaaaaaaaaacaaacgttaagagagacacagaaacagacttgtaaaaaggtgaatgggcaccaagattttatcctgaatgtgctggtcccggtgactttaagattcgaaattgaggtaaatgcagggagaaattggctggcctaggatccggagacctgagttccagccccagctctatcccaaactagctatgggatgttaggcaagtcacttcacttcctcatcattcatgttaaaggtcttctcatatataaaatgaaggtatgatttcaaaatttgctttcagctctcatgttcatttgactctgatcctagacaggctttaaaacatttcttatttgggggtgtggatgatagaacctcacgtagatgttctatctgatcctgtgtggctcttctcccataatctcagggctacattttgtactgtggagtgaccctcaaggccaggtgaaggcaggggctctcagcaggtgcttggtgagtttctccgagctggttgtttttattgccaagtgacactagaactgtgctaatccctttccgttaatgcaaactaagaatagggcctgacgccactctggggtcttagattcttttccgaaatttggtctcatttaaaacccaaaacactctttggctccaagcgtctttcccgtggcctttaaaaaaatcctgtttaattgaaaggaaattgaatttgtctggttttgattcatttacacttaactcttctaaaaacaataatttgatgtccaaggagaattttgagtctcttaatgggttttctggaaggctttgtttcttcttgttaaaacaggaagtggtgttctatgggcaaacacagtcaaccccagaaggccccaattcagtttgaaactgtatcacccaccattttgcatgggtcctcatgaccccaagctaaggcctttctttccctagtactcacctaagagaaagagatgctcatctttcatcagagggggaataaaaatgaggaagaacaatcatagttataaagagaataagttatctatccagctcaaggtgacaatatctattcaaacctttaagacatgcacttgatccctgtaacaaccctgtgatgtatgtaatatttccattttgaagagattgggtaagttactcatggtcatacaggtagaaaatagaaaagcaattattggaacctaatcctgcttacttccaaattccataaagcttagccactgtgatacatcaccagattgatacatacatctccatatagtttaggctacgagcccatctatggggaccatgtaggttttgttactatttgttttatctctttgtctaagtgaccactatccacagtctgcaccggtcagattcatgaaactgctcaattcttcacaactctttattcaagaaggcctatttcccaggtaagaaagcctgcctggctttgttagcaggtgcactggtgtgaaactgacaggttctctttttacataatgatccaatgagttgatttttaaatgttttatagctcaatagagaacggcatattctttgacctgccaaggcttcctcctctacccttgtaccttcgttctttcttcctttcctcctcgaaatcttgctctcttcttcattctattccactcatatacacacaaaactatacacaattttttttaaaaaacataacagattcaggaggttatataaaacacaaagaagggaatgttttgcgaggttaaaaggaaatcattgagtagggctgacttcaggctccagtttctcttgaatagcctttcttgttatttcaaggctgattgacttataactgcatccaaagctgcctcacaccagttccttttatcagaccaagtgagacttcctgtggactggcccagcttcctgatatatttcctttttcctttggcagaacaaagaaaaccatagctccaaggatccttgggagcaaacacaatttagccctgaagaacctattattttaaatttttcattctcaatgcgtagggccaagcgcctgcctttgctttttttttccccacagcattctgtgtaatgtcccgatgaaccctatgtgcaattaccaggggtcgatgagctacttgaattcatcctagttgtagtttgattttattcaaagtaggaaaattaagccattttcagtgcacaagcacccccacctcatacacgcatacaccttcaagagggacgtggaacacctctctacatagggtttaaccttttgttacctgagctcaacacaacaggtgtgcaaggaaaccctcttgtctagagatttcaacctatctgtttttgcagttctgactctagaaacatgcgtataggagaagaagcttcaaggtgtatccaaaggatcatcaaagtcagttgaagaagaaattccagaaattgagttgagatcgctgcttttctcttttgcctggagtgtctcccacatcactccatacaacgtggcctcactattcactctacacattactactgaaagacctttaggcatgacccagggtaacaagggagcactgttaagaaagttgcttgtttctctgtcatatctcccaaagtacctatcacacattgccaacttaggatagccccctccccagtagtctcaaaaagaaagaggccattgacggagagacaactgaggcttcaagatgtagtgtgtcaaaagatgggaaccaggcaagagcccctggaagcagaactcaagtattcatgcccccaaacaccacgctctacaatgagggtgttttctggagcaaagatatcaaggctcatttaacccacagggactcctgcttctttgttcattggtcctattttctgaccattgtcataatatttctgggtgattgaagagggcactttccataggaaccacatgggtaagtgagtaatcatgtagccacccaaattttactaaagtagatttttctctttaaaaggattgctgatttggaagagggtaaacaacaaaacaaatgtagctcttctggcaagaggcatttcttagggctaattcaacatggttaattcataatgatttttcctaacccagttctcattgttatcatgtctagttgaaaatggatttaaagaatattcacaaagaagaaaataactcagaaactatgtggcatgaggagactgtgagggggttatgggcacggttggtgtgctctgctttgtataacctgcttgggcgatagcaaaggcaaggggttaaaatgactgccccacactatgagcttaggatctttcttttcccagcacgatactctgtcaatagccctgtacccaagttcatgaacagtcaggaatcctgaagaaaagattcatacattatcttaagcaacttcccccgccctgataacactgcctgtagagaaccatgctaacctgcccttcgacttctccataataagaacacattggtcgaagggcacaagtcctctttctcaaatacggtctttggtgcaacataggacttccctagaggtgagggacttgaagggcacctgtactttttgcacttttctagaaaggagagggagaaagagcaggtgacttttctagaaacgtcatttcaggaaaccagcatgtggagacttcccagggtgccttggggaaggcatccagccctgtggctgtgctgctctgggcttctaagccattccttttggagactgtgggtctctataaacatactgagtctgaagtgtggtaaaggaattaccatggctccccctccctgccttcttggagtttgccccctgagttttgtagacaagccatgacagggcagtaggactgggtttagagctcatcagaattatttatttcttcctatcagtttggacagggtatgacccagactcttctctgcccagagcacccttttaaaaaatttaaaaccctgtgtgtatttcatgggaaatttcacatgcctgtttctgattcacttccaattaaaggctcaaaacactggttttgtaagagctctttgatgattcagattcttgttggttcatctttttttctctcctaaatgtccatagaagcttaataaatgttgttcagacatttgcatgcttaactgttgaaaataattggaaacaggaaagaatgttttgttagtgtgcacagtacaagcacacttacaagggaaggagagacacagcctcagtgaagggaaactcctgggaaaacaggggtatccctgaaggtgggtgccttggtttccccattgccgtgcatgggggaggaagctttcagctcagagctaccaaaaagggagaggagcgttacatgagacacaagaatccttcttactgtggtcagttaccatcgacaagcagtcagttgagtggtcagtctcatccaagatggaacaggtggattggcattttccatatgctaacactacttttaactcccttctgattggaaggagttggttgtctgctattagagcaagcctcgttctccacctcctttaaaaactttgctggtgaagctgtctaggtgcacctgtgcctagctcccctgagagagttttatatatcggtccctctaaagtgctaatgtgggcaccggcttgggtagtctgagttctgtacctggttttgccttaggctggcttcgtgacattggacaagttactctccccttctcagtgggtccatttacccaaaaggattaaggcttcttgatgatcctcttcttccatggatttggtaaaaaactggagtagtgagttgctttgagtttcttcaagaaaagcgtgaattaattactacactttgactaactactgggtggctcattggatggctttcttgttgccaatgtaacaagattgctgtaaatcatgcggcatttcagattccgagccttatttggactttttactaaagaaagagcacccgccccgtctttttatttgtcaggcaaagttcagtcagccaatattcagttagccaaagttaccaaatgtgacttcatgcccacacaatgtaaatataatgtgtcaatgctgtgtgctgtaaggtgcttcttgcctaaaaaaggtgagacaaaaccttaggaaggctggcagtaaacctctggagtattttgccagattactgtgacagtggcagaatgattttgtgaaagccacatgcagtctgaagtttggaaatctaggttcagacccacttattaattgtgtggtcttcggtcagataataacttctccaatctcctttcctacctgtaaaataatagtagtactggtagtaataatgcataacgttaatttttctaccaaccttactaataataagaatcaaaagtagtatggaagtaaaagcactttgtaattgtaaagtgctgtgcaactgctagttgttattatcttagttattattctcattcaagtcgatgcatgaatataacagataataaatgtaacttaaatctgttgggttgcttttttctggccttagtgatttcaaagacttgcttgcatgtggttaaattcaccagttagtgacttattcatatctctttgcccatgtagacaccatcccctacaaatgcacaagtacagatcaaacatcccatattcctcctttccctcccacgtatccggccattgttctacttgtgaaactcccatcccaatcaatggggggtttacgtaaaaaccgatggcaggatatgagtgtggcttcaggaattccaggcttgtgctgctgataaagagagttgtgtcaaacagaaaacaccagagaaacaaattctcttgtccaacctatgctacagcactcccttgtgaatagttttaaaacatccgtctggctgaccaaatacctatggctgcctccacccatacatctacgccacctcttctattatcttccccatgtccttgtggtaatacagtacagaaccaggctagaagtaggttaattcagagggagataccagtagaactgagctccctgattaagggatgtgaatttaattgggttgtgacagtctgtattaagtgtaaatgctactaataggtttaactgactttggtgtgagtgaagggacaacagaacaaaagaagtaatttgccttgaagatgatcctcttttagtgttgaagtcacaagtgatggaggcccttctttcacttaacgaggccaggaaagctgggttggtctttattctcatcatgcatcatcaatattttaggaaaggtcatattgctgtctttcacggtacactgcacaaccaagtatgattatgtgaccagaagtgaagggaaggagaacatttgcccatattctacccacactgaagtagctcaaaaatgaagagatgaagaaaggaaaatggagttgaccatttccatttaagtgctcattcagacatttagtattaaaatgatgaacttcttttgcaatctttttattgaacgcattgaactaggtattagggtgttatccttggccaacagaattgggatttcaaagttcatgaggccgaacattgaactgctcaaacactagtctgtagttcctagggaccacaatctagctaagatcagccctactgctttttctccatgacaacaaatcaccaccaagaccgagatgctgtattgaaagagcatgctgtgtttttccacactaacaccacagagtgaaggtaaagagattagagagcatctcaaatttatatttcaaattatgaagaacatctgacacaatgaaagcaaatgcagccttgcagaaaatttatttgtctatctttgtgatgttggattgtataaagggtttggacatactcattgtcctaccaccttaactacataaaaaaatataatctcttcagctactaagtttctgattttgcatttgatatgggagcaatagtattttattgggctacacaaggttccaaaatctctcttttgaagatattcatgtgtaggaaactctgtaacagatatagctcttgcacaatttttaggagaagagatttgggaaactttatcagtttttctcaacctttttaactctatcttaaagtccaaggaaagtgaaagattaagaaaactttccttatcagggctgtccaacagaactttctacaaacatggaaatgtcctgttctgcactgttcactatggtagccactgtactctctatttgagtggctattgagtatttgaaatatggctagagaaaggaaatgtaaaattgtgttcttttttcattaagtcaattaagtttaattagttgattaatctaattaattaaatatggttagaagctaccatagtgggcagtacaagactgcatcattcaagttaaaaacatcatcttgaaatctgaattcagtcagaggggcatatttacacggattattttgatctgagtcagcaatgtgttgtccacatggagactaacacttccatttattcttatgactaacattaaagcaaagcaaaatgaaaagtgaatgttcagcattatcatgttggcctggggctggagctaagttttctatcccgtctcctggcttcatcatcaattctctgctgacctttaagaatgtaatactttatttcccttttatcaaatgagggcatttggaatttatcaaaaggatagtcacgaatcatgatcgaatgtttattgggcttatcaaagaaaggtatgggctttgccctataccttttcattgaaaaataatcttggccaaaaggaatccctattatacataatggcgatttcagtttctccatttgcaaaatactggcattgtacttgcttatttttaaggtcatttttagctctaatgctttatgccaccatgaaaatatgatttcctattaggtagagctccatactattaacagatggtttgcttttctagttcccagatccctataaccgtttgtaatatttcttcttaagtataaatgtgaacaaagcactttaatttagcaaataaccagctaaagtggtagtctttgtctttttttaaaaaaattttattttaaaacttactagttagactggtagtccttgaaagccaatttctctccaatgagtattccctaggtttgtattcaacacagtttggtcgtttgtcctctccaaatctcatgttgaagtatgattcgcagtgttggaggtggggcctggtgggaggtgattagatcatggggggcagatccctggtgaaggaattagtgtcatctctgggcgagaagtgagttctggctcagttagctcgcctgagatctggttgttaaaagagtctgggacctcctccttctctctcttgctcctgctcttgctatgtgacacgctggctccccattcactttccaccacaattgtatgctttctgaggcctcatcagaagcagatgctggcaccatgctttctgtacagcctgcagaaccatgagcaccatgagccaaataaacctcttttctttataaattacctagcctcagatattccgttatagctacagaaaatggattaagctagtgctgttctatggtacactgtattagtctgttttcacattgctggtaaagatatacccgagatggggcaatttataaaagaaagaaagaggtttattggacttacagttccacatggctagggaggcttcacaatcatggcggaaggcaaggaggagaaagtcacaccttacacggatggcagcaggcaaaaagagagcttgtttaaaaaccatcagatgtcatgaaacccattcactatcatgagaacagcacaggaaagacccacccccagaattcaatcatctcccaccaggtccctcccgcaacatgtgggagttatgggagctttgggtggggacacagagccaaaacatatcatacactttccaaagatctatatccttgatatcctgagacatgaagcaatttctctctacccttcatacttctcacccatggataatagaaatatattgcctgctacacctcctgtggttttagaatcactgtgaggaataaataccccaggctttctcatggggagatctgacttcattactgaggtctcgctaatgagcagacctatagcagctttttctttggaagtcttcaggtacacatcattgcgaaggtcaatcctgtgtccatcactgaatggcataaatttgtgaggtgaactgtttaaaacaaagatgggcagactcctctcagaaaatgaggccatgttcctagaggtccaactctatgtaatggtcttaggggtgatgaagcactgtagtcctgcttctcactcatacctgccctccagaaaggataaaattataaatgtccaattagagtctttattagtctcttcctatgtagaatttatcaatagtttgacagttctgcagctcatgcattttcagaaaaatccttcttcagtttaaaacattccaccattgttttttgttgttgttttttcaaattgcattgggaagaaggtaaggagtatgtatagaatacaattctgtgaacaaagtgagtgagttacttgctccttgagggcagaaactctggccatttgtcctcaagtcctcagtgcctgacacatatccatgtattaattgagctgcttctatgtgccaggtgctggagtacagcagtaaagcagacaggtatagttcctccttggacagaggtaatagtcaaggcaaaaaaaaaaaacagttattgagcttgttgttataagtgcaaagggttctatgaaaggggaagtatggggtgcctcgggagggcacaacgtggggacctaacctagtctcagaggtcaaaggcttccttaaggaagtgacatttaggccgaaccctgaaagataagcctcggagtcagtatgaaagagaacaggccttccaataagtctttactggatgagtgaatgaatgaaatggccacccggggcattgctaaattaagtaccttgagcttagtcatcctaaccatagtccccccaggcattatctgtgtggccataagccattttcttagccactctcttcttcagtaaaggcaagtagagtgtaatgaagaatactgtgagaggacaattaccttagaaggcattatcagactaatgttttactgagtgcatagagtacatatctataggttaatatgcctttactatgcaatgcatccagaaatttcaaagtcaagaagattctaggaggctgaattccacctttagaaatctcagctatgaaagctctgggtttcaacttgatataactcttcactggccagaaaaaaaaaaaaaaaaaaaaacggcaactctttggcaaatagagctctggaagatgcgctggctggcgccgacataaactgctatcctgatctccatcaaagatgtgggccttctcatgctgcagtttcctcaactgcagaacagggagattcttccaatgataattttacctcgaagtgatgttgtaataaagatggtggtaaaagcattttgcaagaccaaaaaaagaaacacctactaaacaggcatgctgtctatatctggtgtttgttagaatttctgaggaaaccctctggtctaagattctagagagtctacagaggttgataactgggattggcttttaagatcttttctggaatggctgttccctttacctcattattactttaaacaactttggcaggagatatcagtaatgccaataacaataatgatgatgatgatgatggttactgagtagttactgatgagcccagcactgtgctaaacacttgaaggacctttttttttttttttttttgacagagtcttgctctgtcaccaggctggagtgcagtggtgtaatctcagctcacagcaacctccgcctcccaggttcaagcaattctcctgcctcagccttccgtgtagcttggactacaggcacgcaccaccacgcccagctaatttttgtatttttagtagagacggggtttcaccatgttggccggaatggtctcaatctcttgacctcgtcatccgccagcctcagcctcccaaagtgctgggatgacaggggtgagctaccgcacccggcccttgaaggcattttagcacttgacttccaccacagccccaaggaatccatctatcatgactcgcacgcacccagtgagaagaaccaagacatacgaaactcaagtgacttgccaaaagttgtgcagctagcaggttctgtctgataccaaagactttactcactgcatatgtgaaatattttgagattttcagaataagagctcagggttgctaagtgattaaacatatacaattaattattcctgccctggaagacaagagtgttaccattagcagaagtttatttttgcaattcctctggccttctggtgttcccacatgcctccaccccttttcctaacgtattgcttgcctgttgtttaaagaaaacaaaaatttattctcaaacttgtccaaatagaaatgaattgcattaaaaatagtgaaagccatggtgaaggactgaaaaagttgaggagtcaatgacatttgcagagcccctgctgtgcaacttccatgggactaccaggaccgaggctatattttattaataagatctcaatttgtaagggtcattttattatctccgtatcccccatcccacctcatttagttggatgatctagagagaaaacagcatttctaccttcttgcaatggaaacaataggctttgcttgtgccacttttattttcccactggggaatctgagagatgacctgattgaattccacccgtaaaggtcatgctttgaattcaaggcagaggaaaaaaaatgaagaaaacattttgcaatgataccccacgagtcctgagcatgctggggcctctcctggttgcattgtggtctgctgataaggataacattaatgacaagtggaacatttccaggacaaaggaaattccctgttgtattgtttaaaggaagccaccatccactaaggagagcaaggtttgtgatgtaggcacagatttccctgcaggagaggcagggagagctgccaagctgcctgtgagtatgcctgtccttaatttcatctggggaagcatttgcatggttagaagtcaataaggggtcatggcagtttatggcattggtagggttaggagccagactgttagaaatggaggcacattggctgggggagtaaaaagcctgattcatacaatgcagcccatttaggaatcatagcaaaagcaccaggagatttagagaagttgatctggttttgagtttaaattctggacctccttctctccccaccccctccaagccaaaatgtcagaaaagggcctggtttccctttatggagtgcaaaataaacagatcctcagcagcaggagaggggcccagttccccagcccataatgccagagctgggggtgggggtgctgtggggaaaagcagttattcttctgtctggttagtatttggcattgactttcattttctccaacctctgttttctagaagcctgcctgtacgggaagtacaggaataaagagaagctgatcgtgggggttttcttgccagacttcaaaggaggtggatttttgatttttgatagtttggagagctagttccaaaagtaaaagctgctttggggacttgaacctagacactgggatcttagccgtgtgcccatcagagccgctgctctgctcctgatggaatggagtgctctgggcttcccactctcctctcccagtccaggagggctggagctctgggcatctcagggtcagctgcggtgagcctggccacagggctctgcattccttctgggctttgcttggtttgagtgggtgtgaccgccagtttactctggagaaaactgagacaaagagtctaaattgggcaggatcttgaatctaatgacttgtttacagaccctgtactttttccagtgcagggaggaggaagaaggcagggcatgctcgtcactgtgggcatgggcacattgctgttttcatcctaaggaggtaggacagcttcagaaagcagcagggcatctgcctggcagccagcaggcaaagtggcatgctgtgtaattttccaaggtagggaggaagcagtggcggcttctgcttggtcctaccggcttggcttccggggcacacgctgctctggggagaatgcctgaccctgccacatgaaaggccttgcttcctcccacttcagcttcaagcgatggggagattaccctcctcacccctgctccaagtgcatcacaacccagagcacccagccaagaatgcacacctgtgatggggctaaggaggcctcactggacctgtgtaaggagagaggagattcccaggaggacctcactaatagaaaagcacacgcatgatggttttgctatcgtgtgacatttatttcatacttgctacctgtaagaaattccttgaaaacgaaatagtatatggcaagatttaaggacttgctcttccagattctggaggtccttctggagcccagggatgctgtttctaaggcatgtaggtgctgagggtctaccccaaagggcagtttgggactgcagggcaggcaggaagtgcctttgtttgtgtgcatgccaggcggtttataaacatcccctttacttcccttgccaacccaggagtatatattgcaattaccacattctgatgaggaaactgaggctcagagaagttaaatcattcactccaggccatacatctgctaaatgtgtcatgctacatccactttgcacctagtttgaacaggtttacaaagcaagtcagtaacccctgcatgcctgggtgcctgaagttgaaaaggggtggctctaagatgtggtctactacctctcctggactgttgcagttgggtgtggctgatttgaaattgtgcttcaaaagaatgagttctagtccctgaatagaggagctcacaccacagtgcactgtagatctttgtgatccagaagtcctccagatgttcccaaaaggatctctaaggtgttgctggggatgttgtgtgtatagggagtgttcccttgggggcctctgagccctcctggcagagaagcctcatagataatggcatccccagaaaactctacacttggaatgggacccaaattaaatacagcaccagcaagactaactgagccactacctggaatatgtcaagatacagcaactaacacttactttatgtttgtcatttgcaaaccctatcatgtccgttaatccattcaaatgctgagaggtaggcagggcagctattatgattcaaaaaagaggccacatctttgtggatttgggttctaatcccagctcctgccgtcactagatgtgtgtggtctgagcaaatccttccacttctcctaaccttagtttcctcatctgcaacatgagaaacttgctttccaaagtgcctcaagctatgggagtggggatacgggaatgagtctccccaacattcagaggctcccccagagctggcagcccaaggcacaccactaagtgccactgccttctcctcccctctgctggccggatactgaccaatggagaaaccaggactggggcgggaaggagtaggtggtaagattctttttcacttgtttcctgcacctggagacaacagcaagaccattatttggatgagttattgtttagagttttgtttgttttggtttgggtttttttagctttatgaaaagaaatgcctatttttcaaatttcaattgttcctttctactgcctgtccaagctcactacttttcaagaggccaatccctgggtaaatcttagtgaatagcagtcgactgtgttatttatctgtgccccatgctggaggtgcagactcggtgagaccagcagagcagctgaggttagactcagtggaaaatccagaagtgcagatgtggatccaaattgggctgaaaaaatctcatgagatcaggctttcttggacttcctgcttttagcctaagcactatgttcaacataaacgaactttcggtattttgaaacttccgtttctgatctcagaacctggaagtaaagagctgttgtgaacatttccacaaattttgtcatggttattctggaggcagagttgaaccctgtaattacggagctttgggactcactacacccacagtggcctgcctggattgcagtatgggagaggggaaggcattttggtggagagtccaggctttggagacaggcaggaccctgttcaaattctagctctgccatttccggccatgtgactggacctgtcagagtctcagtttcctcatcagttagattaaaaaaaaaaaaaacagttcgtaatgttgtgaggacaaaatggtctgcgtgtgtgtgtactctttctccccttttcccgtgtgtgtgtgtgtgtgtgtgtgtgtgtgtgtgtgtgtgtaaaatctgtaatatttatttacttatagcttgaataagttcccctgggagtctcaggctgcctgcctctgatagatgtgacattgtgaagttgctgaaatccacctaattagctgtcaaagagtgcattatacaaagacagcgagggctctgcattcagtctaagctctaaggactggcacgatctctggtggacttgaagggcaacggagacttactgcaaattttgggagctgaattacattcatcccgtctactcatgtttctggggcctcatttgctttcctgggacaagcaagggcaaggcgctgggcaggtcagtgctgtgagaaagcaaggtgctccagcagcatggagtcaccggctgaaatggacaagagctatgcagggcaaggaaaaagggaggagagggagtcagggccatgggagacaagggacatggaaaacccacccaaggctgctgagaaacaggactaagttagtaagcccatcctgcaggtgctactacttcttctctgtttcttggcttacttttttttaaaactcattacgtgcatcgtttaagttctttaaaataatgattgcagaagtgtcacttcatccttgtataaaatttaaaacgtatagaaaatttcaaaataagaatgtaaaagcacgcatagtctcacaatacagaaagcagccgattcatattttggtgcccttccttccggtctttataatgcaaatatatagacatatatgtattattttatctagccagaatcatattgctttgtaacctccttttattctctttatattaaattacggccatgttcctgtatcattaaatattacactatatcactacttctgatggaagtacagcaaaccactaaacacggaagtcaagtcctgggctctggaatagtatatattattttagttatgcccagcttctggacctgggatggcattttgtaacagacgcagccttatctcttttgtattttcataaaatcttcagtataggctctaaaaaggagcccacgtgaaatgctgaaaagacgatgtttaaaaagtcacaaagtccccctagagtcataaaaccagaaacactggggggtggggaggccaagccgggccttcgctcacctccttgtgcctcttaatgcagcccagatggaagcccgtccaagaccggattgcaggcaagcccagggcccgatctgatagcacaaagacacccacaactctgaatttcctgctaccaggaggcctctttttgcataggctgtctgatttacacatacgtggaaagcagccactaataatagaagggttgcctcttttcttccgttgtcagactccgcgggccctgctcagtgactcccgcgtctccaagcagctgcctgcctctctttctgcccctcacagcaacagggtcagccgggctccttgtaagaaagaggccaggccctctgcgccttctctgtgtgtggcggaggtggggaaggtgctttctgagggctctttgtctggcgagcaagccggacctctgtgcaacagaagccgcctctggccacccccggcccttccccctccacccagtcaagttctgcacagccagtgttttctcctccagccccagctaacctgagctctctcaactaatccagagaagcttctggagaatctgtccttgccaactaggggctggcaagttcgtgagagagaattaattctctgtgagccccttaagactagtaactatgtggagctcacccctgtaggatgcaccacagacagctggaatggtcaagcccttcagggatgccttcttctgctgccttgattcacatggtgccatccactcaatcattcattcattccgccagcctgtacttggcacctcctattctcagcacggtgtagaatatagggatggaagaatggaggcgaagacagacgaggtccctgctgtcacagaagaaacaaagaataaaaagagaagaaactagaattgaagagtctgtggtggggattgcaggggagatgcctgtcaagttataaaaggccctaatacatttttgctttatgtttgaaattgtgaccctgtccttagcctattcccaaccagcctcaagcatggttcagtctcacagtccagctgctgagctgtagagagaccatctctttatacaagatcaattatgggtgcaagagcatgcctggctcaagcacacagacccacagacccttgtggtcagggagttcctacatgaacccaaacctttgggggctgggatgtttactcttggcactctgggatttcctgtttctaagaaaatgggcctagatgctcagctacattaaccaaacaacatgttgacacaaatgaatctgaagcttgcccgctccaggctctctagaaggtcaggtttgggaatgaaggcatttgggtgactttccaaactctgaatcccaagcccagtgactcaggccaggtattaatttgagggatctgcttccctcctcttcctgcctaagaaggccccactaagtggctagagtcagaggctccctggtcatcttgagtagtgggaatgcttctcctgtctgtctgcagctggtcttagagggaggcagcccaggtagtatggtaggatgctccaaaagacccaccccgcagaaacctccatcacgtttctgtctgcctgaaatccttgccatgggttcactcctttgaacgtccaggaggttcatgtaaaaatgtaaaagttaccccctgacgtgacttaaccatatgacatttgacacacgactatatgacatttactatatggctgagcctagcaaggtcctgggaatatggaaaacctgaaacattttgacagggtatggaggagaggaaggggagaaagcagaggaaaagctgacaaggtcaagggatgcttctcggagaagggagaagggcaggaggaggatgttcaggcaaggagcagagcagcctggagatgccagtttggtgattatggacaccttggctgcttagccagaggtggccctcacaatgccattcctgctgtgcccactgcccagagtgccagcaaacactgcaggatttgcttgctcagacttcaggcaatgcagctttgtctgctggggagaatcttaccatttttaacctgtatttgaaccaagagatttgcgtgacctccacaggaaagtgcaactatcttccaaaaatgtataaattatcaaagatgtattctataacaaaaatgacagtccttgagatgtggtggattaatattgctagatcaggagctactcagatgaggtaaagtccctttgggaaagcacagagcctggggaatgagggatggaggccagtgtgcagaaaagccgtgcggaaacacctcgtgcagtcattctcctatcgagctctgggaaccgcggggtgggggagaatccaaacaatcgggaggaaaaatatccctgttctagctgttcaggctgctgtaatggagtcccataactgggtggctcatcaacagtgaatgcttatctctcacagttctggaggccaggagtctgagatcagagtgccagcatgatcgggttctagtgagggctgtcttcctcactgtgtatctgcgtggtagaaagagggcaagctagctctcttgggtcctctttattagggtactaatcccgctctgaaggctccacctccacgatcaaatcaccccctgaagatcccacctcctataccatcacattgtccgttaggatttaatgtatgagtctggggagggacacaaacactcactccataacaacatgacagctggcaccatggcacaattaaagagaagagaggagcaagtgggggctcaggcagtgtaggcgggatggaagctccctgtgggcttggactcatgtaggagggcttcatggaggaggtacattgtggtgcaggaaggcccatctccatgggtgtctacgtctccaggtgatgagtcaatgtctttgcaaacatcagaaacccaagaagcatggtgagcaggaacactatgggtaatcttaggaaatttgtgcacaaggatggagacattccagaaaaagaaataaaagaggtgcattcctgctgccatatatgtgctgagccccatgaagcagtgacatatgggaaagaaaggggaagaaggaggataggtatagaaaaaccctgcttgagattccaaaagtagatcaatgcaacccatttgttctttcattaatgtaatcatcctttattgaatacctactatcctgggcagtgtgccaaattgagaatgcaattatgcataagacatggtccctgtctttgatgaatttaagatcctctgaaggaaagaggtgtaaatgaacactcacactaaaaacaagtgctttcatggtgctaggtgcaaaacatcacaaaaacccaaccacaggagcaaccagctctactggaaagacccaacagagtcaggaacagatttatagaggaggaggaacaatggagttgattttttttttttttttttttttttttgagacggagtttcactcttgtcgctcaggctggagtatagtggcgccatctgggctcactgtaacctctgcctcccaggttcaagcaattctcctgcctcagcctcctgagtagctgggattacaggtgcccaccaccactccaggctaagttgtttgtatttttagtagagatggggtttcaccatgttgggcaggctggtctcgaactctttacctcaggtgatccacccgccttggcctcccaaagtgctgggattacaggcatgagccaccgtgcctggcctggagttgattttgaacatgactcagaatttaccagacagggtattccagggagagggaccagcacggaaagggtgtgaacatgggatggtgccaggccagtgagagtgccacggatatggggcagcaggtgaggaggcaggacacaggtgaggcctgaccccagaaagcctattgtgccaggctatagggaatttgggttttctgttgtcaatgatgggaaaatcagtgcaggtttccagaagaggatgtgacaactcacattttgttcaattgagttaaataagcacttatagagtgtctaccacatgcagaacactcactgaatcgagtatggatgatacaaagaaaaatctatcccaagccctcctgcctacactgcctgagcctcatgggaccctaaataagtttggtaaggaatgagtggtgagaaagggtgaggagaaacaagagcacacatcgtcttgatacgggatctaaatgggtgcatggttctaggagaggcacaagggtttatggaggtagagattcccagtgtcccagatttgtttcttcactctcaggtcaaagcaggccttatttaggaggcccagtcattcctcatttcccttccttggtaatatcactacgattctctctcctcccactggccaaagtgtttgattaagcctgcagagaatgatggggttcagtaagaatgccagcaaagagacggcataaaagccacccagaatggggctgacagcgtggcctcttgatagtcccccatgctctgtccagggggaggatgctaggctgagactctaggtgttctcgtagtttcgataaaaactataattgaccaccacaagtaccagtggatgtgtgagggtgaggggagagctgaagatgagtagtttgttctgatttcagtttattttgggctcttctagcctcaagtctgtgttcagctaaagatatatggctgcataggcaaagggacctgttaggtgagcctgaaggtgattcttgcataattctcagaaactcaatcaaggtcttcctgtatctcccgcttcctcccctttctcctgcctccaacctgcacatgtcagtgcatccacatgcacacacattcaagcaggacataaggcggccggccggtccacttcagatcataaccaaaagtcttggcccctcaccactcacctgtcagcctcaggcagccagggacccagcatgggaggcacacctcatgagaactaccccaatgctcaagtgcccgcaaatgcccacaaacccttaaatgtgtctaggaacctttcaccaactgaagcctgactgcaagatgaaggaaggacctttggaatgtaataaatgatttctaaaaagacatctcatcatcctttctttcattctctctccctctctctctctctctgtgtgtgtgtgtttgtgtgtgtgtgtgtgtgtctgagttgcctcagggctggtggtttcaaaactagcagctgcaaacttatgaagggaaaaaaaaacccaaaccacaaaaccccgtcttgtgaaaactgtgtgccagtctaaaagtggcagtccgtgcaggagaaaaagcctgtcaacgttcagggcagaagcaggcagtgtgagatcacagctggctcttgacagtgaggaggaattcaaatgtgtcctgggcatggggacagtaggggacaaggacaaggcagaagagaagccggaggggactgaggagtccagatcctggctggccaggggaggcctctctggaatggctccgtgcttcagctgagccctctgaaaaattcagcttcccagatgcaaatcagaccagctgctactatcacattactgagtcttcttccagaacccccgaggtccggtctcccctctccatccactcagaagcttctgaagcatgactggcagacataaatctcccccaaccgctggctcagcccccctgccctcccctgaagctgacacccacccatgctcccctgtgtaggctcacctttcagaacactcccgattacacattaagacgctgccccaacccagccccagactcctactctatggctagtttcaacctacaactcaatccaggggtgcagggggctgggggtgcaaccgggaagcccaagggaagatccacttggagagaatgagggtcctgcctggccccaaggctggacagaggaaatcctcaggtgtcatcaaagatgaagactggagaaggagagttcctggagggacactaaccagcctggctatttctcctgccaccctcccacccccctacccccacccccgcctaagctccataccaatggcctctggccagaacaaagtggatacttgagtcacttggctagatagttgggcggtgccctcttttgtataggaaaggcaggccatccataggcccacagacagagacagaggaggccaagccccagagaccacagtggaacaagtgtcttggggtgctttgcccataggtgcagcttaatgaaggacagccagaggacacggttgtaaaaacagggcagcagaaatctatgtgaatattataagtatttgaggagaagcaaagttagtgaagtgatcaaaacggaatggggttaatgacagaacgcttcaaggaggaagttaagttctgaaggaggggagggacaacggctggggcagaggggggaagaggaagtgtgttctgcaggggagggtgctgtgtctttgggaagggcaatactgattgcatggtggccctgggagctgtgccactcttgaaggtcctgcctggcgttaatatttggatatattttcaaagagggagaatcctcttctgtattagtaataggcatgtccgtagttgaaagaatgtagattttggaaggagcacacttcagaatcagatctgagttgagatcttagctctgccacttataagctgggtaacctcccaagcctcaccttcctgaactataaaatgaggaaattatttcataaggctatggtgagaatgaaacgagataacttacgcaaagtccttagttccatacctggcaaacagtagctcctaaatcaataatggctagtattatgtatatactttatagcttatggattagaaaaccagcgatagcaagccactttaagtcctcaagaggaagagtgtaaggagttgggtggtctagatgctgatctcagcaagtcaggccctgtttcaacctttccgtgagatgcaggcagccaggacctggacagagcccaagggccaggtctagagtagtggttgcggaaagggctgatgtatcagcttcaaaggctgacttgctgcagcccaagaccttggtacatagatttaagtcccatctgattgagaaggaggtgcattcagccacatgtgttcataaacacttaacaactggctctccaggtttgtgtaatttgcacttatttcatgatgcccagcttcaagctcccactgggcatgcagttgagaagagatgcgtgcaactggctctcaggaacctcatgagccagttccagcacaccactgcatccagccaccctgtcccacaaccacagcccatctcagagcaaaagaggcacctgtcctctatgtctgacctagctttgtctaagtggagaggtaaggagttaaagcggggagaagagcaggcattcctgctctcttctctgtcccacaccggccagaagtaaagcttccctccctgacccacttcccctcaggccagttccatactgactagcaagttcattttcctcacaagctgaaacaaaacaaaacacaaaacgtggccctctcccttgggccttcagcagagtagctccgctttaagaggaatcacagggtgcagccccaaatgccatggagtctgatagtgcagcaggccgggggctaacgctgtctccacccagctcaccacgcaggtggagcggccaggacatgggcatgccttggcctaggcagtgcacttccggattccctttgggaggcagcagggagggtctggcctcatccttaatgaactatctggcagaggctgtcacagaaccatgggacgccagagccaaaaagagcttagtaatcacctgtgtgtccctttgctgcgcaatgagggtgctgcggcagaggccgcacctcttagctgtgtcacctctggagctggaccgccctctctggcctgctgctggtggtgctcctgcgtgttgacgcttggacactttttgaacaacatttcttccataactgcagtggcccctgtgagtaaaatctccctgaggcaggttctatgccttctcttgtccattccccttgggcacccagtatgccctgagtgtccttgtgaccagagccactcctgttttgcagtaagggaagccaaacaaggagcagagtcaaggcaaacgttccagtgcgttctgtattgggattcttcccttcaggcacagaaattctcatttgcactccccatttgccctggtgggcatcccagctgtacctgagtatcaggtaaacctgccttggctacatcaagtccagggatatgatgaaccatctagaactaaccacattcaattagtcccctagccaagggtggggtgaaggaaatgagaggaacctacaactttttgcaacctctactccaaccgccagagacacacccttctgcctgatgttctttgactcaaggagttgagaaccactttgggtctacacagatatgacacagctacccgtgtctgcctcggtttagaaagagctggctgagctcctgcgtgaatcctaaagacaggacggtcatttgagtttcagctgcagggattcttctgctaggcacctctgctttgtaatcggatgtgtacgagggcaacacaaaggactcccagcccggctctgccaagagactttgttgtgctccatggttcaaagaaaaaaggtagggggagagattaatggagcgagaggaggcaagcttattatatttatcaaccatgttcgcatttcaagtgccctgatttatctcacaggtgggagggaagaactgctggcaacccttctctcagggctgtgagttttggaacaggatttcctctgcaagttgtcaaagatcagataaaagtcttaatctcaggcacacacagccacaggctttggcctctgccactgtgtgttcagctttcagtgatgagactgaacaatggttggcgatgctttgcatttaaagaggtgggaaaagaaaaggatcagagtggaggtatgtgaggcatatggcactgcccgggggaaacacgagtgcaccaagcaggctccagaatgaactcaggactcaggacaactgaggtccccttttgctccctttggtgtccttttaccagtcgtcatgtacactaaatcaatgcacatacctgtcacccctttttaaaaggatggcaaccagatcattcacctctccttccccattccaagagcccggttcttgagaaccaggctggaagagcatgtcccaggtactggctggtgggactgtggagatgggaagcattttgaccttgttctccagaatgatttttgctaaagagatgcttattttttcaaaatgcaattctataactttaatgccttttcagaacagaagaactgcaccttttaggcaccatgttgattaagtggccctgtgttagggagtgctctgaggaaactatgttgatctggcatttgaccttgaaacatttctaatatcagaacacaaagttcattcatgttgccagagctagccaactgagttagcaagggaagtttcaggaaacagaaaagtcgaaaatcttgaaatctggattctttctgttctcaagtcccactctgatttgtatattatcaccaccttgactatgcctaccttgtattgtgcatttgttaagtgtgtactgtgttaaaaactttacttatatcctctcattccatcctcacaaccctattttacagatgaaaactggaatctcaaagaggtttcctaattggctgaggtcacccagactgcgggtgtaggccacacgtttacgctcacctttgtgggtcagcctctcagtagctgcgctgctcatcctattcatttctgtgcttactcaatagggagaagagctgggtaaggagcaaatcggtgctactaaagtcaggctcagtatcaagaacatgcattctattctagaatgctgataaatacactggcagtcccagaaagtcacttccaaagcagtaaagaagggctctggaacagacacatgttttcatttctttttgaaggcttccctttgagaacaaaggtggtctgtggtgctgggcccttcaagccctgacacccactccttttgtctctgcctcttgggatcttgggagagctacaccaagggctgcgtgatggatacaccacgaaggggtgtatttatttatttgccagggaaatgtattagggagaagcaaagactaattaatgattttcaagggaaactcaatctatggaatgaatggttttcccaatgggctgtatttagaggctcacagaaatcctgcatgcttccattgccgtttcccatcctttcttagcctttgctgaatgtgtccggaaatcttttgcaaaagaaaaggcaccagtctgtttgccttgaaaatgaagaaaccaaaaggtgtaacatccttcttccttctcaggtggagtagttaattttacaagtgcttcgagaggtcctgaggaaaaggcacatgccatcatgtcctctccccgtgaaagaagttcataataatctgtgcaaaacagcacctttggataagttcaatgtggctatatatagacgcttggccgtttcctgttgctcttgcagcttgcacaggtttgaaggtagggtgaggctgtgaccataagccacacggtgacatgtacattagccatgccctctgcttcctgtgctgcttatgacctgggctggactaaccccagcactgctcaggggcagggagcccttaggacctaaatgtgggggggttggtgagtttgctctcatcttctctgagcacaggttgcctggctgcagatagatggtgcaaaacacaccagcgagccagtgtgcttgtctaacggtctgctcgtgtaacttttgcaccacaaaacaagaggtcaagtatgaaagggtggttaacaaattgagcagcccttttttttttctgttaaaggggccgtgtcagaaaaaacaaacaaaaaacaaaaacaaaacaaaaaacaaaaataaaacaaaaaacaaacaaaaaaacccttcctgagtgaacttgcatgaaaaatcatttggcaaaacccaaagttcatagccatgtgctgaaaagccatcatgctagaaacggtcatcgtgatttgacctcagaaccgtctcctattttaagatttcaaaatgcttaagtagatggggcgcagcggctcaggcctgtaatccagcactttgggaggcggaggcgggcaaatcacttgaggtcaggagttcgagatcagcctggccaacatggcaaaaccttgtctctaataaaaatacaaaaattagcttagtgtggtggcacacgcctgtaattccagccacttcggaggctgaggcaggagaatcacttcgaaccgggaggcggaggttgcagtgagccgagatcgtgccactgtgctccaggctggtggacagagcgagactccatctcaaaaaaaaaaagaaaagaaaagaaaagaaacaaaaattgcttaactagacatgtcatgcaattttggagaagagatgagtggtaaatgtgactccagctttactaaacagtgaaataaattaaggcaccaaagcatgctgagccttgtctaaaatcctatagcagaagaggccagaaaaaaattcactggttcccttctttctccatccattcagccaatcagtaccagattattctccagctatcttccccccttctcatctaggacatctaaggtagaaccgtgcatcttaaaaaagcttttcaggaaattctgatgggcagacagaaccaacgtgagtctatgtcattttgactctcatgttctatatgggctgctaaataaaaactttgaaagtctttcatgtgacaaatagttttggagtgcatactctgccaggcattgtgctaagtccttggggacacaggtgaacaaaacagaggaagaccctgcctccattgagtgtagtccaatgggagagcgacacaaatcacacttttgcataggtgaatatctaattatacatgtggtaggtattatgaagaaaaactagagtgctctgagaaagacgttaaggccggatagatacaagcctgggattggagaagtcaaggaaagccccacttttttacatgacatttacacaaaaatgattaagatgagaggaatatgcttcgttgcttccaacacataaccaaagcaagttatgattctaaaaaaccaactagttaccaaaaaagaaagaaaaaagtaaatgatctcttgggcttgacatgcccttgttttgcccagagaagcacacttccttttacaattgtttgggaggtttgtggcagagaaagagaggaaaaatcagatctagagaagtagagtccttcagcgacttgcaatagtggctcttactaaagcatctcattgcttctcaaatgtgtccaagggatgctcaaagctgctttctcaaaacaggattctgtgttcaactgagtgtgggaaattcaaaggaacttaaacaagtctctttgcatcaggacttatcagagccttgaatatactaatggagatcctgaagctccaagggaaagggccgcacaatgcagtctgcagcgttttccaatcaaatttgattgcaagaggtttttttttttcactgagtacctaactcagtggctctgaaacttacatctgcacaaaattcccttggggagtgtaaagaatgctgattcctcggctccagctccagagattctaattcactggatctggaatggtcccgggaatcttcatttttaacaacacttcaagtgattttgaggcagcaagtccaggatccacactaggagaaaaactagtaggattagtgtcctgctggtgtcccggaagcatctcagtagctctacacactccgccattcaagctttctcagcttcccctcactctttagaacctggctgatgctgagtgaacacggtcaagttagtgggccagagtagataaaaataatggaaacatgcaaagtgagtcacagacagcaaatccaaccattgcctagaatttgttgggtgtcacaggtcaagctacaaagatcacattcgccatttggactcagttggcaggaatgttatgcatgtgtgatataagatgctgtgcgctgaaagtccctgaagctgtgcaaatactggatccagcagaagttttctctgttgtgcccatctgcctttgtctaattagccaagggtcactttggctgcctcccttcctttcacatggagcaaaggtacccagagaggcacatgttgatgcattcatatgcaaagaagttcttgtctttctctctctcaagtcattgttcagtgaggagtcagctcccacatgctcctcctatctgggctgcaatcagcacagtgaggagaggagcgacagagcacatgattatgaccggggcttgctgctgagctgcaggggttcagagtactgctacctgtgcaatggcagcttccccagagcgcccaggggctccgaggccacagacagaaaatatctttgctaccacgtgctgaaaaatatccccaaaaccatttgccaaagatttgacttggttaaaagcgaggtggagaggggtggttaaacaggggaagctatagaaaggaaaatgcgagaaaaagatgttttgcatattaaacagccctgctttgtcctccaattcagccaaaacgtttggaggaggctgcgctgtccacgtccacagtgctctgaacgtgcctcatctgatcttggaagctaagcaggatcgagctgagtactcagatggaagaaggctattctcgtgcgtgtgcagagaccaagatcatagggaaaagcatgtctaaggttgggttttgtgtacaaatattgtataggaacataattcaacctgtttaaaacaggaggatgattgtggctgaaaccacggtgggaggaaggaacatgttacatttcttcaaagataactgcagatcgaatgccttcatccttgtgacccgcgctgcctgcactgtggtgtgttttgcttggtttgcaccaatgccctggctggcggtcacttgctcttggtggccagtttcatttcctggttttgagaaaatgtcagggaggcctgttgcttgggcatactgtcactgagggaagtgtgcagttttaaaatgtcaaagccagcaggctcatgtccagtgcatgccatcaatcagcaaatgtccctggacccctaatgagcccactgaaagttcaaacggtaaataacgaacagataaagatcttgccctaaaatcgcctaccatctaaccaaaggggcaagatcaaaagggaaagaaaaatagtatcaatatggaaaaataaatgtactaattgctgtagtgtttgtgggcaaagaatgcagctgagaaagtgcagcctcgtggaaagggccccacggaagggagtccagagggttggcctcacactcttccccttcccgctttatgaccacgaacgtagtccttcagaacctttgtttcttcatcagcaaagtgggggaggggaataatcctgccttcttctccagtttattagagtaattaaataagattatagatgtgggaaggctcctattaagatcaatgtcttaaactataaaataatctacaattttccttgtcattattattactgataacaacaaaatgaggggaaataagtctagaaaatgcatcatctgcctgttccattaaaaagagacagaggcagagatggagctggacacaagaattcaaccagcctaggactttgttctggcacctcagtgtatatttaaagtcctgtataataacatagaagtaatcatggttatcgcttatttgtattgatggatttaaggtgggctttttatttctaaggtttggatacatctaagaaaatagcatacttcctaagataccatttgattttaattttcagagagctgatcaccaatttgggagaactttgtgactgtatgtttggtataattcctttagagatcaatttgatgatggagaaataatcctcacattatccacattatcagatgtctagataagataggaaaggtaactttatcacagctgtgtgacccatgatggcctaggtagctgagtgaaccagaagtctgaacttggaaactaagttgtaaagttcttatgaacttcctagggcttcctgagcctccccccacctttagatgccaagtctctttgcaaattcatatcattcctgcaaacagaaaatagtatttagaataataagatgtttttcaaattttccttcaagggtcctatgagctggcctgataaattgtttaactttgaagggaattttgaacaaataggacaagacaatcgaaacacgtatctagaattaggacatggttgatcccgaagttcttaaatactgaaacctccttgtggtatgcagaggccaaattgatcatctttaggcagagattccttagacatgatcgatgaggctatccatctagcgtaacactgagactttcttgtgtaaacccctcacacccactaaacaggaaatgcaagctactagagctgaacattcaaccaccccctaagtccccaccctccacccccgcccagcataagaacattattctttgctttcctttccgaagagctgtaggcattcattcatatatgcagagcaatcagacatcattagacaaagaacacctgataataattctcacattttggaatcttaagaaacttccaatgaaaggggtgatacgagttggtaagccacagcttttggcggtagcatgagccctctggcttctgaaaccctagaggccacagataagatacactcttgtagcaggcttgtcatacttgaaattctaactggtagcttgatatcctgagttgctttctcacttgagcaactttggttgagaatgtaggaacctggaaagatttcttgagacatgctcattttagacacacccagaaacatgccaggtacagatgacaatttccactataggtaaaacatctcaaaacagaagcctaagctgacagtggaccaataactgcattgtttattggtttcccaaggcaaatgttcagcaaattctgtatatataatcaacagaaaattttgttcagattctagaaaagatagctgctgttttgtatatgtgtgtactttctgctatagtagtatttgcataagttaaatattttcagtgcaatttttattagttttcaaaatgcacttttgtgggtatctgtgtgtatgcaggtgtgtggggagaaccatgaacaagacaaagaccccttgtcactgagggcagagcctgactcagcatcccaatacagcccctggtttgcattcttcccaaaggaggcacattctaacaaacaaacaaccatgccaagcctccgaccacaaacccaaccaaacattttcaaaaagatgtatatatttctgtgaaagaatatggatatctttcagtgctcaagaggcagtattctgcagtagatctaactcaagtggatagggacttcggaaagccctttttcaaactgagtttgttgaatccagctagctacatggaagggatggcagggctcagtgggagcaggacacagtaggggaggccagggtgcaagctcatccactccctcatctgtaaaatgggttagttccctgaccacctcaccacactattgtcaggcctccttcactgggagctgaaaaagacaaacgctgaagcagaaaggagggtttttacaaacaaggcttgaatgatagacacatatggggcatgcgtctcccatcacagcccccaccacaccggaacacgagctctgttcaacatggtcctcctctctaatgtctatgagttctagaacttgaacaaatctttgtcaagaatgtagtccagctctgtctccaaaccatgaactcatctgtgaacaagacatttctattttcctttatctttaaaaatttattttaaatgaaataaatgatgcatgaatgtattctgtagaaaatttaaatagagatcgaggaaaagccctcttgcctcagggtaccccataatctcacttcccatcctagaaatggccatccagggcttattgaggtacctaagatagcttatgtgaatgatgtcacttttagccttaggaaatgttcttttgggctcagttccagttacttttgttgtgaggttcttgtggaaggttcactttctatctacctgcagacaaatgctcggagcttatgatatataacatcaagggcttgcttggctgtcagaagtaggattgcttaatcaaaacctgtgtggaaatagcctgttatctctatggacttaaatggtcatcagcagttccccaaattcaagactcccatgacaataccattgagttctgaagctggaagggatcaacaagacgaggttctaccattgtttgagccttaacaagtcatggcaaggttttaccttaatattgtcattattacagtataattttagaagaatgagtttataggggagcaaacattctccatgctccccttaacgtcaccctgctctcctgacttaagtgccatccgccttattttatagaagaaaatactgaaactcaagacccgctacctgggcaggggaggagcagagaccagaaccctggacctctggctccatgctgtttctactctacactccatcttccacatctgctttttgctaatatcccatagctaagaaataagatataaacaatgccttgaaatacaagacaaccaaggcctcacctttctctcattactcaaatgatgcaaagcccgaagccctctccacctgacttcatccactaccgcctgagctctccaaatgcttccaggtgggacacccaagttcaaggcccctttgattcctggttatcttctagctgctgagcctctgcattgtatagcgtgaacagagcccagctttgcagccagaaagatctggcttttactcctggcaccccacttcaagctgtgtgacattggacaaatcacatatcctagctcaggcgcagtttctttacctgtgaaccgtctgtcccacctaccttaaagagttgccatgagggccagacaatgcaatgactaagagcgctttggaaaggagaatgctggatgcaggtgtcgtcgttattagtgtccagcccatcctttttatgtgcagctctgtgaagacatcttcccttgatgtcagaaccaaaaaacccaagcaaagcaaagacccagggctacatttctgctctggagtctcttgtatgacagtatctatgttgggcttttcagtgtgtaaaccgaaacaaaacaaaacaaaaaagaagaaaaatcagcagcaaatactgcttggttttgcattttcccttctgttttctgattagagtctctatggcttatgagtgcagagagaacctcaaaagatcatgtttgctgcggataagcaccaaactcgatgtttatcagcacttatctcctgcaaactcactctctggaggcttcaaaggctgagggagatctcttagccttgctctgaggagacaggcaggcactcctccccggggcttcagctgcaggtgtggcccaatagcacttgctccattcttaggaacgtggttctcttgctcttccccatgcaaaaaaaggaagcagcaggtttactgaaggtatggggatgagctgtggggtagagggagcaggagaagaaaacaagtattttaaaacaagcccggaaaggctgagaaagtaggtagagagggaaagggaaaggcacactccttacgctcctgctgcccccacccctcaacccccctgccccacccatctcagtctttaatctgccaaacaagcccgtgagccttcaaaaggcattttaattcacttcatctgctcccagctcaccttccctacctcctttgggtctgcccactactctccattcccaaggattgttggctgagagtgggacagtgggagggagggaggcagtggtgtgggcagggggagccagcattttattaggctgttgaatttgatttattaggggggaaaaatccttcgcttgcttgccacacaggttattctcaaagtgaaaactctattttacttcgaaaaaaaaatggtgaaagtgcctacagttatgaatggagctctttgttaccttccagatcgacaagacagactgtttggttcatgtctgtgcaccagcaaaggagtgtgggggcctgggagacagatgtggccttaattgcatggaaatattagaagatcgttaaggcattttgacaggattttcctctagctgtgggagcaaagggccacgtctgagccgcatcaggcctggccagagccactggcaaggtctctcatccccacgtgtgagggacacatgggccttggttcacgtgccctaatattggtagggaatagatgtctccttgtcaccaacttccaccccacatctctgccccataagcgcagaaagcaatctcccaagaaaccctaaggcctgtagcgggagttggaagagaagctacctagtgaaataaatatttgggaatgtatacgcacaagtacatggacagagagagatcagaccatctccaacctgaaaggtgcactccataaggctctccagggacccacacgggcctgaaagaggaaatgttgtcacgacaaattatggtgtctaaagacaaaaccttttctatctattcacttcttccctttcaaagtaacatttggttacagaagtcatgacccatgagagtcctgtaattaagtcagagaaatccttaaacactgttggctcgccaaagaacgagaccccataaatatggtcaaccttgtttctcctaggctggcctaatcatggttccaacatacttttagctccccactttttcccccacttgccctggttcattttctgcatgctcagagaatgcaaatattttcacattagcttaaattaaaaataagtaggagggttagtctgctgggagggagggagaagccccgcccaaactacagttcagtaatccctttgggttatgacagcaatgttttagatcagctcttcctcacttagatcagacaatgttggcagtcagaccaggagtagattagtattatagggtcctcccttcagaggggtacacccctacagctcagaggccacttcttagagttggggtggtaggtggttgcttagatgatgtttgggcctcagcctggtgctaatggggatggggactaggtgaacagaaaggaaggctggtggagagatgaggaaggagagaaggtgcagccacagagatcccgttctcatgccaacgttgttgttaacccagagggaaaaagggaagagctcccaggcacgttggcacgccagcatccccaggctgggtttgacatttaaggagcaccagcaatgagttaaggggctaaaggcccacagtctgcaagctctggtttaaaatacagtcactcagccaggcatggtggctcatgcttataatcccagcactttgggaggctgaggcgggcggatcacttgaggtcaggagttggagaccaggctggcaaacataacgaaaccctgtctctactaaaatacaaaaattagccaggtgtggtcatgggcgcctgtaatcccatctactcgggaggctgaggcaggagaatcgcttgaacccgggaggcagaggttccattgagctgagatcgtgccagtgcactccagcctgggcagcagagtgagactccgtctcaaaagtaataaataaataaataaaataagacacagtcattctgcctacggtgactcttcaggccagagcccccagccagtccggatgcaggggcaacttactgtggactctctctcccgcctttccagaggactccagatctaatgggtgtttcaggaccctgcagtgagagccacaacaatggagaaagtgccacagtcaagcctttgtgtccccttctccttcttgctgtgtgatctgcagaggaggggataaaaggctcatctgaggtcctggctggctctctgtgaccagaaagtccctgagccaatgaagtgttaatgcctttgcccctccccccgattcctgctcagttcacggctttcctgtcctctgaaatcccttccttggtagccagttgcaccacctctttacttcaagttctgccaccttctcctgaggcaatggctcccttgcttggttggtttctgggatgctgagtgggggaggctggggaagcttgtgcctggactgtctcgggagctcccagtgacggtgacaatgcactgcttccatttgtaaatgccatgtgctttccagaatgcttttgaggaccttattgttatttcatctaagcttcaaacatagcatcgttcctaccatatttaattcagactcttttctcctttcctgtcgtcacttccccatctgtgtgcacagcctgtgtttacacagcaggtttgccgcagctactcacttgtccagggttaccatgcatattcccataataatctgcgtttcacccatttagctcactgtagaaacttagccagttccatggaggaaaagtcccacaattctcctaatctcatagtcatcaacaacgccattaaaatgatggcatcatttttccatagacatattcctggcttttatcaacagtgcccagcacatagaagatatccaataaatatttgctaaattaatgaatgcatcagtgaatgagtgttcttttgtgtgacaaatctgttttatggccccattgtgagacaagacatgttaaagaaatatccagagtgacctttgcatgtttcgaggagcacatagtctggtcaccaaacacaagtgtccacagcctgtgctctccaagatggtaaccactcataacatgtggctttttaaattcaaatgaactaaagttgactaaaattaaaaattcagttcctcagtcacaccagacacatttcaagtcctcaatagcctcacaaggcgagttgcttctgcattgcatggtgcagattttagaacagtgccagcgtcacagtcatctcccctggaccaaatcagagaattcaacttctttctatggaaatgaataagaagtttaggtaaaggtttttgtttcttgatcctgattttattttaagattgatgctgacgagtatgcatttgttggttttacgtggaatcgtcagcacattttacaggccattcaggctgatgttatacctgagagcatttctggttcatgattaaaagaagcaagaggaccacaaggttccccatggacattttgctctcacagtttcccaagagagaaaggtttgagaaggttggcttcactggcttcattgactttgggtttctcatgaacatcaccaacctataatgaacatgggagatctcaatcacacagaaaaccaggtggaagtagcagtgcgagaactgggagccatctggacatggtggctcatgcccgtaatcctatcactttgggaggccaaggcaagaggaccacctgaagcaaggagttcaagaccagcctaggcaacatagtaagaccctgtctctacaaaaaataaagaataaaaaaataaattagctggcatggtggtgtgtgcctgtagtctcagctacttggtacttaggaggctgaggtaggaggattccttgggcccaaaagtttgaggctgcagtgagccgtgatcatgccactgcacttcagcctgggcaacatggcaagaccatgtctctaaaaaaaaaaaaaaaaaaaaagaacttgaccacttggcaggctttgacaatggatcctgaggaaaatggaactgaacgggacaaaggagctcagaaatttttgaggcggtttgggacatctcagggcatgtccacctggtaggttaattatccatttcccacaagtttttataatgtggagattgagcctccctgccctgaagacacatgtccttgagacagacagacaggcatggctctgttgggcaaggttggcacctccagaagcttccaagaatagaacactaactgtcccttatggagtaactaaaccagtcccaagcccccaggaactgtccgtgggttttagctgggttttctgctcagctagctttactgagcttgacaaagaaaacatctccaggtaaacccaatgaaatgttttctttggaggaccacagcaggacttgttcacaaaatatctacttttcctgtagatggatgccgggagacaggagacccctgtgctggactgtccaggcttagcactccagtcaagcaggatgtaggccagccctgtcagtgactgtctccagggtagctgccaatggagggaccagctgtgcaccagagagggagtctgagctctgtgatgagaggatgcttggctcctcgtgtagagaccaggctgtcctcagttcccctgattccctttagaagggagagcaaagatgacaatcaatggggccatgaagctcatgaacactgagttatctgagcttactcgtagacagagtggccatataatgcatcaacaaaagtgggataattttgagcgggataagcatttcctggaacaacagcataaagcggaactgttccaggtaaaggggctgtagaatcactccactaatagattttagggttgaagacctggaagggatcttacggatcatgtagctcagtccttttatgtagtaggtaaagaaataagcccagagagataaagtgccttttctgtactataatttgtgaattataataagatgattacatttagggagggcttactatgtgataggcatgagttagaacactattattatcgctagttttccaaaaaggaaactgaggcatggagagattaaagaacttgtccaaggtcacaagactggcaagtggtagatgtagaattcagatcctgacagtctggctctgcgggtaacatgtcaaagatgacagactgtacctctcacaaaccagcagaatggagagccccctcaaccctcacatcaaaaccctgtgggtgctgtcattgtgcccattttatggataaggggagaaccaattcactcagctagtaagtggcaatcatgtctacagaaaagcacaaagaaaattatcgtggggaattctcaatctagtaggagagatagaacataaactatgaaaaacaacaatggaaggcaatggttaaataaatataaaagcaacatgacaaggcagtctaagataaagtgccaaattggtgccaacagacttcagcagaatggaggttcttatgctgggctggagtgagcagggagacttcctggaggaggcagaatgtgaggtgttcaacagtttggtgaatgaatgagatatgattaggcagagaagacagggaggcaattctatgcaggtgaagctgcatatgtatattaaatgtacattaaatatgcctccaaaggttaagagtgcaggcgagaaagaggtgggggagtcttacataacaagaagaaaaactatttgaaataggaccttaaaatgcaggaggttgagcaagaaagagaaggcatgggagcacagggcagaacaattgaaggtgacagagggaaaatgaacagagaacacaaaaggaaaggaggagcagaatgaaatagagcacaggaactgcgcagagacggccctggctgccgagctctcccagaaaatggacctccccaggccccacctccctccatcactcccatccacaaggtttctgccacatgtcacagcaacaatatggtaaccatatgccccgagccacaaaagaactaaacaccttggacagagcagttcacccagatgtgctagttggaaatactgcaccctcaggacctgcttcctgacttgatgggcctgaggtcaccaagcatggctcagccgtgaatcacggaaaagaagcggccattaagagctggaaaacggattcagggtctcccctgtccccatgccctgagaggaaacgaaataaaatggatgcacgcctcatctgtgcgtcgagttgaagcggcattcttttctggctgctgccagtcacacaaagcgtcccggcttgtgtgcgtgaggcaggacgtccttgcttcgcaaggctgattttgccttcgtccccctgccaggctgctctctgggtgttgctggaagggagtgaagcccccccatatgcatgtttcctcgtgggctccctgtgattgtaagggccccggttaccatggcaactgccacgtgaggaaattgtcggataagatcatagcttctaggaataggacctcaagtggttgtttggggaaagtggtcagtggcttcatgtttaaatttgaacaagaaacagtcactgggtgtggctgctttaaaagaaaattaggcaagccttgggggaaggcttcatcaaaattactcaaagcgcaaagatagaaggggtagtctggctggtgtggaggtgtgggcaggcagggagggtttgcatttcccatcgggcgctgaggtttttatttaacttaattcattgcacacttcttaggtgccaggaagtgtgccaacaactggggatgaaaaccaggaatcagactgatgaggttcttctcttcagggtgcctaactagaatttgtcctcgagaaaaagaataggaaagttcccatgaccccaggaatcgaagagacaaccaagggcacatgccatccacactctttcctctcctcaaggcttagaaaaactgcagaacctgccgcctccacccctggtggacaagcctctgcttcccctgtgggagcccatcctttaggatctgaatgttctgactcccaccttccctttgtcacgcagagtcctctcttgtccctgcagacccagattgagatcctcttggtctagctgccaggtcagacccataaagaccaggcctcaagggacattcttagaagcctctttctcaagcaataggaaagctccggaactccatcctggctcccaggctactatttcaaccctgcagtgggtgaaattcactccacgaggaagcactgcagtcactccccacggaagcttttcttccaaactttcagctcttggtggtcagggaagtctgaccatttatcatcatcggaaagcatgaaactttcagtaaaggatggttaaaaatgtccaggagctgggagattaagtaacttgcccaaagttgcacagccaataaagctccacattgacccagctggtggccagtgccttttgttagaacagatttaaagcagctgtccatgaagggaagcaagcagtgtggtgattggctgccttttgaccccatctgcagccaggatggccagggctcctctgcaggaagaggctgctcccagtgtggtccagatcttcacccatcctcaggcggcaccatcactgggatcaggaaaccattccccaggtcagggacaacattcacatcatgacaatctgtaaggcgcgggctgcaagacagcagcccattgtcttgaagcagggttctggaggagacacggtgcccatcacctgccctttctttgtcccagagcagaggagggaaatgacgaatctcagcgcagcagcactttatccacctgtgtggctgtgctgcagtatttttcatgacgggtacagccactccagtgacatctggcggaatagagtcccagggaaaagtatgtgggacagcacttgtgctggtgcatccaggtggccttcccagaagcagccctccctgcaggttctcccatgccatgtgggttttgtcgtggtggttgctgcttccatttttatcatcccacctttgctccagtgaggcctgtatttaatacttcctacccatccggctaggtgggagaatactggctccgtcttacagaagagaacatctaagctgcttaatggtagtaagtctcaacatctcagtctggctttgctttgcgctgtccctttgatactgtgggacctactttaatggtcaggccaccccctactttattctctgagaggagcttcgtcccggacggtcaagtgtgaagaattacacccagtagagcattgccgacccttttgtggttcccactgccatctagaaaaagccactggacagtggacagacccagtgtaaagaaacagaaagtaaaacacactgtaaaatgttctcttcgtggggttcagatgaatgttctatctcccatcctgtgagtttccatattcagcactttttgcttttcagcagtaaaagcattctctgtgggaggagaatttaactttgatctttagagatgccctttaaatgtggttatggtcaaaaaagtgactgtgaacactcaaagtcaacaggcaaaggtaaataccacgggagacctggagcagcactgaacgggaggcccgtgaggcacagaaggccatggctctggattctgttacagggtacagtcctgggaggatgcagagatcctcttctctgtgctcacttaggctatacccttcatttgtaaaacaccattaaataaagtactttcgtctgcaaataattgcaattgcatcttctaggaattctttctctgggtcatccactgctgagccccctccccaggaagtggaattgtaagtgaaaggggaaaggcacttgggagggggaatgatgttcaacaagactccttgaaaagtcagccggggtccaggcacggtggctcacacctgtaatcccagcactttgggaggccgaggcaggtgggtcacctgaggtcaggagtttgagaccagcctgaccaacatggtgaaaccctgtctctactaattagatgggcgtggtggtgggcgcctgtaatcccagctactcaggaggctgaggcaggagaattacttgaccctgggaggcagaggttgcggtaagctgagatcgcgcctctgcactccagcctgggcgacaagagtgaaactctgtctcaaaaaaaaaaagaaagaaagaaaagaaaagtcagccggacactctgaagctctgtggcagatttggctgtgtgctacggcctaaaattggagacggcaaagtggaaacggtttaggggaggagtagaagctttgcagtcaggccagcagcatggagactcatgaggtgaggggccagaggcaagtagcaaacctctttaagcctcaattttcttttcaataatatgaggatcctaactcatattttaaaaggttaaatgaggtgatgatagtaaaagttccttggaaacttcaagtcatcaaataatacatgttctatttgatcgttctcatttaaaaatgtggtccttgtttggtttttgtctgttgtttattttgtttttgtcgtttggagataattccactatgtgtctatcagaggacttagactttaattctgagatcgattcccccctcactgtgtgaacctagaagggttatgctttgtgcctcagtttccccacctggacagtcatggtgctgattcctgccagccagtgtcaataaccacagtgaaaggatactcagacagtcacctctacagcctttgaatatgggttttcggttgctgagtaaaatgctcggagacgttccggttactatggctacataagaaattaccccgaaacctagtggcataaaccaattattaggctcatgagttttgttatccttcactgaaggctcgttcactctcaagtctggaggttgacgctgtggttggctgtggcctcggttcctctcctgcgggcctctccatacggttgctcagcttgggctaatctgagcttcctcacagcatggtggcgatttccacggactagaggcccaagagagaacaagaagcaggtggaagtcataatacctttatcaccttgtcccggaagtcacgcaaggccatttcttgaggcaatcataaagttccatctgagttcaagggggaagaaaataagctctgccttttgatgggaagagagaggcaaagataagaaatattctgatggtcattttgagaaaatgcgactgtgcctcatgcaaaggagttttcagttaatgcttgatgactgactaatgtttcccaccttcttccttatccaactttccataaaatttacctcctcttcccttttccctccctgccctttacgcagtggaaatgaggagcaagaaatgcgcacatgtagagaggagagagaagcaaaaggcttggccttgctaacagcggccacctgctcttggcacttcagatgagacttggagtgaccccaacccaggctgatcacccccactgctgcagagcctgctggtttcccaaagcagagaacacagagggctttgcacctaagtatcttgttcgcatttcatattctctccgactggcaagagaagggacttcgtgtcattatgcaaataatgtaataaaaagccaaaactagcgtgctccctgtggtgaccctgggtaatggatatgccagagattagccttccagagccctgcactgggagcggcggagtgggcccactgagcagggcagccacagggaacttggtctggttgcttttgacattcctttcaccagacacctccagccaagctggtcagccccagacaactgtccttaggagattcagggcagaacagagggaaaggaatgggaaggacacaatgggacattggtgcttctcaggccccatgtcttgggtcattctgtgttagaaataaagctcagcctacgtataaggaagaacagagggaaagggtctcccactcatgtccacttctggcatttttcctcctctaactccactggactcataactgtgaaatatttgttccttcccacacacaggataatggcagaaatttctgttatgtcttcccgagtgaaatggggagatactcaaaccaccctcttcttctttccttgcccctctggaggcttttccatctcggccttagctagactgtttgaagatgcaatggtttgctcatcgttcatatcggccaggccactgtgcggccatgctctgatcacatcccatcactcaactcatgtgcacatgaaaagtaacatttgacttaatctaaggaaaacaaatgttggaagacacatttgtaagtataacaagaaaagatgcatataggcacacatatgtgacaaattccaaaataagtgaaatttttaaattcgtgaatgcacagatgtacccacgccattcttctgatattcactgagtatgtggtgtacgaacaacagtataaataggtgctagccacctaccattttcattatctcacaacagatgcctcctctcctcattcacagggctattcaggctatgtaacagagccttatctatggcacctagaggcctggactcagaaaccagagacaggcagaggactgagcctgcaatggaatgacacccatggttttaaaggaagagtggacacgcagattagtgaaatcggctctgtactctaggagcccatgggatttgcatttcaggctctatcatcaccaaatctacttattagtagtttaggcaactaatcttttaaacaatcaacattcggagaagtaggtatcgctctggctttatctgaactccctcttgacccatctccaacccaatggttctcacgccatttctcagcattggccttcattaaaattttttttaactttttttttttttttgagacactgtcttactctgttgcccaggatggatggtatgatcatggctcactgcagcctccacctcctgggctcaggtgatcctctcacctcagttttccaagtagctaggaccacagacacaccaccacaccttttttttattttttatttttatttatttatttttttgagacggagtctcgctctgtcgcccaggctgaagtgcagtggtgtgatctcggctcactgcaagctctgcctcccgggttcacgccattctcccacctcagcctcccaagtagctgggactacaggcacccgccaccacgcctggttaattttttgtatttttttagtagagacagggtttcaccatgttagccaggatggtcttgatctcttgacctcgtgatccacccacctcagcctcccaaagtgctgggattacaggcgtgggtttttttttttgggtttgtttttttttttttgtagagaaagagttatgccacgttacctaggctggtcttgaatgcctgggctcaagcattccacccggttcagcctccaaaagtgctgggattatgggcatgagccattgtgcccagctttttaaacaatttttttcttttttttctttggagacagaggctcactctattgcccaagccagagtgctgtgccgctacatcggctcacagcaagctccgcctcctgggttcaatcgattctcctgcctcagcctcctgagtagctgggattataggcacccaccaccacacctggctgagttttgtatttttagtagaaacagggtttcattatgttggccaggctgttctcaacctcctggcctcagatgatcttcccgcctcagccttccaaaatgctgggattacaggcatgagccaccatgcctggccacatttttaagtatttactttgtcccaagaacttcaggtgcttgatttaggtactttactcatattatctcattttatctttatccagaattaccagatcaggtactgatattatccccaacctacagatgaggaaatgaagttcttggaaattgtactagatgcgtaatgagcagcagatgaagcttggatagaaactcaaatctctctgactcaagatttatgctctaagttacaataaacaccggagttacacttaaagagcttatggtctaattgagaggacagaaaattcacaagaaagaacctgtgaagagtagtggttatgtgcttaggctgtagacctgaatttggatcccacatcacactaactttctgtgtgcctgagcaagttatttcacttttctgaatttccattttctcatctgaaaaaatagaatacatccctcatagaattgccaggaggattaaattaggttactcatgtaaacagtgttttgtatttaataagtgctgtgattattaccacttttatctgttttctgtaacgacgacagagggtgtattatatcatgtactaaaggcaccttgcccaaactggaggagaaaaagtatcccaccggttcaagtgcattactggtagcaggccccagctggatccaggaccaggagggggtcgtggaaagcaagcatttctatcggcaaatgtgagtgatctgctgtagctcagatgccaccccaagcagcttgccttgccagaggtctctggtaaaggggcatcattgggtacaaatgtgctggggcacttccctgcctggaacaagggaccctatgccaccctctggatctaggactcagtggctctggacccacagacccagcctttccagcattctgcaaaggaaagtgcttctcagaagccaatgactaagccagcccaggggttccttttacagagacaattgttgggtcaagaaggaaccccagagctgagccccacatagggctaggagcccacgcctcctgtctttctcacttggaagtcaattttacatagcatggtctaaagcctcatggaccccacaagtcttttaaataataactaacttctcttcccttgaataaaataatcagcaacaataggagaagcaaagtcatgagaaacggaaggaatgtagtccctctgaggatggctggtgaatttgcatgctggtgttcttcctacacccagcctatcacctcagttaagtacttattgatgatttatccgtggaaagttcttgaacgctagcaacatgctcatttctgtaaagagcttgaagtacaaggaagagttttaagtttaaactttaaaaagttttaagagtttaagtaaagagctttataagacacacatgaagtagcaacagctcctcatgtgtaacaagctgcaaataagtgaaatttctgccagctcagcagctcctcgcctgcagacagcagcagccacatcaagttgcccagactcattcctcttgtttgcctcctccgtccctactctggtcttcccagagcaatttggagagggctccctactaccagtggcatcataaaaatgacagtgtacttgccaagggcatggtcttggggtgctcctaaagctgttgaactgcaaaaaggggtgccgtttatttgcagaagccacaagaatgctctcctccccaactctgctctttcacttgggtctcaaatcagcttgtctggggccttatctccccaaatcttttattccacttaggggccctcacctcccttcccttgcccatattggcttttcaaattcagcccagtgagccagacagggaactcttctccttcatcttctctctcttcacagcccccatgatctatctcttcttttctctacattgtaatggaaaaaaagctttttgtctagccatgattgcaaatagaagggggatgtgtgtgtgtgtgtgtgtgtgtgtgtgtgtgtgtgtgtgtgcacatatgcatacccaaagcagtattctcacgagctgttaacagctcaaaggagtcataggtcatcatcagaaaggtttcatggaaacaggaagctctcaggaagatctcacttaccttacacaatggcaaagataattgtgcatcagggtgaaagagtaaagaaaggttacttgcagcaaaaggaaccacaaaattaaggcacagaagcatacctgagtagggcttgtctagtggagcagtgagaatagttagaattggacacaagttgcagcaagaggaagttgtgcaatgtaagtgtggcaggtgggacaaagatgacctttggaagacaagtggctgagaagagatttgctgtggtccatctctagggagctctctgaggtttttgagcagattgtggcaggatgacagcagtattcacaacttgcaagggagctggatccagccagggagcgcacaaggtgtactgaatgagggaagagcatgtcagtgggtcgtcagggagggaagagtctcagagagaaatgcccagactggacagaagtgtgaggcattcccggtgaaccgggacgctctcctcctacaatgttgccacttgattggagtttccttgattgtgaactacattcttaaggaaacttctattccaaaatgagttcaaactggttttgtgccctttctacacctacactctatctcatcacttgtttttttctagctgtgtaccactcacttccttaagaagtctctcctgggtctgcctccagaaccgctggctttgtgttctctgtgtattctctttgctgtgagtcttgattttgccgtctgcatgtccccttggccaggacaatcctgtgttccctgttgcctggtccaccctccttaggataatgatgggaggaactttttgcccatctatggagcatcactgtgcccagccctgcctcccgggcttctttgcctctgatattctgtcatcttctcccccaacctagaagagggaagggaaagaaattattttactggaaactccaaggttcatgaatgataaactaagaacgtaagccattctctacagcagaagatgctacctgattcctgaaatgtcatctgtttttgtagcaggactgtggtacatgttcttcactcttatcaccaaaagacacttaggggtcataggtggtaatgtgtcctctgcttccagtgcggagctcaaggaatttcatggagtcagggacagctgtctgaaaggttgcaatgtcacccttttcagctcagaaccataattccttgagcccagataacagttcaaaatttaggatatgaagccaaagctgaactctagctgaaatcaagagtggatataataaccaagaaacaaatggttctgacaagcacagctttactctgagcatgactcaagggcatctggtagaaaatgaagaaggatcccagcagatgttagggctagggagatcccctcggttgggggatgtaagtgttttaatattgtgtgggcaactctgctttgaatgtatgtctggaggcacctacaccatccaaagccttctggtgcaaaagcaggactcctagagtatattccagtattttttccctgatcccagctgaaaacagccatagaagagcctccctttttgaattatggctgtctgtccgctggggtggagaatggccctgggagacaagagacagcccatggagcaggttgtaattctacaggcatatgaagagcattcattctgaagaagacattcaattcaggaatgtgaattacacaaggaaggtagacaaatcccagctttaacaagtgctgttcacctatcactacattttcaagtaaaggtggtgtatccatttgctagggtttccataacaacataccagggctgagtggcttaagcaaaagaaatttatttgctcagagttctggagactggaagtccaagatcagggtgccagcagggttggttttcctcagaggcctctctccttggcttgccaatgactgctgtgtcctcacatggcagcccctctgtgcacacactcccctgggggctctctgtgtgtccaaattccctcttcttataagaacaccagtcatattggattagaacccaccctatcagcctcatttcaccttacctccttaaaggtcctatctccaaatacaatcacattctgagtactgcgggtaagggcttcagcatatgaattttgtgaggacacaaggcagcccctaacaggtggcctaagagaatctttgtttgaatgctaataatcatgatacctaacatgttctgagtgtgactcactatgtgccagagacttctaagtactttgcatgtattatcacaactattatcacaattatagattatataattattgattatatagattatagatcaattatagatgactaccatcttctctgaagacttactttggtgtaattatgtgactgtagtgaacactatgccctggtccctgaccttggatgcctgtgattcgatgagacatggaataatgggagactcttaccctcatgttttgattggtagcagatctccggaatgtgcaaagttttttagttgtcgttgttgttgttgtttcgagactgtcgcccaggctgaatgcaatggcacgatcacggctcactgcagcctctacttccggggctcaagtgatcctcccacctcagcctcccaagtagctgggcacatgccaccatatctagctaattttttctttctttctttctttctttctttctttctttctttctttctttctttctttctttctttctttctctctttctgtttttgtagaaacacagttttgccacattgcccaggctagtttagaactcctggactcaatagattctcccacctcaggctcccaaaatgctgggattacaggcatgagccaccatgcctggccaaggcttcttttcttaatccatgatctcccaaagtcacacccaagtcagtgatgggataatatgagtgggaggacccaacaacctcttttggagggtcttgccctgactggcacttcacgtgtctgaggttcctctttcgtcctttggctggctgagtcatcaacattgagatctacaggatgcaccagcacctcctagagggccctcagcaaaccactgagcatttcttacaagctacacccccacaccagatcttctcatttaatccacctatcgactctgtgctaaaactatttttatccctgttacaaataaggaaactgaaattggcctggccacagccatgggcaccacccttcccttgtgtgaccttgagcagcacacctagcctctctgggtggatctcactggccttgcctggaaaataaatgctggatctcatctccccttcattgctgatgactccactcagctcgtaagaggcatttctgcttatgcctggaaaaatctagcattcacacaccaccacaatactatattccatgccaagtcaccactattcttggcctccctatccccaccctcctttttgggggtcccagactacagaaccaataaacaaacccactttcatgattcctccatccccactccactgcccaaagtccctcctcacccaggtaacctgcaaacacccatctggtttgcataagggcaaacctgccccctggagtgtgagtcaaacaggaacttccagacaagctgtcctggggcagccctgggccaccttgccagctcaaagcaagagtgtcacttgcttgggtgaagagtgacactgggctttctgtctcttctctggccctgcaggaggctctgtcggtggtgagcgacgaccagtccctctttgactcagcgtacggagcggcagcccatctccccaaggccgacatgactgcctcggggagtcctgactacgggcagccccacaagatcaaccccctcccaccacagcaggagtggatcaatcagccagtgagggtcaacgtcaagcgggagtatgaccacatgaatggatccaggtaagctcaccaggcctgtgcaggattgggggaaggcacaaagtcgccagatctgcagcaagtggcttctggcacttaaggtttttgcagcagatggggctctagagctgggccaggaagcctgtgtcagtccctagagagctaaggcagagagggccacagactgatgatggggtggagtagggctaggaagcccccctgcctctctggggcccacgaagccctcagaggccaggtaggagtcaggccccaagcgcctatgcagacactcgtggaacacttatttcttgttaatcccaggcccaggtccagtcctgttggggacagcttagcaataagctactcttccctgtcctgttgaagatacttaacccctctgggcaggtctcagcagagcaaaggtgaccaaaccattctttagtaagagtggagaagggatgaggaaggtgtctaccttcctgtgggggctcactgtgtctgggagggggcaggcacctggaaggcgtgcatgaagtgggtacaatactgggtcagttcgggctttgcttgtagaaatggagacaggagggtccagggagagaaaatcacagggtcatggaagaggacagtggacaggcggcctcagttttgcgtcctgcctctgccccttgggcaagtcatcgaaacccctcagagcaccagctttctcccttctcaaacaggactgggatattcacttccttatggtccttactctagcgttactctgatgcctcagggaaaggacctgggatggtgcctgagacgcgttaggaaagtgctctatagtgacagtgattgttatgagcaaagacttgaaagacagagaacatcagtcttattcacaaaatatcagataatctactgggccaaaggcacaaagagatgaaaataaaaagcaacagagggccctgaatggcaggctgaaaacatgtgccatttattccacagccagaggctgactttgagcaccgatgtgacatttaacccagaggctgactttgagcacagacgtgacatttaacctcatcagagcagtgacttaagactagcgagctgacagtccttgcgcacagacggtaggatgggagagtcagaaagacaagtgaagaagttagtaaaatatcccagataggaaataatgaagttcggaactaagtgatgatagtgattttggaaagtgaaaaggacagatacataagggcgatagcaaagagatgattaacagggcttaggtgagtaaagtgtgaatgaagggggtgcatgacaggaaagaatcaaaggcgactaaagcctgcacattttaaaggctggtgctgtgagcagccgcagaaaggtggcacaggaaatgctttaggatgggatgtcagtgttctctttgagattccttgtgagcaatgggtagaacatccagataaaaacgtctactaggctttgggaactgaagctcagataatctttcaggcctggaatttacgtttgggcatcatctctaaggagtctgaactgtgaaagtggatgaggtcaccgaggaaactagtctagattgaagagagagaagggaatgagcatggttgggagggagaactcctccagagcagctcatggcctcagacctgcctgtgggaactgccaggcctaccacatttcaaccctactaaccaaaaccagtgactgggatctcagccacctttccagatcccaggatttcaggaaggctcagaggttctgagcctgcagcccctcagatgaatctctctccagatgtaattctgatggtgccggagctcctaacagtcgaaggacatggtgtgttgaacgttttcccatattatcttaccacttgttcctcaccactatactaagaagtagttactgtaacttcactgttacacaggaaggcaagcagggctttcaggggacagtgctttgtctaaggatttaaaggaggcaaagttggagcccgaacccaggcgtttggttccagccccacgtgccatctgttaggcacctttctgctccctctgcttgtgtgtcatgcttttgcaccaccacctcattcctgccaacgcccacctggtgaggaggcctattctacgatgcctcctaaatggggcccttctccaaggagctcccaatgcttgttgaagatccagatcccactggtggagattcctttttttttttttttttttttttttgagatggagtctcactctgttgcccaggctggagtgcagtggtacagtcttggctcactacaacctctgcctcccaggttcaagcaattctcttgcctcagcctcctgagtatctgggattacaagcacatggcaccacacctggcaagtttttgtatttttagtagagacggggttttactatgttggcccggctggtcttcaactcctgacctcatgatccgcctgcctcggcctcccaaagtgctgggattacaggcgtgagccaccgcacccagctttgttggagattctctggcctgttgtaacctgaatctgcctactccttacctccactgcccctgcctggtgcaagccagcagcacctctcctaggcttctgcgggggcatcctgctctccccacttcctcctgccttcctgaagtctattctccggacagcaagcagccagagccatgctttcctcgtttgtaatcctcttgctcaaaactcttcaatggcttatgacaaaatgcaaagcccttagtgtggccccaccatccctctgacatcctctctactgccccctccctcccacttcttccctccgcgccagcctcataagactctagctgctgctcctagacccccaggcaccctcgtgcctcagaatctcttcccctgagctccttcattctggaacattcctactccatctagtcatatgactctctccctcacgagttttgggtttctctacctgaacctcaccttttcagaggcctcccctggccacctgatcgaaaccagcgcctcctcactctttaccctgcttagagtgtctgtcctagttcttatcacctccctcactgacacgtgggcagggcctgaaacggtaggtgctcaataaattgtcgtcaaataaataactgagaacacatggctgagcagactcaaaagagaaggtgcttgtttaaagttaggacgcagatccaggtctgctgactcagccccttcaatgctgagcctgagttgatgcatgggcttctgagttccatcttcatgctcaatggagacccatgggtatttgtgtctctggtgggaaggaagtatgctgctcaccactccctcccctgctctcagagaatcctcaagcacttcaggatactgatcctgtgcaaagagggtcccccaaggaaattgatttttcagaacccacttgccagctcatacctggctccagtcacaccaaaagccagctggagagggcctgtgtgaatattccagtgaacagacaggatatttacctggctttggctacacagagcagcaacctctgcttttgagttgcttgtcttgacccataccatcagcgggtaacaaagtaggttcagaaagactgatatcttctcacccaccctgggcaagcagagacaatcctgtggactctcagagccaagcagcttaggcacagctatcgccagcaccccacaaatattccctaagggctcacatgtaagctggactagtggctagcaggaagcaaggagttttagaaaaatgtcattgcttacagtggaaccatgtcagaccctatcatttaattatgccaaaagcaatgacagaatgaaataaatgccaggctctttaaatctctcatcctgaacactgtgcttctcctatcctctgagtattattgataatgacagttcgttacttgcacatgatttgattgtttgcagtggtctaattcgccataacacaaaaagataggagaggatgttataatgattctgaacttcagatgagaaaaccaaggcagggtataaaatttgagattgcttggctcatgggctagacctgtgctgttcaatgcagcagccactagccacaggttgctactgagcacttgaaatacggttagttgaaaattgaaatgtgctctaaatataaaccacatactggatttagaagacttactatggaaaaagtgtaaaatatctcattgattatttattatgctgaaatgatcttcttttggctatattgagttaacatattaatatactttaatatattattaaaattcatttcatcgttttgttttcttttaaaaatctggctactagtaaatttaaaattatgtagctcggccaggtgtggtggctcatgcctgtaatcccagcactttgggaggccaaggcggcggatcacctgaggtcgggagttcgagaccagcctggccaacatggtgaaaccctgtctctgctgaaaatacaaaattagcctggcatggtggcgcatgcctgtaatcccacctactcaggaggctgaggcaggagaattgcttgaatctgggagacggaggttgctgtgagccgagatcatgccactggactccggtctgggcaacaaaagtgaaacaccatctcaaaaaaaaaaaaaattatgtagttcgcacatgtggttcccattctacttctattggacagtgctgggccatggtggtctggactgttctgtgattcacagtgcattttttctgcattccttgacagcatgggcttctgagttatgtcttcatgctcactggagacccattggcatttgtgtctctggtgggaaggaggtgtgcggtgcacctgaagctaccatgcccacttgcttttcaccccagtagcaaaccctctggcccaggagcaaagggtcaagtgcagagactgaggtctgaggatctcagagacagagtggcttgcccatgttgagggagttttgtgctctctttcttcatatcttcctgttgtggttgactctgttaggctgggttgccttgaaacagcatggcccataggttctgtgtcgcatgtagacttcagcaacttgatccaaactgtggtctgcaaataactctcagctgcatcctgtctcaaccacagggataggggaaaacatcccatgaagaaaagaatatcaggttatagagggaaatgcaagacttgccttgtgagcctggtattcaggaccagagttcagagctaaccttccttgaaattccctggcctggcccccagggtctggatgccctggacacctagggactcacattccacacagagaaggatcagctcctgttccctggaacttgtgcctctctggctgcgaggcccctttctaaactcttgtgttctcaaccttgcagtatgagacatgtcacacataacctgggtggggaggatacacaggatcctggaaaagttagcagcatctactgtgtatggggatgaaaacagctagtggattagggcggtggctttatcataagtgatgctttttcttttcttggaatttgcttttaagttattgcatctccttttcaaaaacaaaaaagtcacatctatgtcctacagacttcctaaaggcaatacagattgtttaatttttgcacagggtgcatactacgcaggagttacacgccgcgggtcctaatgcagccatgtgacttaggcagcccgcgaggcctcactttggccacgtgaacatcaggtatcctttgacagtgagcctgggctcagatgtgcgggtctgatgatatacccaagttcagttgctctgagttgactaggaaggtagagaagatctttgtacagcctaaagaggtaatcttcaggagaagtctttgaaatctcccttcatccaaacacccaagatcttacaccttgttttaaatggcctaacacattgcaaagctttttttggaaaccagtagcaatgttcacagaacacacacaaacagaactcgaggagtcaagagctatgtccagtggtggaaatgaaggacaagggctaccctaccctcggcagctctgctgtggcctctgtcgccctgagatggagatgtgctgagttattacacccttggggccaccgccacctccctgctctattgtggcagccccaggctctcttgtcacctgtcccagtgctatcagctgccagtgggccccagccccatgctagctgtaagtgcaggtcttaatacaaattagcagcagtgcaggcaagctgaatggcaaaacctcgtcccgcactccccctccctcttgttttcatcaagccttcttcacaggcgccagctgcctcattaaagagcagccttttatgctgggcttcacctgtacccaccctgagcggcagccgtggagccccatggccgcacgcagggcttgcgctggctggaggaggcacggtgcttgggagctgcaagaatggagggaggactggcaggcgagcgggcgaggtatggctttccttctttctctccctgagcagtgggaggagggccagctgggcaagtgtggggaaccaggatggtgccagcccttctccctaaggacacccgcctgcaggtcctagtgcagaagcctgggaccgaggacagggccattttccagaggagaaacaccctggcgggcgagcggccaaaccgatcacctgtccagctggagagcaggtgtgtgcacagggccgggggagggagagaggaggagggaagcggaactgggagaacttctatgggtcagtgaatgaggaggttctgctcagggaatgagtggcagcggccaccccagcaagagagccccctcctcctctgcgtccactttcccttcgtctaggtgcccatggctcctctccttacaaggtcacgtgttaggcaggtttggggaaatgtttctttcagcttttcacatttattttcctccaaccctggcacctgggaccagccctgccacctgtgcctaccgtacatggccataaccataaaggctcactccatttcagtgagtcctgaggtgctgacttctctgcacagcaagaggtcagtttttaactcagaaatccccaggggcccggctgatgtggaaaagaatttttccaaatatcgtatccccaccgtccacaaacgggaggagcccggggagtgtgccctcctgtcccaccatcctgccccctgctgtagttctcctttccgagagacccctgcccataccctatgccctcttgctctgggggtcctccaagggaagagcgtgcagtgtggagcccacctctcccacagaggccgcctgccaatgaaaaccttgctcacttggttgcaggccaacttaatccttcaaacttctgcagcacttggactgtttcacaactgacaaggatgcagggaaaggctgccagaccatgtgcgtgagtgtgtgtgtatgcacgcgtgtgtgtaatgtgtatgcgtgtgtgtgcactgtgtttgcatgtgtgtgcatgtgttgaatgtgtgtgcagatgaagtgtacgtgcatgtgtgtgcatgttctctgtgttgaaatgtgtgcttccatgtgggtgaagtatgtgtgttccatgttggaatgtgtacagtgcatgtctgtgcatgtgtgttgaagtgtgtccatgcatgggagtaagcatatgtgtgcacgtgttctctgttgaagtatgtgcatgcatgtgggtaaagtattgtgcacatgtgttctgtgttggagtgtgtgtgcacatgtgcatgcatgtgtgtgagtgtgtgcctgcagttagccccagggcgggtgaggggacccagtgcactcgggccagagctcagctcagatgcaggcaccagggtctgactgggactgcttcatctcaggccaggtccttccgcagcagaagccaaagggccaaacgctggtgaaaagtcctgatgtgctactgcctcccctcccctcccctgccatggggacgttaaaccttcagcaatctgggactctgacggctggtttttggttctctgcctggaaaaacagtaggcgaatagtaaaaccttaaattctaacatgtgtgagttatacatcttattttcattttcagcccatgtttccctctgtaagacatcaggaaaaaattaccgtctgacttctaatatctcagtggagcatttatctcccagctatgataagtgatcttcaatatttttttcctttcagattaagaaacaaattcatttaattttctttattgaatgtgctcaggcctccccgccctgcctgggtctcaggaagccctgggctgatctcccttctcctgggttagtgactgccgtccctgcttgtgggatgggtgggtccctatctggtacggccctgctcctcaaggcctcgctgtggtccgttcctgcgcctggcaggggatggaggacagtggccaggcctttggaacgtccggagaggttatgcggcctagagttggaaggctgtaatctgaaccttatctgaactccttggtctgaaggcctggtttggagctcttgagagaactggctgtctcccaggctgccagaaccgatgcttcctgctcagtataatggcggctacagcttctccttggccttcccatcgtctcctttggtcctgctgctgctggagtggctgagcagcgggcactgggtgtgacagggtggcacctcccccaagtatgctggaggtgcgtgatgctgggctggagggcatgcagagtgtgtttgccagccagcttcagggcgccaggtggccatgggtgggacttcacccctccagacagctgcccatcaccagtgctgcaaaataccaggtgctgatcaagttctgtagttctaggctaagttggatgatctgctttctctcttgtgaatgtccatactgcttccacagtgagcttggggccagggatgcaaaatgccacagggccaccacctctccatcaggtggaagttcctggactccattccttctccaagtagcaaccagctcttttgcatgtgtgcttgatagtgaagcttaacacagaagacctgagtcctgtttccaccttgactagctgtgtgactgagccaggcagcccctgtctcgatttcattaaccatgaaaaggagatagtaacccttgctgtgcctatcctgggggcttattgggaaattcgaatacaacagtgcataagaaatgcattaaacttatatatgtgcaatagaaataactcactgagaaagcatttgctgctcacctcctgtaagaatactagggttaaacaaagaaagtgatgactatcctctcaagaactcagcagtcagggggcgcaggccaagctgagaatcagacagtgtgacaagtccttataaccaaggcgggcaccaagtgctgggggactgtggggaaggcgtgtctgggagcatggactaggttgcctggcagtgaggctaaaaatgtaagctgcagtcagacagggagggctgcgatgccacacaaagaagctcagaccttggtctgagggcactgaggcgctgccagcagtttttacgtactgtaattataggattgggctgggatttgaagaaaactctggtggcagcatggaggatagaaagagggcatcatcatcatcatgacaccaagtgtggccgggcaatggctccatgctcatcatcggagccctgggctcatgattcagaggctgaggcaagctgccctgtcagtgctgaccgcctctgggctttgtctcttctcactttagggagtctccggtggactgcagcgttagcaaatgcagcaagctggtgggcggaggcgagtccaaccccatgaactacaacagctatatggacgagaagaatggcccccctcctcccaacatgaccaccaacgagaggagagtcatcgtccccgcaggtaattcgagaaccaggctgcctgggcgccattcacttccccactctctgggggggcagggagcatctaaacctttatctgatactctattccctgtggaattgcaaaatggagaaagctgcacgccagccgggagtggtggctcgcgcctgtaatcccagcactttgagaggccaagacgggtgaatcacttgtcaggagttcaagaccagcctagccaacgtggtgaaacctcatctctactaaaaaaaaaaaaaaatacaaaaattagccaggtgtggtagtggacgcttatattcccagctactcagggggctgaagcaggagactcgctttaaccgggaaggcggaggttgcagggagccaagatcacaccactgcactccagcctgggtgatggaatgagactctgtctcaaaaaaaaaaaaaaaaaaaaaaagctgcacattttacctgacttcctagctgccctttaaggcagtatcccagatgtcacctgatgtgtgggtgctagaagccccacccttaaacagaccacatcacagactctacatcaatggcctggtcctcaaggacgggctgctcagagagcagaggcaaggccgcctccacccaaaaggaatcccgtgagctctggatgtgggcatccctgcctgtgaggaggaggtcagctgcagaggccagtccttccctccaggctcgtacttcccggcatctaccaggttccacctttccaaaattacagccagctctttcagttttaaaatagaaagaactatatttaactaatggagtgccttaacatgtgtgccacaagttatgtcattaggtaaaaatagcctctttttcctaggtgttggtgctgttggtcccagaaaataaaatcatcgttcagtccttcagtccattggctggacactccaccccagctagcaccagcaagctcagctgcctgcacaagaagggtgtttacaaactgccacgtgtagaactggtgccaggtagaaggggcaaggatgtccaaatcttaagcaaagtgattacagggcagggattaaacctgatcttaccaaaataactttaccagagaggcaaaactccttccatttgtaaaagcataaatgtagttgcctctgaagtcaaaaggttagacatctctttgaggtagtccgaaggcatctgcttgtaggtctaaaggcagaaatgttaagggctgcctcctgccttggcccgtggtgtttgttttccctgggaagctgcatctcaccatatccctggattacagctgcctccctgtgctctgggccaaattcaagaaggtgtgagcaagagtgaggcagcagacgggtggggcttgtagaaatttctctgtaccctttaggacttagaaatgactcctaaagcaattctaagtttgctcttccacaagcatctgacctaacaaaggaagaggaagaatcacttccatttattgagtgctttctaggtgccaggcaccacgtaaattgctttatctccatggcattacttaaaacacctgtcacaggagaccagctagtaatgtttagcccaggtgtatcgtctccctcctcactgaaagcagacaatgaaactgtattagaactgacaggtgggaatctctttgtacagcccaaagcaaagctgagcctcactgggtcttcactcaaatggtttcaaactcccctgcttcagtcaaacagctcccagcctgggagggaaagcttgctggactgaagggtttggggatctgagattgtctttgaaccaacctttggcaccatctcattttggtcgtcattttggggaaggaatcttggaaatgggcagaagtggccagactgctatgtcgaccctccaaactttctttgatcagtgttgaaatgctttcaaaaggaatagcaaaacatcaggcttggctgagccaagttacctatagcgctggtggtgaaaataaaacaaattcatgtcaaatgattttcaaagcactttcaggctatggatttacttcattattttagctccggctagatcttttaggtcctcacacattttggcttcctccaggccaggctgtggatatgaggggaagtctcatttgggcaagtccacaaatcaaggcaataaaatattagtggaataaccgattgaatttatgatgggatttaaagacaagtataaatgtgggccctagttaatcactagctccatgttcagatgggaagaaactaggactaaatcatccaggaaatgcatttggaagagtttagcatgatccagagttgaagatttataattcattgtgctgtagagggagagtaataatattgttgcagagcccaaagcaagggaggaaataataaaataaataaaatatatggtgtaaaattgaatttgaggccttggatactaaaagtgaggaactgggagaagtgaagaatgaaataatatgctacataatccaactctcccgaggatatgtttctctagaattctgaaaaggtgcaaaattatttccatttgccaatgatccatgcctaattgcttctggagagtaaaagagcaagaaatgtatctgagagagagagaggaagacatacttgtacaatgacactttagaggagctccgctttctggcttcagagcagtgtaactcacaggtgaggtaaagcaggatggtgagaagaggaaaggggctttgggggaacccacctcttcagcttagtgaagtcctataatggtttctattggaaccccagcccagatacttaccagcgatggggctttgggcaaaggacttaaccttttaagactccattttgcatctgtaaaatggggatattaaaagatttccttggtaagtaaaaatagggctcgcggagcaggtggcacatagcacccaccatctgagccgtcactgctcacagggcattaggttgttggaatgacattcagcagcaggctgtgacctgtgaacccaaactctcctaactcctcccctttgccagctcctccaccttcagcacaacacagcagccactctcgtgcatgggcagggcctgggcactttacaaagcagactactcgggccctgccacccagattctcacacataaaaaccaaggtggaatggagagtccaaggacagttggtggatgcttgtgtaaaagtgctgggaaacttgcctctggctgcccagctgtgaagcgtgagccttgcttcttgccccacatccactcctagtcattcaatcctggttccctgctttgccaggagccttcacagacgctgtagaatgagagggtgagttgcttgaggggtagcacagatattcctgcctaataaatatgttaaatcaaacaggctcattagaagccggaggctaatggccgacttacaataaaatgccgagtctctcctcccccaggaagtcttccttgactctccaaattttcactattcccttccacttatgagtcctcgaaccaccgccacacagtccattgcttagtagtggtgtgcttgcctacctgtttcatgggaatgagtatttcttgaaggcaagcgtcatgtaattttcttctatgataaggatatttaaggtgtttattggacccactaaccattggttgccaagtgaagagatgggcttcagactgtgatgagtgataaaagagttctgcctactgtggaacctgctggaactcatcacttgtgctgaaagtgcaacatccccaccacacacacacacacacacacacacacacacacacacacacacacacacatacacacactgagaaggaggaggaggtatgagtgtcctaccatagagatggcctcagtggttaccttacctgtgttcactcaagagctaaaatgttctccccaacgtcatctctcatctttgggtatttaaatatctaaaatatgttttggggatgccctggtagaaatttctacacagctgtgctcaaaaggagaaaaatctagtttgggtttctgttcaagactaacaccgctgggtttttcaactgcacagatggaattgcagtaaaagtctctctgtttcttttctacagccatctgagggatccgtgttctttcatgaaatcattaatattcttaaaatacagatggttcccgtttccagagacattggtcccggggtctgtgaaattgtgtttattttcattttgatgccaccatttctcaggcaaaggttccaactgctctccaaaactttaaagagtgctctgtcaggatacgtagtgaggcagctaagcacctccctggagtgctaagtggttcaggcagcgccagatgccatggagcctgatgagtgttctaggggaaccatgtggaagggagctctcccagagagaaagagaagggaaagaaagagggacaaggggtgagggaggctgcctaggctctcagggagcctctaccttcctgcagtccttgctaacaacgtcttctcctctgcagaccccacactgtggacacaggagcatgtgaggcaatggctggagtgggccataaaggagtacagcttgatggagatcgacacatcctttttccagaacatggatggcaaggaactgtgtaaaatgaacaaggaggacttcctccgcgccaccaccctctacaacacggaagtgctgttgtcacacctcagttacctcagggaaagtaagtgccgcccaagtacccagggctgggaggaagcttggcatggagccaacccagggagaggaagtcagtgctgcccgttcgtgttgggcagatgccgccggagcagcatcgtggggcctgtagtgttgccaaggtcacgtgggctcctacagaccctgtgaggggcagacccaatcctgaagtgtcaaaggaagtaagacgagaaatggagaaaagtagagagctgtgacctggaggggtctggcagaggctggttacactcttcccatgagaccgcctttccagaaactattccaatttgaaaatagatagagatgggtggtgccctggctggtgttttcctaagtgattatttaaaattcctccaggaaactctagattcaaggcttttggatttaaggtgttgaaaataatttacatattagcttcctcttaatcttgggatactctggcacaccctaaccccatttgacagggctgctatctgcacacttccttgataaggaagagcagccaaaggtgcaggtgtgttaggatccattggaggctttcttctggtacagccaagaaaaggaaaagagctttggaaagggcgagcttaagaaagaaagcaggcagttgtccaagagatttatctagtatgaggtactctagcaccaagcgcccatcagtctgatatgaatttcatttgatatgaaatatacacagagcagaagaatggaattattttagtcctgctggtaacctcagcctgagtgccctgctgggaatccaggccaggtggtatatcaatatcagtgctacccctaagtatggaaggattgtcctggggcctgaaaagatggtgctaggatcacaggaacacaggtttgggctcacactacgtaagagcattctagcagccctgtgcaaagacagggcagccttgagatgctatttgttgtgaatggccaaggcagctgcgagtcttgcaggagtttagctttgggcaggggcttgatgattttaagcccccttcgcaagttcagatccttagacagcaactctgggacctgcttttcctggactggctggctctgggttggtgagctctgtttgctcgccatcgttctgtggacctttaactccccatctttggaatccactgtcccttcagcgacagtgttcctcatggggcaggggcaacacgtgctggctggagaaatgaaaaatcaaaaaactggctttggcagtttccactggtgcctctgtgctctctggtcacctttccgaggcgtctggtaactagtgcgagaaagtagatgatgcagtatttgttagctccggagcaattacctcatgtctgagtcttgctgcaacatgaggtcagcccaagaaacaatttcaaaaaaggggacaattttccacccagtttttcagagctttggataattagcactttctaattcatattttcagcttttaactgtttgtggaattttaaaaaataaggatctttgaacagagtcctgcagtgatctaggcaggccagggtgggtgtgtggaggttagcatgagaaggagagaccagcaaagcaacctgattccagcaggagtttgcaggaaccctaagccctttccttcatttgccaggagtagagaggacaacagtagcatagacagcatgctctgaactgttagttaaagggcccagtgcttcgagactcttcggcggatgcccttgttgggagaatgttcaaggcattctctccatgtggggaaagcccattcatgccatatgaccccggggccctaaccagtccataaacagcccaaggtcccctagtacttcctgccaccgaacaatgggaacacagatgctgaagtgagacaaatgcctgagaaggtggtcactggtcgccagtagagagaccttctattggagaagagcagataacaaggttgaagtggaggtgcagaggatggcattttggggggtatagcatggcaagaaaaagcaaattgcttctttctttttaagaatatttatagacagaaagtgcccccaaatcaataaaaatattaggtttcccaaaagggacttattagtggagcatatttccagagtggagaggaggtggaatccagcttgtatactgaagacatttgaaaatgcagggcagatatccagagtggaggatggtggcgaacagtagtacatccacaagatgggaagtagttgttctgccattgaaatgattattgggaaacaccatgagaagtgcttaggatacaatgttgggtggaaaagctcattataaagtggtctgtgcactgatagaaaaaccatgtctgcctgcgaaagcaaaaaattaaaataatcgtgttaaattaaaaaaaaaaaaaacttgccccaacatggtattgaaatatccttttgaggaacctagacttaaaatgatccactgtcaggcaaaaggcttttagattcatgctgctttttaattggtgtctaccttggggttccagccttggggaccctctagtgtgaggtggtggctggctgctaagcgcctgcaggaggccatgggctggcgatcgtgtctgctctgtttctgctctggattgctgggaactcccccgtgacaaccagcactttaaacgcttttaaagccttcaaacactttattgtttttccagactgacttccagtggatgttctgtgcttaggaggaaggccagtgcttgtggagagtttgaggcgatgagtcaaggcaaggggagagggtgctgattctttgtgctttatcatcttgtcctttcattggagaggaaggtggggctcagatatttccactttagcaagagatggatggaaaatagctgagatccttcactccggtggaggaagtactgcagggtgaaggaaagttgatagagcagaatcggggacctgagactgtggctggttggaagtcagtagagtccaagttggtggcacttctctgatctaatctttctgggctttatagaaagtctagaaaaaggaaaacttcataggataagaagctttggcatcaaatttacatttcacaaaaggtgcttgactatttattctggtggtttgggaggggagctagacttttacattttaaatgcaaatgtattttccagggtagagaagaaatagcagttccctgtgcccctacagaccctgtctgatggccaggcatgctagggaggtgcttgttcttcacacctgggcgtgtcagctgtgccagaggagctgtgtcacacgccacacaggcgcccacccctcccccccaccaccacaggaaatgcaaggaggactgtgatggctggggtggccacggttcttgggggtaattcccatgagtcctgggaaactccagggtttacacctgtcaatcccagcactttgggaggccaaggcgggtggatcacctgaggccagaagttggagaccagcctggccaacgtggtgaaaccccgtctctactaaacatacaaaaatgagccaggtgtggtggtgggcgcctgtaatcctagctacttgggaggctgaggcaggagagtcgcttgaatgcgggagggggaggctgcagtgagctgagatcgcaccaccgcactctggcctgggcgatagaccgaggctctgtcttcagaggaaaaaaggttgcccccttgtggacaactatctacagtacccattttgaagctgaacccactgaggcccagacagcttcagaaattggttcaaaggcatccagccgattgagagcacctggcatctcagactagggcctctggagtcccagtccctggcctcgcgttgccgacgttcccccggccctggagacagcaagccagcctgcgccacacaggcaaggcagcctcactcccggccttccacgtgggcagcccggccacttcccccacagcattttctgttgtcatttgtaccaagagataaatgctttccaaaaactttcctgtggcctcctggaaggaggccgattaagccaaacctatcaccacgctaactttgtccttctctgggcctgactgtcggccccaccagtatctctcccggacacaccccgtgtggcagaggagccttcgcagcagctgctgcgggaacgagatttgtcccttctcaggccaaggcggggaaggacctcgaagaaacggagggcgccgggctggcagttcaggctcagggccgctggggggagtttgcgcaaggctgggagccccgaggccccgggggaggtggggaggcagaaagaaaaagagccttttttaagttttacaaacaagttcgttttgtatgtcaatctgggtctgacctggaaaaaaaaacactaagaaactgcgtcttcaaacagtggctgctcaaaagaatgaaactgcgcgaccgggagaccacggaaagggtgtctatcttcattcccatttttaatttaaactttaatggaaaacacattttgcattttctggtctttccacctgcagcctcagatggtcgggcagaggttttgagtctgggcaattaagctggtgcaatcttatcacttccaggcctgggtttgactggtgaaggagaacagaatgccagctgaacaaaaggccaggtttccctggacccagtagtcagccaggattgttgtttaaagatcccagagccttgcaccctcccgctcctgcacactcagccagagctgttgatatagcagtgcagcccagagaaaagagagacctggattcaataggctggctgtgagggggcactggtgaattctatggtcacagcgaggcaggagacaaaggctttggcactgggacgcttgcgccccctggcccaggtgtccccgatgaaaagcaggttaggttgagggaatgtgaagcagcagaaaccgtgattgttggggttctaccccacacctgcaaagcctcacactgctcactcccctctcctttcagatccaggtactgtctctagcagcacatggattcaaacatggaatggaaaatgatcttttccccatgcttgcactttgggaaggccattctattctcagcaggagctactttatgctttttagagcaaaaatgccctcaataaatagatatatgtatatgcatacacacccatatacaaatatatacatacaaacacatatacagaaacttacaaataaccaagtaggcaaatcttatacttcagtttgaactgaagtacaacacagagagaagtgcaaaaatcatgaagtgcgctacgtgagacattatcgtgacgtgaatccacccactcccataagcacctcccgggccaaggagtagaatttcagccccctgtaccctctctccaccccacaaccgcttcctccacaaaactaaccaccaccctgcttcccagccccataggtgagttttgcctatttctacgatttagcctggaggcagtgggatctgccagattgaggacaggttttgtgaatagaccacgatggggctcctgccttctgcactctctggctgtgtgatcctgggaaaatgatatgacttcgctgagtgttgctcctttcatctgtaaaaaggaataagggaatgctggctctgtatggcttatgcaaggattaagtgagaaaatagatggaaagcgtctggcacaccgtgcatgttcagggagcactgcgtccccaccaccaccttcatcatggcctgtttaccctgatgtgctggcatcgggaaggtgggggagctcagcagcacaggcctgtggcagggtcaggccagaaagagcctcaaggcaggagaaagcagtccaaagccacagagagggaggccagactccaggaggacctgcctgcatcagaacaagttccttaagaaaacagagcctggggaactaatgaagtagaaatcggagaagaggagggaatctaggtcccttgggagagaggccagatgcccccaaccagcccctccttggggaaggcagcctctccttctaggagtgaaacttgaaccaagaacagtctttagggcaaaatccttttcctaggttgccatgaaatatacatttcatgcaagctttggagaggtcaaatgaccctttctctcagctttctgggagtttcctgtggaattcatgtgtgcccaaagaagaactttcaccaatggggaaatttaataaatgtggtttatctaaggttcgtgctttcggctacatctgcactaatgactcaggcagtttgctcctcggagaccatcatttttctttatttgctccagcagtgaggtttcagcctgagggagagaacgtcagggacggagaggcaagcattcttggtcctacttctgggatttttttgtattccctccgaacatttggttccatttcttcacttccttccagtcgtgccggattatttcttattgcagcagaacccattcataactttaatcagaggacaggacgaatgttcagtaaacgcatgtataaagagaactattgtatgtaattgtgacatctgtgggagaaaggatgtaaaaatagtaacgatcatagctagcatttatggaacacttatgagccaaggtccattctgagcacattgcatgcattatttgatttaatcttcataatgccattgagtggtgttagcccattttacagatgagaaactgctggctcaaagagatgagggaaatcagtggagggcacaaagctagtcagtgataagaggcaggtctaattttaaagtctcctttgcttaataaacatacagtcgtgctttgcttcatgatggggatagttcatcttcatgtgaataccacaaaatgtacttacacaaacccacatagcatagcctactacacactgaggctgtatgctacagcctgtggctcctagcttactaagctgtatagcatgttattgtactgaatatagtagacaaccgtagcacaatggcaagtatttgtgcatctaacttttaaaagatacagtaaaaatacactattaccgttgtcgtatatgtggtccatctttgcccaaaacatcattttttggtgtgtgactattaacaggaacttgtcccagccttactttgtcattggtattcttgaacatggaataaccaaatgtagctggctcttggatgttatattcatgtgactgtctcatttctaaaatggcatccacatagccacactttggcatacagcgggctcaataccacccccgtcatccccctccttgttttcatctggagctgctgcagagctagaactaacagtcatattctaggcaattggacaattcttataaaattctcttcctctgccgggtgcggtggtaatcccagcactttgggaggccgaggcaggcagatcacctgagaccagcctgaccaacatggagaaaccccgtctctactaaaaatacaaaattagccgagcatggtggcacatgcctgtaatcccagctactggggaagctgaggcaggagaatcacttgaatctgcgaggcggaggttgcagtgaactgagatcgcgccattgcactccagcctgggcaacaagagcgaaactccgtttcaaaaaaaataaataaataaattctcttcctcatcgtctggcttggatagtgcacacattttctctgaggcacacaaccaaacgcccacagctgggtgaggcggcaactccatttcggcatcccttccatgactggagactaaaaataggggtgtgtctgacagcccattcccacccctggcacccaagccagtccactcggccacagggagcggggaaaagggttgtttagaagaattttcttagcctcgaatacatgtgttgagcttatggtatgttttataaaagcagatcccagccctcgtttcaagggctctttaagatttccttaggagaatctcaaagagaatggcaaaaatgcctaagtttcacaaaatacaaccttgaattcactttaaacaaaggaaaaagtctagttttaggaaagaagggagaatgtgttttacatgtaacaacaaattgctttttcaaagtgctgggtacagaagaggtatgaattgaagtttaatttgaaaagattggatatcagcattctgagattacagaaaattcaacgcgtgactcctcaggttcagtgcgtgctcttagacataggtgaagggaagcaaaagttcctattggaatactaccactcacctccttcccaactcccattgccccctccaccagtaacatacctgtgtaccttaccctcacctgtgaaaggacccatatgtacataaacccagaagataccacagcaggaaggagtgatactggcttctcctccaggccatggcaaagtacaagctgcaggccaaatctggccaaaagtggcccatggacaaagcaaaacaaaaactaagaagactgtgcaacagagattgtagttagcctatgaagccaaaatatttactatctccttttgatagaagaaatctgccaacctctgctctagttcaagaaaaaaaatcaaaatctagacatgtcaagtcactcaccaactgtcacatggtgagttaataacaactggaatagacccgggtttactgattctcaatgctgtgttcctatcatgattatggcacagaccacagcgcttcagaactatgaatatggcagcttagggggcgtggtgtttgtttccccagagagcatttcattccaaagtattctgtctcttcactccataaagctattacaggcctgtatgattgtctccaaccaaatggattccattcgcttttcctttcttcctaggagtcctctgtccctcttcccctctccccatctctttccctttctactccctcctcatgtcatctcctactcttgatctcagaagaacattttggttataacctgtttatgttttgcctctcaggttcactgctggcctataatacaacctcccacaccgaccaatcctcacgattgagtgtcaaagaaggtaagtttgttcttttgtgcacttaaaattttcttctgtaccagacatgacacaggcccatgctgttaaggttgttgcagaaaaccagcttgcgtgttccactcaacttttcctagcatacaaagacaagccaaaattttcgccacttgtgctaccagttgcaaaaatacagtaaagaaagttttacagtatcttgtaataatatcacaaagatacaacttgaagttgtcactccatgcaggaaaacatgttacttttagaaaaaaatgaatgctgcttactttcaaagttgaaagttgggagttttctctgatgaaaataatgaaatgaagagttcaaggattccagcatgtctacctttaaaggtttttttcctaagaaattttagcagccggtcatgctggctcacacctgtaatcccagcgctttggggggccgaagtgggtggatcacttggggtcaggagttcgaagcccagcctggccagcatggcaaaaccaccatctcagctaaaaaatacaaaaattagccaggtgtggtggcaggtacctgtaattccagctactcaggaggctgagacatgagaatcgcttggacccaggaggcagaggctgcaatgagccgagttcgcgccactgcactccagcctgggcgacagagcaagactctgtctcaaaaaaaattttagcgatgtcaattcatttttaaagtggtggcttaagggtttggtctggtttggtttggttttgctgagaaagaaaacttcctcggcaaatgatttttgccagtgaagattttagtacacgtcacaatagaattcctcagcgtctttatgaaacatcgtgaggagtggttcagatactgttagatttcaggcattgaaacaagtgaataattcatagtacctggtttaaaggaggaaaagatgtgaacaaataattattaggaaccagagagagactggaaaaaatatttgcgcggcatagcaaaaattccacagaggaggggacttttgaataggagcttgaagaataataagagtgtggcaggcactctgtcctccttggctcgctgtctgtccccagtttttctttaactcaccctccccaaaatatataagaaaggcagaagttctcaggatcagttacatatagcacagcactgcaaaacctttcagagaaacaaaggctcttctaagggaaggaccatttggcttaaaatccgcatggggtgtgaaggaaacagagagccaaaggcactagctggctgtcttgcccaaggttacaactttgatcacacagcactttgtgtttcctgttaacaatttataatttaataatgaccagaacatttagtggaagaattatacaacataatgaatccgcttttaaacatttgtgtttttcatttgtttccttctctcctatcccaccctgagccagtcctgtttctgccactgtttttcctttccaaatcagatttcttgagttttgtcatgaacgctgaatttctatggattcattctacattgtgagtcagatttcactttttgacctattttaatatgctgttgcaaatgtctgtaagagagaaaatacattttagtggcaaacgcattagattgaaggtcagggcacctttggcttcctgtgagaaaaccacttcaggccctgaacctcagtttcctgcagaacgaaagagaagaactctgtcagcaagaggccagccctgactctggagatcttggcctctaaggagatgacaggagcactcacattgcgagggctcaagagccactgtcctttgatatgttctacatactgagttttatttcatttgtggatagggatccactttttggaaggaaggaaaaaagaaggggaaaaatgactagagggagagagagagagggaaggaagggaagggaaggaagatagggagggagaaaagcaaggctataaggaaggaagggagggaaggaggaagggagggatgggaggaaccctaacctctgaactgctgagttcggatttttgtaagtttctccaacacttcaggctacaacctgctaccaacatcagaattagccagtgaggctctgaagcagagctaatgaaatattttctgatattgggcttcagatatagggtttagtttagaaactggtttagccaagttgaaatgtgttgctaaccatctcctcctcctcctcctcctcctcctcctcctcctcctcctcctcctcctgctgtcttattgttcagccgtgtcctctacctgccatacacatttccttcccttggcccttttgtgtttagggaggacatttgtaacactgctggctcattcaggcttattgcaggagcagctccctcttgctgggtagcaacccctcttctgaaatgaattaactgtagtatccaggcaaacacacgctgccaggacctcattcaggtggtgccggcatttatctcccaacatcgggcctggcctctagagacgattaagcctgtgctttgcaggtgcatcttttgtccccagtaaagctctccacttgagctgtcttgctcctctatgccttccccttgtgaggtggtctgaatctgtctgaacgacccatcaagccacaaaacaaagtacattagcaagacaaagctaagcaagccctccctctatcctccctgcctcctccccacctctcactggctctcctgctctgctctaatcactatctattagctattagaagacatcaggcaaccttggctccatcttctttgaataagacacacacagccccaaacaaacccagagttcatcaagagcaccagagctgtgtgtgtgtgtgtgtgtgtctgtgtgtgagtgcacactggtgcagtccacaaagggcaggtgctggcatcaagcacaaagcaaggaagttgaggagatgctgtctattaatgtcttcaaagcacttatcaaattagaatggctttttgctttaaaattgtataatcacccttccagcttgtctcttgaaaatggctgcaatctctaggggttatttgtgcccaggaagtaagagtagattttaaaaattaatttagaacaatctttaagcccctttaaattaaatattctatggacatggattggatccagctagagcagttatgctctacctttagtttatcaaggctaaggcacttaaaaaaataaactaggataaaagctattgttatccatttacaatagcagccacaactgtcatctgtaaagggttttggaatatatcagacacctccacatgctttgctttggagcctagcactgggtctttgaagtagatattattatctctattttgcagacaaagaaagtggggttcagcactattaagtgactcactgaagggtacacagctactagatggcagagcaaggactcaaaccaggttagaggattagactagaaccccctcactttctgacaaatacagcctttctcttccagctgccattctgcaaaagcaatacctagcctaaatgtaacttgggcaaagatgtgaatgttttgcattacttgatttctgtccatgcagttttcccactgtcagctccatctccatccctaaacttttctctctttccaaagatgaaccaataaacaacttatgcttggcaccagcccttagttctgacagcacagagaatcaccaggagatctttcaaaatactgactctaggacaaacattgcatgattgcactcataggaggtaactgtcaactttgtagagccagaaggtacatggtggttaccaggagcggcaaggagtggaaatagggtgttagtgtttaatgggtaagagtttcaatttgggaagatgaaaaggttctggagctggatggtggtaatcgttgcatagcattgtgaatgtacttaatgccactaaattgtacacttaaaatggttaaaatggtaagttttatgttacatattttactaaaattttgtaaatgcaaaaattaaaataaaaaaatactgatgcccaagtgccaaaaaatgatgcattaattcagaacctccaagggtgactcctgggcattggaaatgttttagagctctccgggttattcatataagccaagctgcagccaagctagagaagcctgctttatagaacagagacaaactagagagaaatgaggcccatgttagagctactccagattttcttggagacacactgggcggttgtctggacccagattgtcctagaaaaggaatagcaggccctactggtatattgataaaggtataggtaagtgaagagactgtacgatcttgattagttttttgtcattgtcattgatgactgattttattgatgcatgatgttactgatttagacaactgtacgttcgtacatctcagaaatttctttctgacgtgtcctcattcagtcctctaaaaagtagatatggtgttggtaacgtgattttataggaaggatactggggttgcagaagttaagtggccttttcaagtgtgtaagagtcctggagccagggctactgactttccacaccttgttctctcccgtcctccaggctgcagatgtgcgtgtgtctgccctggtcccaggtcagagcttccctttgtttttctgggcaaaccctgccggaggccttcccagcacactcagctggcccagcagtgtgcaacaatcagcacatctcttcctcagagcttctttgcatgcctaagccctcatttccttagttcctcatgctgaatctgtttaaatacctctgactttccaaaagacagaggatattgagttccttgtttattaactcctggaactcatcaaccggccaagggcctgtggagcactgagcttctagccccagcctggagcctttcaggactgccattgaacacggaaactgaaaaccacagccccactgcaagcggaatggccatctccagccattgccttggctgatggataaaaagtctgtcggcttgcatgctaagtatggaaaagagaggggagaaactacctttctgtgtcccttagagtgaaatgcctggctggtgctgaagcccatgttaacgagaggctggcttctctccaggagagtcctaggtggcaggagccatgcacatggtaacaacagcattttggcagcctggtagggtttgccaagcacgttcctatccattatcccgtttgtgccctctggtgccatcaccatgagatgagaaggctggtagtattattatcccccttctatagataatgaaaacaaggcacagagagatttcagggttccttagaaggcacccaggtcatgaagcagaacaagactcaagtccgggcctttggtgtgttctgtccttcctctaggctgcttctggaatcattatctcagcatacttgattcaagcatctgacaacatcttaaggattctttaatactctcaatttaccgaaggtgggcactggtctcctatttcagcattatagcatactgattaaaaacttgggctctggactcagactgtgacctggacaaggtgcttacatttttctgcctcagttttctcatgtataaatgaggataattgtagtgccccttcagggataatgtaaaactcataaatcagcacagtttctgacacaccaataagtgctcaataaaagttataataaggatagtaaattgttattctaatttattatagtacaaattctaatagtaattaacattattattgaaagctaattacaatttttttttttttttttgagatggagtctcgctctgtcgctcaggctggagtgcggtggcgtgatctcggctcactgcaagctccacctcccgggttcacgccattctcctgcctcagcctcctgagtagctgggactacaggtgcccgccaccacgcccagctaatttttttttgtattttttagtagagacggggtttcaccacgttagccaggatggtctcgacctcctgacctcatgatctgcccgcctcggcctcctaattacagtatcccgctaattacagtatttttgagggtttaccagatgttaacaccgtaccaagggtcgtgaaggatactatacatagatagccaagctgctttaaaacttattcgggggccgggcatggtggttcatgcctgtaatccctgcactttgggaggccaaggtgggcagaccacctgaggtcagaagttcaagaccagcttggccaacatggtgaaaccccgtctctactaaaaataaaaaattagtcaggtgtggtggcatgtgcctgtagtcccagctacccgggaggctgaagcaggagaattgcttgaacccgggaggcggaggttgcagtgagcgaagatcacaccactgcactccagcctgggtgacagagtgagactctgtctcaaaaaacaaagcaaaaaaacaactatttagggagacacacctaggaaatatgaaggaaatataaaactgcatgtaatcgaaaaacaacaatgcatgctacacacaagatattttctgagtgtaatgaagagatggaaaatcattaatgctcaagctgaacatctcctccaaatcccttatagaacaggagagatctgaggccagagaaggtgtggacccagccatggtcacacagggagtgaagacaaatatatacaattattcctatgtaggcagatattatagatacatgataccttagtcaggaattgacctaaattctgtgattcatgctctcctccattcattcatttctttcttatggagaatcttctctgcatagaataccaggctgagccctaaaaccatggtgaacacagcacactacctaccctcaagcaggttctagtcaaacagagagacagacagctaagtaagtaaggaactactgtgctttagagtgagggcaatgcacgtatattaccacgtctttcaattttcccctgcatttagctcctgtgtggatgtcctttatgattttagaggtcatagtaaaagatggaggcctctagcaagctgcagcatggcagggctggaaatagatgttgaagcaaagggaaggaggaaggcaccaaggaaaccagcgtgtttgttggggtgggtgtgtgagttttcaagttgggttttggagacaggagcccaggtgagcccttgcaggaataactgaggcctgggtgtttgatgtgggtttcaggaagacaccctggggtagaacctgtgcaccatggcttcctggtacctggaaaaccgggtgcagttggatgtttcattgtgagacaggaagctcagcgaaggagcggagagccagggacttgtgtcaaaatcatttggccggggagggcggagtaggtgggcatggagctgaaataagactgaccatgaattcatgattgttaaagcagggtgatggggcctcagggttcattagactttcctctctacttgtatatatcttagaaattctccgtaactcaaaaaatgcctcaagatatctttgccttatttctccgggcgaagagtttcccgaggagggcatctttgtccctcgcgatatgcactgcctgtgtcaggctgatgcgctcccgggtgcagtacttgggaaggcgggcatttggcagccttgtgtgtgtgtctgtgcaggagggcgtgagctggtgctcagtgtggaggtgggctgtgtgtgttgccttgtagagtgcagcgtatgggggctaggtctggaacatgtgtacccaaaggaaaaggcctgtaatactgtgaggtaatctcctgttatttttagggagtaaataacatctctcatgcagcaggttgtgtggccccacaggccccatctacgtcagctcacacacacttcaaattggagggtatcgcggcctcacaggagagcctgtgaagaacattgtcattatatgttcttcctttatgatgaaatgtgcctaagccattcttagcaaaagcagggatgattgctggatgtgtgtgtgtgtgtgcatgcatgcgtgtgtgtgtgtgtgtgtgtgtgtgtgcacgcgtgctgtttctgtggtccaaaggcaagatttatgattatgggatagacagtagcttgctctctctattttattttttaaaaactgttttcctttgaaattcctgagttaatgttctgtctgctttctatctgaccctcttcggagagttgcatttttttttttttccacgagagagagattaagagagagagagacagagagagagagagaaagaacgagggtgacagagagaaacagagatcgggggaggagggagagcgagagaactggaaacaaagactcgttgtctctaagctggagcaggcaggaaaccccaatccctcgggaacttagccagcccgccctgtcctggagtcagactccagctctctgaattcaatttgacagcttgtctgggacactttctaagtaaccattatccttcctttctctaagtaaaaggactgttatttcttttcgtgggtgtgctgtgcgaactgctattgcacacgtgtggctcacacagtgactaggacacactttcctcaaattattggaaacagcccgtttcctaagacaagtgtaaatttgttccaggataataaggcaaaagactgagtatcagtccactgccttattagaggtgggcctattccattagaggaggaattttgtgtatgtaggttttacttctttgaggattcttttgaaatagacacaaacaacaatatctcccaatgatcattctccccagtttctgtgttaattgatggattaatttaatgaaacgcatcaccatacatcccactgtggagggaactcagatgtcctcaaagctaccagaggttgtgcaggccacgggcacaactaggggtgaccacctagagttcaaaggagcctgtcttctgcctgggaacagggccatcctggggtttcttttaattactcagacccagttgagtcaccaccataacctgagggactgtgaggtgatcacctgcccttcaatgtgttcctattggaagaccatcccgattcagctctgtgggaccgctagagacaagttccagaactgtctggatccccctggagcgtagaggtgtgatagttttgctcagtaatacagctttgcccatttaggttctgacccaaagacctgtccttcaaacatgacttggttcctgtctactctatcttcaaccacactttggaataatgtttccccattcttcctttgccgggtatacctttcatccgtctcagtccccacccccagtccatattctaggaaaccacactcaccctttagggccgtggtcagatcagacagcatcacctcattacggtcttgtgcacccttccccaggatgctttgcttatacccactgttttaccaatacagcattcaatagattctagcccagcagtcttctgtcttgtgagacgggaagcgtcttgaaggtagggactattggatggatggatgaaaataataggcaaagtaccttaaactgttccccagcagtctggtgtagaactaaccctttgagatgtttctacaaggtggatgttttggctctatccactgcagctgctggtgtggcattgcctttcctccctaccctgccctaaatttccattgcatgggaccccagggtggttccttggaagctgtgatcagtcccatccctgaacaaggaagcaaaactgataaagagcagatttcaatcacaagatgatggcaccagagccccttcttggcccaaccaccgcaggatcctgctgccaactggactccacaggcccttcaggtctctgcccatcaggaggaggctgaggacacgccaagccgaggaaaggtgacgctgcagggagagtgtaccttctgctcaattccaccttcctttcttcacttatgccccagacagccacaataagagctaacatttgttaagcacctactatgtgccaagaaatttcctattcatttcacatttatccttcataaaaccttgttaagttggcactatgattattcccattttacctgaatcacaggtatgatgttaagcctgaatcacaaagctagtatgaaacagaaacagaagagagcctgttcctgtagtcccctccccacctaggcaatggcaagggctccaaaatgaccctttcctacttcatctaccacccccatcatgcatttcccccaagtagctgatgttgtctagttgctaagatatattcatctattgactcctgctaccatctaaaaaatcaggagcctgacccagtgcaatcaatcttatttgcatttcaagaagcaatctagcaatttagaattttagaaattccactataaagaggttgtttgccgggtgggatggggcggtggtaatggagctgcaaagtatataaaagaaacatgctttgtccacgcttatcagtcaaattctttctttctatccatccctggagagagagagggagaggaagcttcttccatgccacatggagacaaacgggcttcagacatcttctagtgaaagaccaacgtataggaagcatcatttgtggtggtttcacagattttttttcattgttatgctttataatttatataattatacacatatccttttgtgtttaatactacatttaagaggataaaggaaaacaagagatttagaaaacaaagtattatattgagtaacactctattgatgagaatttcaataaactgaatttaagaaaccatccaggcacagtggctcacacctgtaatcccagcactttggaaacccaaggtgagaggatcacttgagcccaggagttcaagatcagccctggcaacacaactagaccccatatgtacaaaaaataaacaaaagtagccaggtgtagtggtgtgttcctatagtcccagctactccagaggctcaggtgggagtattgctcgagcccgggagatcgaggctgccatgagccgggattgcaccactgcactccagcctgggcaacagaacaagaccttgttctcaaaaacaaagcaaaataagagtgggggtggataaattcaataaatttaataaatttattatttgagggaaataaagtttccctcaaataatttcatgggtctatcagtttcatgggtaatcctctgcctctgtaagcttcataaacccatggttcccaaggagaagaaggaagagatgtcaaaatcaacttaaagcatcttaaagacacgtccaggatgctccagctgccccaccctgccccgtgtccctccataaattcacctgtgcccttggtagatgaaggaatgaggagaaggttggagatgaacacttgtgttcttagaataatctccttccattgctctggaatgccccacccctgccctgccccagtattgagagccagggcttcatcccaatgcttaactggagaagaaaggcaccttcctgccactacagagttcgcctcttctcacccctgtgccagaaggctccaggccaggcactgctcctgaccactcagaagttcccactttgccctttctgccttccctgggctgtctttggtctttctgcttatcagagctgcccttaaatgcaccctgaataaatcaagaccctcataggtgcccatgtgctctgctacattaatgatggtgacaatgaatgcatgagccctgctacattttagtaaaggacggtgacattaggtaaacctccaagtggggcagggaactggtgccaggctgtgggactgttgctgggggtctccagagcaccctccccattcgttcccattggactcagcccaacaatgactcctcccgcactgccaaggaggggctttcatgaccctgagtgcttggcagggtagagctccactacagttctcagtggcagttcacatccactgggtgggccgtttgggttttgcatgtcttctaatttatctgcagactctgggatgttactattttaggcctgccatctctaccaagtttccccttgacactacacgctcatcccactccagacgacagagcgaggactgcagatgcagttggccttgcttgatgcagcttcattgctattgcttggttcacaatagaagttaaaagtgatccccgttggccatttagaggagaagggtcccaaaatactttgggaaaaaaaaggacaggcctataatgctctgccaggggccacctcagcacagagtgttccaaatgtgttggttctgcctagtatactgatttagaaattccaccacatggaggttatttgaggcgattggtagctggaaggtatttaaaagaaacttgtttcaccaaattctcatcaaccaaattctttctttcatctatctggagagagagagagacggagaagcttcttttgtgccagacagagatctatgagcttagggcatcttctagtgaaaggccaatgtataggaaacatcatttgttattttaatataaaaacctttctaatccctttttatagattgaataactctctctcttcagaagcccttatctaagataataaagagcatatttctcatgaaatatccttgttggagaaaagaaagtccttgaggaggaaatatggaggctagaaacactacccaggttgtgagtgggctttttctttcttgtctcagggatctgtaagatcgagaagtttaacatgggtcaggtgtggtggctcacgcctgtaatctcaacattttgggaggtcgaggtggaaagatcacttaaactcaggagttcaagatcagcctaggcaacatggggagagtcaatctctacatcaaataaaaaaattagccaggcatggtggcacgggcctgtggtcccaactatttgggaggcttaggcacaagaattgcttgagcctgggaggtcaaagctgcagtgagccaacattgcgccacttcactccagcctgagcgacagagtgaggccctgtttcaaaataaaaatattaaacagaggcttaacatgcctctttgataaagtttaaattcttgtatttggcatattctaaagaaaagatggtaaaattaagtgggacaattactttatctgtcaaaatccaacacactcttcaaaacccgattcaagtcctatctgcctcaagatatgtttttcttcctccttaagactatagtctcctctcggagcctcacctcattcacaggctatttatggacctaattacagattaccttgtggtctttaattgtgagttttctcctggctcttttcttccagccctgtatatattcagtaaataccattgaatatttactcaatcctgctccaataaaggaagaaccagaagaaattagctttggttgacacaagaaaaattaacttcttatgtcccatgaactaaactctgaaaaagagtatcagctagagttctgtaggatgcgttagaatatagaaagcaattttttttttttttttttgagacagagtcttgccctctcgcccaggctggagttcagtgacgctcactgcaagctccgcctcccgggttcacaccattctcctgcctcagcctcccgagtagctgggactacaggcacccaccaccacgcccaactaattttttgtatttttagtagagacatggtttcaccatgttagtcaggatggtcttgatctcctcacctcgtgatctgcctgcctctgcctcccaaagtgctgggattacaggcgtgagccactgcgcccagccctagaaagcattttcatatgcatggtgtcatttattctcaaaagatccctgtgaggatccagtgtgctatttgcttttccaaactcttaaatttaggaataatcacaccactctctcccgcccctgccaagtatctaccttttacagagaggttcaataagaggttcagagaggttaagtcatttgcctcagaccacacagctcataactgacagagatgagaggcaaagcaaggagttctgaccccccagcccagagttctttcctttgcaatgagccatttccctgtttggaatggattcacgagaaattatggaatttcttcccatgaagatctttaagagcccttagtaacaccaccaacagtcctatgcttgataaattttaggtatcactcttccaaagagatgaaaatcattcttggtatcattttgaaaaatctttgagcttaagaagtcttcggccttttgggcctgtctgcaaaataattatcagccctgcccaatacactagaggaggttagagagaggcagttttttgctatgagtcataatttcaatttctattaaaattcttacatggccacatatgctacctctcaggctttgggcctctgggcctgtgctaatttgcatgtctggtttagataatgtctgaggtccttccagtctaaaaaggagcctctgatgctgtgatataataagtgagatcacattccacctaccaagacttgatggttctttttcttttaactactgtgctctgtctgatgtgtggatgcacagctcagggacggaagtgtttcctgctcacctgccaggccacaaaagaaggagtgctcttggccgggcgtggtggctcacgcctgtaatcccagcactttgggaggctgaggtgagtggatcacctgaggtcaggagttcaagacaagcctggccaacatggtgaaaccccgtctctactaaaaatataaaaatcagccaggcatggtggcaggcgcctataataccagctactcaggaggctgaggcagaagaattgcttgaatccgggagacggaagttgcagtgagccgagattgcgccattgcactccagcctgggggacaagagcaagacttcgtctcaaaacaaaacaaacaaacaaacaaaaagaagtagtgctccttcagcatgaactcacctgtccacttctgctacactgaacccagagacttgtcctttcctgcaaagcatttcagacataggtcaaaaggcaaatcatgggaattgttgggattttacgtttcttgatttgaatggccgttctaattcaacgtgaatccaagaccacagacttgacaatcacctgattcaaaatatgtgaaaagtacttgagtctttaaaatatggggttcatctcaccttttactattcctctcccaaacatcaaagagatgctgtcaagtttcttagctaactttgctatcctacaacataaagcaactctcatgcataaaaaactaattaaaaggaattggctttccagagggactttgagaccaatgtcagccaatctgtcacttttcaaaataaaattatggaactatgtagagctctattttcataatgttagatcaagtctttgctcaaattctatattttcagagaagacctcccatccctgcactgcctacttccctcctctggttttctcttcttcatagcattcatcgccttctaatatacaatgtaatttactacttgtcttgaatgtcagctccacagaggaaggacgtttgtctagcgattgttgtgttctcagcatgtaaagtgtctggcaaggtagtagacattcagtaaaacattgttgaatgaataaatgtgtggtgggacataaggcatcaattaaatccaataagttggtgatggcgaggggcaagaatgaatttttgagagaaacaaaggtgcttaagatacaacccctcttcctaaagatgatcacctagcgagggacacaagcgtacaaagaattacactcaaaggctaagcaggacacgggcagtagacacaagacaactcaccagtgagccttgacctgcagaactttgaaagcaaaggacacagaagctgaatgttacgcagacccaagagtgtatcccctatggccaaggagaagaagggcaacctcgctgtgaacattgcaacctatgagggtcggagcagggcagagggcgttgcgtataaactgcctctcatttatcctcaagcctgattacctaagtgaactgttatgttttcttctttctacctggaatcctcttaaaccagaggcagatttgacctaagaagtatgcaatttagttgcgtctacatgacccaatatggaaggaagttttggcaaacacccagttaatctagtcagtatgaattgctattccacatgaggctggctcaaaaatcccactttgaggccttatcaaaataaataggtcatttagacatctgtgtcacttagacacagagcctgtgggagaaatgaaatagaagaaggtcccaggttcagcagggagcctcacgtggccatggcaaggctgtgcccagagaatgtgccacttcactctccacgcttttcatatttaaaagtcagctatttcttccaagccttttcctcgtaggtctttttttccctttgcccatctaatatcttcaacagtacctccattatgctccacacagcagggtcagctccgaggcagaggggctgttggattccaggacaagatccttgagcaaaggaaacctgatccaggatgttttttccctgtgagttccaagtttggggaaagcgttccctggatattttcctccttccaaggtctcagtggatgccaagctcctctgttgctctttgggatgtaagacgccgctgaagtgaaggtttaatagcccctctagaatggtgggatgtagtgaggacttggtcctgagcttcaaggccaggtggccagtgactctggcacctgacagtgggggaggaaggaggatgctgggtaatgcctgggcctaacagccaggcagaccacctgtagccatcagccctctctgtcttctggggtggggtttctcaaaccagggtccaggataataatccacctcttcttttaaaagaaagccacgatttattttattatattattattattattattattattattattattttgctttggagacaggatctcactttgtcacccaggctggagtacaatagtgtaatcatagctcactgcagccttaaactcctggcctcaagtgttcctcccaccttggcctcccaaagtgctgggattacagccctgagccaccacacccagcctgagagccaagctttatttaaatttgggaatcactgttccaggagcacaggaataaaactgtccttcatcctttatagccctcaggcttctcttccttttcaaggccttcctcaatgggcttggtaatctcatctcaccaagataagcatggtagaggggcaagcaggatggaatagactccatgtatatggtgtgtatttttaaaatcaccatttatcacatgcttatttaatcctcatagcaaccgtagaaagcacctgttattaatgcttttcagagaagcagaactggaggttcaaagcagctgagcaacatgaccaaggtcactccacaaggccaatggcggagctgggatttgaatcccgggttaactgattcgaagtcctatctcctaactgccaaaataatccccaggcccaccagagagaaaggataccttcgtgatgacatcctaagccctgcatctactttgcctcagggtggggctgagggcgcggactcgagcaaagactgcagcagatgagaagctggtcctgagctgtgggttgggaaggttcgggcagtgcagcagttctcacaggtggagagcaggatgaaggaacgcttagaggagagcagcttctgcaggttggtggctgggagaggctgctcctccccaaagactggacctattagaagcacaggacctctgatggagatggggttttagaggatctcctagtccagccctctaccagtacacgtcataacctgtcggacagcccaacaacaaagaccgccgctcacctgcagtttcttccctgtcggagtctgggagtgaatcttcctcctcgtgggcttggctctcttgggaagttgagggctttgggtctcaggtctgccattgatttgagcatttctcctgtgcatcctcactctttcaagaaaggaggtctggatctggctaccaaatccccctgctctgctgggagcatgagcagccttgcccattgctcggctgaaaggtctgcattcagaagccaggctttccaaggataaacagggttaggtgctgccagccttcttagcagcaaccagaaattcaatgagaagtttcagggaaaattcatctttttccacccagtcattgagagcaaggttttatgacacagaggatgaagagagaggcttttgtgggctgatgtcgctgtgttgctggcctctggtcaggtcacaaggtggagcgctgcatgccggcagggacgtttgggctttcagacagcagaggcatcagagcagaagcaaatatcttcccaaagatgtttggccatatttctaggaccaggttaaaagcttcacacagaagctaagttaacattggtatgtctatgagagggtcatgtccagaaacagctttcgccttccaacagagactttgcggaaaaaaatctccatgctcatatttctctacctcaggaggctctcctggaatctaagaggccatttagtgtcaaattcagccccactaagcatcacataatggtgatactgttaaggacatcatatatgtgaggctgaattatccacaatggctggcaatgtcttcattctccagactgaggctccggcctctttgctttggcaagagttgatctcaggactgcctgaaaccagaaactccaggcaaagctctttgggtcactcttctgaaaaggaatcacaataataagatctgttatcttggtactctgtaaagccaaggtgtcagccttcacgacagtgaaaagttagtttgtcagaaccagggtgtgattgtctgctgattaagccatctgccaccacagaaacagaccaagatcatcaactggtacactggtgccgacggccacatttttacacactgggcctttggctgccacctcaagtttgtcagttctcaggaggcagactccaggcaccacattcgagagggcctccatgcacgctcaggcttcttctcatagcaggcacaccctgcctgagccccactccatgcgctgacggagagtcggggcaggagctctcatgcagccaggtgttgggctctgcaagggggtttgtgtggggatgtgagccactgggtcagctccctggttcaggcttctgcattcaggttatagacatatctctgtgtgtatgttggggactagagatgaccacactgctaaattcttcttgagtgacttttagtaggaaaaaaatatgaaccctcacttcaacaatgacattgttaaaaacacataaaatgcacaccacttcaccgagcagcattcaggccttgacttccctgtgggaacaagcttttagcctatgcctcatacataaataggtggattgtggtccactcagaggggacacaggagtgatgtagtctgtacccctcaacaccccagatggaaatcttttgcctggaggcttaatttcgtgaagaagtcagggtaggagcactgggttctcttcagctagtgatatcatgaacaataagaagaattgtgtgtatgtagcaagtaggagaaaatattggccaagtttattcattcaacaaatacttagagtctactaactctgtgtggggccctgttctaagtgcttggatgtatcagagaacacaacagagatccctactcttatggacctgatgttcaggagggagggggatatgaaccataaacgacaaatacaaattaattactgattaaattatgtgataagtgaaaatggaagagcagaggaaggaggatgagggagttgcggggaggagggaattaatgtggatttggaaggctgcccaacatgtttctgggtctgaatatttttggtctgtgacacaaatcgtattcttgattgctaacatccactgaggccacctctgtgctgggcactatgctgggtgtttacttgggtatctcatttactctgcaaggctggcctggttcttcatacccctagggcagaatgcaagactttagttcttggccttctgcatcttcatgctttttctttggagcagaaattgctctgaaaatgctgggtttaacttaaatcttacattgaccagacgtctcctcgagccccagagcctacggagtgcttttgttaaaccccagagccaatgtgctcaggctgtcctttgtgcagccaggtaccagtgggaagattttccatgcaaatacttgggaataaaaaagaaatgagagggaggcctgtggtctttgctactctgactccacaggctgctgggatggacgttggatgaagacaccagcttagggcatggcctgttgctatttatgactctattacttcacagtgagagcacagttcaggctgactgctgggtggcctctgtgtttctgtcacttcctttttcacctatgtgaggactgtagcattgattgggacttccaaagtcctgttagccaagcttctgccatcagatgggcctgtgggcacattgacccataaaactctgcctccttcctaaggccctggggcaccacagaaagatgggcctgccaagccactgctctgataaggcatgcctttaaccaggctccatcactcagagctacaggaaaatcccatggtcatccgccctctgttggtgacagggaattccatcatgcattcagatttttgcatgcctgctctgtccctggaactagaataagagaatagggagaaaagccgataagaagtcaacgataactatagccatggccataatttgggctccaaaagaaataattctgagtggttaccagatagctttcagagagggttgaagccttcagtagactaatgattgagcagaaaaaaatgtttagaaaacttgagacagattttatccatgcagtaagtcagaagtcaagtcagaagttcagatgacatgtacgattccctggaatttagtgattttttgtttgaatgtgttacttctcttctactttctgttctgctcccactagaattatctccttcccccaggccctcagatccaccccacataccacaagctcattcttcaccacaccctgttttctagcatggctgcaagcgcaaaacctcccttagttcccacctgcaacgccaaggtcccagagtttgctgagctaccatcagcaagaccttgaacatgcctcggccctctctcctctccctccacattgctctacttcagtggtacagctcctcccatggctgtctctagacctcaccttgacatctcaccacccacctctgccttgttcctacctgatgcactctcccctctccaaagagtcacctggccctagttccactcacctctctgtcaacctccaggaaccctttatgtgtcctccatgccttaggcacatgacccgtgtttcctcacaatcacagttaccctctcatactcacatgcaaggacgaggaacttgtttcctattacttcacacccactccctggccatgcacacaatacagtgcagaagttggtcccaaatctattaccagaggcctaagcagcagcctcctcctgctcaaagaaaaatgttctgccgctgccaacattgcacttcctctgcaagacatctcagaaaatgcccatcagagccttccacctcattccaagcttgcaagcaagctggtctttcatttgtcttgtttgtttttaagcaagaagaatccctttagaggaggaattaggaaagaaaaaaaagtcaaacagaaacagaaggagtggaggtttgtctctctcttttgtcccctgccttgcccttcctccctatcccatccccctcactttctgtgttgcttttcatgccagttgctaaagactgtaattttaaaactgaacgggcttttccagagccttgaggaatgtgcatctgcacgtggatttttccacaaaaaaagtgtccctgtcttttggatcttcttagccagaaacaatgaggccaggcaatcagagtccatccgtcttcccaactcttattctaatttgtttgagaggctcagaaggggctgaagggcatggttgtgtttcaccccgtcagactctgttgtttgatgaggtttgtgctccatttgttcggatggtttttatggtttctttgttgttcatggaataactttgaaggtcataattctgtatcctcaagctcctctgctattcctgctcaatgtctcaatgggactcataccaagagaaagggaaggaagaagtttccagctagttagttaagcaatttctcaacacatttatggaagcatgtggaatctttcaagaaaggggttacgatcacaaaagttcgatttgaggagtattctccaagacaactgagaagcaagcccttagtcatgcccaggtggggagcaggtctccaacctctcatttcctgatccagcccctttcccagccacatttctggcctcttccctttctctgtggtcatcagcccagccctctccactatcaatagaaaagcccgagagccctcagagagcctggaatgtgctcccaccgctgtgatgtcatcccacatcatccatgtgctgaaatcagggactggagtcggcccccaggaatgtcatggccatgggctttgagacactcttcttatgggcctttcacccaatccagaccttgcctgctcttcagagctgcttgaaggattttgctacagaactatggacatttaagaaatgtctaaccttgtgtcagtttatatttgtagaacgcttcataaggtgcttttccatatgttatctcatctgatcatttccacaaccccataaggtagataaaacataaatttttatttccgtattaaaattgaagcccagaggagacttttgattcatcccaggtttcacaacaaagagtgtcaggaagagaacttgaaccaatcctctgacttcacattcagggttcttcccattactttggctcccagataagactacaatcttctgaaagtcagagtgttaatattccaaccccagggggtgagtacacttccagaatttagggatgctttaaaagccattgctgaattgaattttatttctcctgatcactacagataatgctcatgcaacttttctgagaagcaggcgatgctaatgtacccctatttgttattgttcattagacccttcttatgactcagtcagaagaggagcttggggcaataacatgaattctggcctcaacaaaagtaagtaaatgttttatagttctttggaggaaagcatgtttctgaggacaggattggagaacaggatcatgagacacaggagagcagcaagcatttgtttccctgctttttgagtagacatcaaaattatttgccaatttagggcctttccatgataccagtccttgaaagatgatatgggattttcgtttagatttttgagttttgttttattgcgctcggttttagaacatgggaaatttgaaggttttcttgagacaaggttctgtaccaatgaatggtcactgtcactgggttttgcttttgttatttaaatcaagataatgactctctataattttgctcccgtaactgttgaggctaagtcgtaccaatttccccattccccttgatactgggtagatttcctcatatcatcatctcaccacttggtggagaaattgatgtctcagaaccctgccatctcctcaacaggttatcttctgtccctgatgaggagatgccggggggtctgggacatcaggttctccaccaagtggtgagatgatgacatgtcgaagtctacccaatatcccccagtaagagaataaggggcaagaatgactcatgaactcctgtaccagaaatcaaacttgccatgcctaggaagcaaaatatgaagcacatgaacaggtggtaaagggaattctttcaagaaagaggttggggttacaaattaatgcccaaacaataaccaagaccccttccaattatgtgtattaattatttacttactctgcacatgacatttggcaatataagattcacaaagatgaatcagacatgcactggtcccataagcgggagagagaaatcaagcacacacagaactcctttcttctggttggtatcaaggaaggctttgtggacctggtagcacttgagttagctctggaaggagaggcaggatttggacctgtggcgatatgggctggggaagacatgagcttggcatgtctgacagtcagtgaggacctcaggttcctggagcttaggatgtgtgatgcagaagaagtctggaaaggtaagaaacagaattgtaaatgatgctatgaagatatgccttagttctttaggcaatgaagagtcactaaggttttgaacactggcgtgtatggtgggttgtggggagacagaagagtaatgaggacaccagtcagactaagccagaaaccatgcaagaagcaatacagatctgtgatgcagaagtgatcatgggaatggaaggggtgtgtgagagataccaaggaggaaactcacaagacagggacaccaggaagcagctgatctttgctcagatgtcactttctcagtaaggacttctctaactttccgatttgaaaatgaaatccacagcctcagtaccatcagtgatgctatactgttagtttactttttaaaaatttgaaaatgaaaaggtgacatttaagcaaagacaaaattttaagaatttaaaaatgtgtttattattgtctctcccattggaatgcgagttctaccaggaactgcttgttcattcctgaatctccagcctggagaacagggccagcacatagtagattctaggtaaatgtttctaaaataagatgaataaatgagtcagtggagagtgggcgaaggaatgagtgagaaagcacatctgtcaagacgtcttgctcccctcggggagctgggtcctactcactgcatttctttccctcttgccacaggtcctccccttggaggggcacaaacgatcagtaagaatacagagcaacggccccagccaggtacctgcccaggatatgtaatctctcctttgcttcctgcacagttgttgatttcacatggtcaactgatggagggtttaaacaatataccacatatgttttctcttatttctctcaaagagggtctatctttgaccctaatagtcctgtgaatgaagtaacaggtactgacatcaagtagagacttgttaaatatcaaaggtgaaagaacttgaagatgaactattccaatgctttattttgttcaataaagaaactgaggcccggggaggtgaagtgacttgctaaaaaccatacagctggttaatgaaagaaatagggctacaatcccagatcccccaaattcctgtccaagccttttatgcttcaccaaaccttactttcagaaatatccccatcctgtgatgagttggcttaacaattaaggcagaggaactttgaaagccatggacctggagactccgtattggagaggaacttggagatttctgggtctatcctaccctcacctctaccttacttgtgcttgtagtaaaacagggcgttgactttctagctgggctcagttccactatctgacccaaagtctgcctcctggaatttccactcaagcttttccttctggagaagccttcctcctgcttcctccgaaatcctttgcatatctgaagacagctgctgtgcccaagccccagctcctctctctatcttcttatgtgatgcagctgagatgaagttctgaacaagtcatttgctttggggtaggcaaacattgttccccatctccacagaaggcagagcaagagaaaatcaactgacatttcacctggaaggttaagaaaaaatttgctgactgtggatcataagtcagatgtagagagttttaaagactgtccaataacaacaaaattatgcattagtcatcacctgccaaaaataattatcatattaatgatgtggatgagaaaagatggtctcaatgggcttaaggacttttgaaggtaatttatggttctaagtagaaacccaaaaatcatagtgatatttttaaaactgcaattatagttgaaaaatagcaaaattttacaaaatacatgacaattttgccaagtcgagacccagctctctaccatgatttcctcaactaacaaaaaaggagataaacctctcacctaaaccagtattgcaaagactttttcatggctaaataaacacatacgttttgaggaaagtgagattttaagaatagtcattttatagctaaaatgtacactctggtttgtgctgacatttctggcttgtgtgacatttcaaatcacagagtgttatactagaagaaaactgaggaatccagtagcccaacccactcatttgtcagatgagaaaactgattcccagaaattgtccaacaagttatttgtttatcacatagctgctgctaaaacccaggctgcttggtttctaggcatgtgtttttcatgctacatttaaaaaaaaaaacagattaataatgttgttagtattaggtagagttattaaagaccagtaaccatgagacctgctttaagcccatggagtcagctgtccgttgtatcattgaatattatccagttcctttccaaatgttttctttgttttgctttgggtaatgacaacataatctgcacattttagatgccaaaataagaaaaagtaatcctgttcctattctttgttctttctgtaattattgagatgaagaccacaaatgtcatcaagatctttgagatctgcaaataaaagcagtaaagttttctgaaatcagtctttcctgtgatcttgaaataaaagtataaacccttatggttttcttatggttggtacggttgtcatattttttaaaaacactgaagcaaatttccttttttatttccttagatccgtatcagatcctgggcccgaccagcagtcgcctagccaaccctggtgagtttaccttggcctgcaagccttttttgccagaatgtttcgtagctttgtgaaatcacagagacttctgtcctaagtccagacacctgagtggggagtaacatgcacgtctttccttgaaatgttcaatgtctgtttctggagcatgtgaacaacaggtcagggcttgttatgaggtgtcaaggttggttagctgaggatacttctaggaataaacacatcagcactgcacatgtgcacttaggtgtagatgagtaataagtggcacaggtaggtaggcgtttcaatcagagaaaatgggcaagaaagaaaagaagacaactccactcagctctcagttgtctcccgcatgccaggcacaagttcataaatattccaaagggttttatttgtgattttagaaagtgttgccaagttatctggccttataaaagagatgtgtcctggaaaagttgcagatatagtcaatttgaccttgtactttaaagatttagtatcaaaaataactctcaagagggtccttctaaaccaagtccatcgagattgggagctagcaggcccttgtcgcagtgtggcccactcaccttcccatcccagggactctgcctacccattccttagtgcctggtcattactgccagaggagaaagcagccacccagcatattctgggtatttttctctctgcacaagttctctgtagaacttagagctgcaagccaagctctgggcctgccaagggccaatccaggtcctgtccatccaaaagctaaagctcatggcgcagcttctcccaatgactcccacagtcatgccttgcccctgactttttattgctgacagggaattccctgggggacatgaccactaattagagatcagtcagtgattcaggcctttctagatgaagagattcaaaagccttgccaaagggattgaggggggatatggctcacccaagatcacacagctagttctgggcagagtttgcacctcacttcccacattccatttaccaggccttggggcaaagcatcttaggatctaacctcgcttattatacccatctccaaggcaagcagaaaggcaaatcaacaatgacataagaagggcttgtcaagtcgatcccaatgtcgaaggaaacaaaaggtttctttaaaaggatgagaagctccctgcatttagggaactgggttctgccttctctgggctgaggtgttctgttctctcccgtttgcctcacggcgtgcaggaagcgggcagatccagctgtggcaattcctcctggagctgctctccgacagcgccaacgccagctgtatcacctgggaggggaccaacggggagttcaaaatgacggaccccgatgaggtggccaggcgctggggcgagcggaaaagcaagcccaacatgaattacgacaagctgagccgggccctccgttattactatgataaaaacattatgaccaaagtgcacggcaaaagatatgcttacaaatttgacttccacggcattgcccaggctctgcagccacatccgaccgagtcgtccatgtacaagtacccttctgacatctcctacatgccttcctaccatgcccaccagcagaaggtgaactttgtccctccccatccatcctccatgcctgtcacttcctccagcttctttggagccgcatcacaatactggacctcccccacggggggaatctaccccaaccccaacgtcccccgccatcctaacacccacgtgccttcacacttaggcagctactactagaagcttactcatcagtggccttctagctgaagcccatcctgcacacttactggatgctttggactcaacaggacatatgtggccttgaagggaagacaaaactggatgttctttcttgttggatagaacctttgtatttgttctttaaaaacattttttttaatgttggtaacttttgcttcctctacctgaacaaagagatgaataattccatgggccagtatgccagtttgaattctcagtctcctagcatcttgtgagttgcatattaagattactggaatggttaagtcatggttctgagaaagaagctgtacgttttctttatgtttttatgaccaaagcagtttcttgtcaatacacggggttcagtatgacacagaatcatggacttaacccgtcatgttctggtttgagatttagtgacaaatagaggtgggaagcttataatctaattttaggaggaccaaattcagtggatggcaactggaacattgattgtaaggccagtgaagttttcacccaactggaatttgatggaaagaaggtttgtgtgtttaagacgccaagggcattgcagaatccctctcagtggacagtatgcactcagctgaccactctctctagaaatagtcaagatatgaactaagaaattttaatgcaaatacatacattcctgaaagacggggaattaaattactaatttttttttttttttaaatgatgacagtggtcccagaacttggaaaagttgtagggatttctaaactcaagcagattcgcaagtgctgtgcgcttgtcagaccatcagaccagggccaaccaatcagaaggcaacttactgtataaattatgcagagttattttcctatatctcacagtattaaaaataaataattaaaaattaagaataaataaacgagttgacctcggtcacaaaagcagttttactatcgaatcaatcgctgttattttttttaatgtaatttgtacatcttttttcaatctgtacatttgggctgtctgtatgtttttatagctggtttttaaaaagcataatatgcctatagctgaaaaggaaacagggctgtttaagtcactgacttatgagaaagcaaagcactggtacagttatttaacaggcatacacaagcagggaaaagataatccatttagatctttaatgctttggaaatgcgtgtaacagtactgcaataatcacagctctgggaaaaacaacgaaactttcccttgtggagaggagggattttcctgctctatataagcaacatatttttagacattaaaatatatataattttgcaggtaattgttgacttttttaactatattaagtgttaagctgacaactgtcaaagaagaccatgttgtaaaataatttgactaaataaatggttccttctctcagtgctgaggacagttttcttatttaccgcccccgttaggtcaaagggttttccctggggaactttcctatttacttcttgcactatcaagaatttttcgaatgtacctactgcagtacagcagaaggtaaaaaatcagtgtggtttttcattgttgttgatgatgtttgtagtgtttttgtgtgtgttatttaaatcttcctccagcctaaaagggttttataaaacagcagctaaggccatggataaacctgtatgtaaggactggagcaaagcgagctggtctatccagactggtctgtgagatttaactctgcagcctcccctgggcacttcagacccagacggccaccttctgccactccagcaaagaataagcgccctgcttccttcaggtctcagaccaggactttatggctcatgcagatttttaaggtcatttttcttcccaaggaagaaacttgcctccagttccttcactgttaggtagcttattttcattttctctattttacaatgaaaagagtgagacctgggaagtccttgatttgcaaggaattagactcacagcattggtaaccctagaaccttcttagggtaacactaagtaccttctagacaacatgtctacctaaatgaaatgggatgtgtttcggaacatttgtctccagtttttttttaatcttgcaccctgccatttaaaaagatgtgtaaagcacatattctcaacatatgcacattgatttataaatcatatatacaaactgttacattattcttcatattagaaaacaaatacaaaatagaacattttaaatggtgatataaaaataaattgaaactgaaattctactcttttcctcctattttctctatattgaatatcctctgctattaactctcaaaacaaagatgttggtctttagtgaaaaaagtgtatgcatgtactggatttctagtgacttccaagaaaggagaaaattaaaacttggtattagtggcccaagcatagaaagaggaatgatgaaggccaggtatgtttaagaacaaactagctgaattctttggcagatctccatcttagccacgcaatttccccatcaattttgaaatctgcaaagtattcattagggaaaatggaggcatatatttctgagtgctgtaagaagatgctcagcccattagttcattcttttaaaggttttctttatgtgtcctactcaaacactggctcaggctcatcttctctacacagtcatagagctttagccaaatctcgccccctgaatatgttccacagtgatttgtcctatgcctcagaagctggcccactggctgacaggactggggcaccattttctcctcataagcatttgtacagagggggcactggcatttattcccctgcaatgcccagattgaacgtttgctagctggctccagggcatgcagcggactagtcccagaggacaaacagaatctttgccctcctgtctgctagtccagtcttttccctgctggatcattctgtgcctgtgccatgaggtttctgccatctaacaaacagtgccagccaagcaaagcgggcatgcaggcctgcaagtggttctcatggaagctgttcctccccacagtttgggacactgaccaacagtcctttagcaggaggtcgtcttagtccatttggtctgctataacaaactaccatagactgggtggctcataaaaacaggactttatttctcacagttctggaggctgggaagtccaagatcaaggtgccagcagattcagtgtctggtgagggcccttgccttggtttatagagggaaccttctcactgtgtgctgatatggtgtaaggagcaagggaatgctctggggtctctttcataagggaattaatcccactcttgagtgctccaccctcatgccctaatcacctccaaataccttcacattggggattaggtttcagcatatgaatttgggagaagggacagacacagtcagtctatagcagaggtcatcttttttcagtgtcgaaaaatgttgttgagtcccacacaaaggaagttctattttattttattttattttattttattttattttattttattttattttatttctggagatagggtatctctatgttgcccaggcaggtctcaaactcctggcttcaagcaatccttccacctcaacctcccaaagtgttgggattactggcgtgagccaccacactgggcctattttcaatatctgttattttaaaacatttttaatagtcaacagccactagaaaatgtaatgacacttaaaaagattgttattttacttaaccaataacatctgcatgcaagtgagcgatgaacatacacaaagggaaatggattaagaggttctcagataaggtttgctagtttagaccaaatgagatcaggaggttctagaacacaagggaggaaagcagcatctgtccaccccaagccaagttactgccaacccaaggcaatgcttagtggataaataaaaacctgaacaaaatgcagtacttcatgtgagaggtggtttctgtggacttggattcttaccgtatttcctctaatatctgttcattacaagcatcatgtaaacctgttgccttaaaaactcttgaaaaggtgtcctttgggggaatgtgcttgggggaagcaacccttaagcatggctgtctgctgcccagccccactcccacaccttgctcagaagttcctccaccatcaacagcaccactgagcttgtgtccagaaggccctcagggggtcgaggtaagaggatgctttgtatcagtgggggcagggatgggagaggtaataagagccgggatgggggccaggggagtgactgggttctggtgagcatacagaagctttgctgttattcaggaaggaatgcaggttttgcagaaagcacattgggcatttcatcacgtagaaagctactgaaactgacactacacgccctcagccagggagtcccgctaagggattatgaaaggcaggctgataccaaaactacaaatcccaggctcccccgggggatggacacttgtgagaggaagtgggttagccagtcaaacctccagggtttcagccagttgagaaaggatagggagggaagttttaaaaggaatgtgggcccacaagcctgggatctgtctctctctctcagtctgatgcggcctcctgtctaattgtttcagtctgtccgagctggtaaatccctaagcacatagtcaatttacactcagcttaaaagctctagagggagacaggaaaaatttccagtgagaccactcactcacctacaactgctagattaaccttctgcattttaactgagttaactcatatgttttcttagtgggaggaaagaggcaatttgagtagacaaatgaaaatgaatacaatgccagaaaccctgggttcaaatgctggcccttccacctactgggtaacttgtcttcatcgattaactaggacctgagttatacctcctgcatgagtttctgtgaggcatcggacgacagtgtggaaaacccattgtagactgctgtacaggaggtttatggataatcatcgttgtctgctagtattggctagtatttttcaagaacattcattaagtccttggtagctggtgggcaccctgtttggggagttcagtgcagggtcatttttgttttgtggtcagaaagacattttccaaatgggtgcaaagtagaaataagttgggttttccagagagtctttgcattttccccatccacggccctcccagtgccccacttgggcttttgcccttccttggctctatgtgtgcacctaaagccaggggagcgtgtggccaagctgcaggatgttgcaaataaaatgagattttataaaggaatgctaaaaatgtgctttcacagcaatgttggatgggatttttcaatcggctaagaaatagaggttgggagctgggattttatgcccggcaagctcggagcttgatttttccatctataaaatgaggatgatttaataactgtacaagagtatcactggagttaagtaagatagtgtacataaaaatgctctgtatgttgaaaagaactaggaaactgcaagatttcctaggtattattgccaaggtcttactgtcttcatcgagaggcaactcctctttaccttcaaaactctgtacaggtctctgttcctctctgatctaagatagagtgaagccacactattctattctattctattctgtattgtgaatatacattgtgattttttaaaaaactgtaaaatcttgaaatagtcacaaacttccagaaaagttagaacagtacgacgaacaatttttagtgaatcatttaagagaaatttgccaaccatgcttcatcaaccccaaatgcttaagggtatatttcatttaaacaacaaccttttcctacatagtccagtataatcaagagaatcgaataactaatgcaagcggattactcctatgtaatcccgaggcaccatgcactgttggctgattgtcaccactgcagtcttttggagcaaaaggttcccattctaaaacactgattgtgtatagctgtcatctaccattagtctccctcggtctttcaggtctgtgacaattttgaatatgacaggtcaggtattctgtagaatgttccccaatttgggattgctggtatctcttcgcgattggattgagccaaggcttttctgagaggaccatcgcagaagtcatgctgccttcctctcctgtattccattgcatggtacatcatttcaacgtatcccgttattgatgaagttcactctttgtttaaggtggtgcctcccagccttctcctttgaaaagttattcctttaccctttgtaattaataagtattttgcggaggtttactttcaaaatatgtaaatatcccattcaacatcaaattgcaaagtattcattcatttatttatatctctaagactcatggctctctattttattgagtggatatgatctgttctttaatgattacattgtcccaatggaaggatattcacgctggcttctgtctcctttgacatgttcccatcagtctttaagtgcttccttactttctcgcacaacaacttattttggagtttctgccctagccctggaattagtcatctcctcatggattcctagttctttttagtggaaaatgctatttagaacccaatacctgggggatagatgtgccaattgctaatggggtgtccctgctcccaggctccctcagtgtacagagccaggcaatagacgtagatacatacatacacatatattatgtatgtatgtatgtgactatatgcactcacgtacatacatacatatacagtcatgccttccttaataacggggatacattctggaaaatgtgtccttaggtgattttacagttgtgaatatcatagagtgtacttcacacacctagatagaacagcctatgacacacctaggctacatggtacagcctattgctccgaggctacaaacatgcacggcatgttactctactgaatactgtaggtgactgtaatacaatgggaagtatttgtgtatctaaacatggaaaaggtacagtaaaaatatgaggataaaagttaaaaaatggtacacctgtatagggcacttaccatgaatggagcttgcaggactgcaaattaatctaggtgagtcagtgagtgagtggtgagtgaatgtgaaggcctaggacataactgcacaccactgcagactctgtcaacattgtacactcaggctacgctaaatctacaaaaccttttcctttcttcaataataaattaaccttagcttaccgtaattctttataaagttctaaattttttaactcttttactctttggtaataacatttaacttaaaacacaaacacattgtacagtataaaaatatcttcatatccttattctatacactgtttttatttaaaaaaatatttcgttttactccttgaaatttttgttagaaatgaagacatgaattcatatttagcctatatcctgcctgaggctgttttacagttaactttctaaacatgtaagtaggcattatctacgtatatctaaaatctatcattctaaaataatgataaaaatctatcattttaaagtaatgatacataaacagtaacatagttgtttactatcattatcaagaattacgtactctacacctgctagactttcatagaccgtcagggaagtaggtttgttcacatcagcgtcaccacagacatgaagattgcattgcacttccacagggcatgagcaccgatgtcactgggtgatgggaattcttcacctcctttatagccttgtggcaccaccattgcatatggggtctttcacggacctaaacatctttatgcagtgcatgactgtatatgcttatacatttatatctatatttatttctgctatctatatgactatgcatatacatctatttctgtatttatttctactacctatctatattgaaaccctgagttcactcagaagcattcatttctaatccaacactggatgttgattccccttttgtgtctgtaattcctttatttgacagtgaaaagaatggtttccattagacatcctataagcccttccttgtcaatccttctgcatgcacccggtcttccatctctgctgcacccctcacctccatgcaacgtgttcatctccctgcattggccctaaactcccatccaggccaccccactgcatgggcaccctcctcaccccaccccaggcagtgcctctgtgtggatgttgttctcaccctgttcaagctctgatgccccaacccaggcaacgcctccacaggcaaaccctcctcaaccagctgtagccctgacagccaggacaggctgcacgccctgcgtcccatgctctctttactccacttgggcactaacacttcccatcaggacgcgccacacggaagcccttctcaccccgttcaggctctgatatcactaccccctgacacctgccttgctgtgctgcacccatggctcctgcagtcaagacttcagtgggagggggaggaagagggaaggaaggggaaggaagaagggaagatgcgtgcttacacatttacaacagcacatatctcattgggtgtgtgtatgtgttgcccatgcatggcaaaaagggaccacaagatccattaaactgtagttttgcctgcttccatattctctctctcacacacacacacacacacacacacacacacacacacgcacacacccttgtgccttttgagatgcagaatctggcaagcagttagagaaaggagagaaagagatgaaggagtagttaaccagagaggctaacaagataataataaggaacgaggcacagacaagtggagaaaatgaaatgttaaaatcttgttttaggtgtgcaggggagaaattggaagtgtggctggtaaggatgaaaaagcaatgttctgggttataacgttaatgtttttgatagaggctggggtgaagaatgcatggctttttaattatttttggttgttgtgttctgtcaagagagagtaatacaagaccccaggatctatttgtatctgaagtctgtgtcctccattagacaataagggaatgaagggcagaaactttgtctaactctttctttataagccagtgcctggcttctagaaagatccagaacatgtctatttgtcaaactacacctactggacaaaacgtgtccaaacccaatacagctgcccagaaattctgagggaagcatgagctgtccgttctgctcagttactgttaattccggaaatacacagagaaaataaaaatcacggaagatgcagttaaagtatggagctagaccactgttaaaacttgccagcaatttttaccaatccaatctttggtgttaattggtttccccagaagatgcaatatctctttccccactgatgattatattgcccagagccgctggctttcagaaatgtttaatcaagcattgcatatattcaagcaatactttccagacacctcagcttttcttgacagcgttaccttccttcgctctttctttgtctcttttaggaacatcaaatcatccagtgattttctgcataactcaaagttttgtcatttagaaaaaaaatcataacagaacagataaccattaggaaatcaatttgcatcagacatccatttgagaagtttaaaatgtggggaatgcaaactctacccatagggacttagtctgtagggaagaaatatgaacttgccactaatttctgaaaagcaaaattaattcagttatagctagatctgccttcataaggatatttctgatgcttctcagcctgttccttttatactgaatatttacaaacttcagtgatcacctgatcagaatccaagacacaaaactcaaatgaatccaatttttcaagtggcttcaacccagcaaccaaatcatagggctgccatttgtgctcaaagccaacactccaaggttttgtgtagatgagaatgaagagggagaaggcgagaaaagaagccatttcctgccgggggcggtggctcatgcctggaattgcagcactttggtaggctgaggcgggtggatcacctaaggtcaggagttcaagaccagcctggccaacatggtgaaaccctgtctctactaaaaatacaaaaattagctaagcgtggtggtgcatgcctgtaatcccagctattcaggagattcaggaggcaaaggcaggaggatcgcttgaatccgggaggtggaggttgcagtgagccgagatggcaccattgtatgccagcctgggcgacagagtggacttggtctcaaaaaaaaataaaataaaataaaaaataaaggtgtttccatccccacaaagagctatgtcaccaaagacacaggcaccccctatgacgtcctgctcatttaggaaacccatattcctagaagatcaaagcccattacctctggggaagtttgtttaattccgggagggatattatgggcatttgtggagtttccagaaaactcaaaagagccataaaaatcgtatttacatacaacattcatctaggttaaatttctttgcaagaagtgtctaattctcaagagatcagctattcagcttgctgggagctaattacaaatggtcccttagctttgctcagtcaactggccaaaaggcaacggagaggaaattggagttaagacaactgcagttggtccctggagggagcctattctactgccagcattctggctaatcagaatggatacagatggacaagtatcctttatgcatgagggcctgctggttttcctgggcgagaatatgacagaaagtcggggggctgatgctgggtttccaggaaatcagcttaatgatattaatggaaaaatatagtttagcaagagacatagcaaatctaggtgaaaaccgtctctcactaaaccctgaaccattctgatctctgagaaaacggaaagattggcctaaccatggaatttcctggtcttggtggatttataactgaagcttcagcagatgacccgagccataactgctggctgcacagcaaattcaattatcccaaattccaacacacctcccctcttcctgcccctcacccctttcttatcataatcttttctgggccatcaacccccactgggttggctgagcccaagtttaatttctctgcaagctctgaactaagaatcgatgctgaagacttctcatcgaggaagaaagccacattcttcatggagagcagtgacataatttcagacccagcctggcctaaccagtacaaagagttagtaaatcagtcctgtccccttttttctagccatctccaaggacaaagaaaacagcattaggatacacaaagtaatttttctaacagcatggaggcccttactgttaatgaagggaaacttttgaaacagttttatctgctgaggttttaatcaccataatgcataccacatacctatcattggtctccccgctctcaacctggccacatatggtcagagaacatcccttcattatttagagtggcttcatagaagatggctcctttgagttgataggcattcatgcaggcttcctggaatactgggaatttactgtcaaacagccatggcaatgagggagacaggaacctcaggagaacaggaactcttggagggacagcctcctggcgctggaacaaaaaagttaccagtgtccaaagtggcaggtgttcctgggttcccatgactaaggtcccttctcacagcttgccactggtggttcatctcactatcatcttgcctcaatctctccgtatttcccagttaaaatgtttgagcgggaagatctggtttgcctagagagttactgccagtgaggtaccctaatgggccagcctaggccacccctatggccaaaatcaggacagcaccgagtgagaggccacctaggacagcatctccccagagtggccccactgtccaggacttacaggtatccatgcttcacccagaaatcttatgttatggaaagtcagccaatgtcatcttagagaaggatgctacatcgccactgggcctaggctgaaaggcggcctttaggaactaacaccaagtactatcgattttcatttaaccctcgtaacagcccaatgaggtgggtattgcccatcccagttcatagttgaggattccgaggttctgaaaggacactagcaggtggacttggaacctggcctgccggctccacccctgagatgtttggcactagcagcaccttctgactcttggccttttctgcctgctccacgggagacagacgaccccggcagagagctgcctccaccacagagctgaagcacaaagcccttcacagtttccaaggcctttctttcctgtaacattcgtcactgcccatcgtacccactggcttaatgtctgtctctctccactggaaggaggctccacgagggcaccgctctggttttcttccctggtgatcccagcacctagaaggacgcccgcccgctgcctgtgctcagatacattctcaaatgaacagctctcctgtgacaaggacacgttcggtccccactttacaagtaagggacacggcctctcagcaactccgggactggagggctagggcagtctgggatgcctcatcctgcaatggagtccgcctatgacaacgtagaagctctctgggaggaaaagggaagcggtttgggagtttctagaagtctacctctgcagcaacatttggccaaccaaagaaaggttttcgatttgttttattttgagaaaggttcctggaagacccccccaccccacccagggtggagacgtccacctggcagcgcctcggcccagctccggcctgaccacccaggttcatctccccctgcccgccgcctcccaccccccgccaggcccctcctccagccgtctgtgaatccagcccatttaaaattccctttgaaaagatctctgtttgggtgagttccgtgggctctgcccagagagggcagattatctgaaaataggtgttattgattacaaccaagtggtctttgtggaaagggttccacttgaaccaaaataaatatttgccattacaaagaacaagccggtccctgttgcgggcgggggcgtcctcggccctctctggccccctcggcccaggagctacgcgagctcggattgtgtttccccggcgaggacagggacgcgcgcgggcggggagcaggggcccggtggctccgacgccggaggcttgcggcccagggccggctgcaggcttgaagcctgctcggagcttgggattgtattttctttggctttctggcgcgctccttattatttatttcttttccctctgttttatttttattttcaagctgccggccaggctggatgccgtccattcaccccgctgccttggagcgctgcgcgcagacagccggagccggctcgggctcagccctgggggtggggggcagccgagggcgcggggggcggggtacgcgggtagcagctcaagggtgaggggcagccgagagcgcgcggggcggggtactccgggagcagctccgggtggggggcagccttgggcacagggaggtggggggaactcagggggcagctccgggtggggggtggccgagggcgttgggggccgggggatacaggggacagctcgggagcagccgggtgggggtggccgagggcgcggggagcagcttgggggttgggggcagccttgggcgagggaatgttgggggacgcagggggcagctcgggtgggggtggccgagggtgctgggagccacagggggccgagggctggggagaacaggggcaccgcggggttggagggaggacgccaggctgtgtgcctgcctggctggggcgacaggaatccatcttggcagtgggtgcctccgcggtccagggatctcgtgacccggcagtaacaatttggttttcctgaaaagatgatggtaattcggtgtaagacctgggggtaggaggcagctgaaacttggacccccactggagtccccttcttccattcttttctccctgctttgtgcccagggggagcacagaccttcccctcgagggtgctcgtgggcggcatcccgcgggagccggagcctctgagaggtctcctcctgcccctggagatcccaccctcacctctct

SEQ ID NO: 14 - DNA, 143350 bp, Homo sapiens
agagaggtgagggtgggatctccaggggcaggaggagacctctcagaggctccggctcccgcgggatgccgcccacgagcaccctcgaggggaaggtctgtgctccccctgggcacaaagcagggagaaaagaatggaagaaggggactccagtgggggtccaagtttcagctgcctcctacccccaggtcttacaccgaattaccatcatcttttcaggaaaaccaaattgttactgccgggtcacgagatccctggaccgcggaggcacccactgccaagatggattcctgtcgccccagccaggcaggcacacagcctggcgtcctccctccaaccccgcggtgcccctgttctccccagccctcggccccctgtggctcccagcaccctcggccacccccacccgagctgccccctgcgtcccccaacattccctcgcccaaggctgcccccaacccccaagctgctccccgcgccctcggccacccccacccggctgctcccgagctgtcccctgtatcccccggcccccaacgccctcggccaccccccacccggagctgccccctgagttccccccacctccctgtgcccaaggctgccccccacccggagctgctcccggagtaccccgccccgcgcgctctcggctgcccctcacccttgagctgctacccgcgtaccccgccccccgcgccctcggctgccccccacccccagggctgagcccgagccggctccggctgtctgcgcgcagcgctccaaggcagcggggtgaatggacggcatccagcctggccggcagcttgaaaataaaaataaaacagagggaaaagaaataaataataaggagcgcgccagaaagccaaagaaaatacaatcccaagctccgagcaggcttcaagcctgcagccggccctgggccgcaagcctccggcgtcggagccaccgggcccctgctccccgcccgcgcgcgtccctgtcctcgccggggaaacacaatccgagctcgcgtagctcctgggccgagggggccagagagggccgaggacgcccccgcccgcaacagggaccggcttgttctttgtaatggcaaatatttattttggttcaagtggaaccctttccacaaagaccacttggttgtaatcaataacacctattttcagataatctgccctctctgggcagagcccacggaactcacccaaacagagatcttttcaaagggaattttaaatgggctggattcacagacggctggaggaggggcctggcggggggtgggaggcggcgggcagggggagatgaacctgggtggtcaggccggagctgggccgaggcgctgccaggtggacgtctccaccctgggtggggtgggggggtcttccaggaacctttctcaaaataaaacaaatcgaaaacctttctttggttggccaaatgttgctgcagaggtagacttctagaaactcccaaaccgcttcccttttcctcccagagagcttctacgttgtcataggcggactccattgcaggatgaggcatcccagactgccctagccctccagtcccggagttgctgagaggccgtgtcccttacttgtaaagtggggaccgaacgtgtccttgtcacaggagagctgttcatttgagaatgtatctgagcacaggcagcgggcgggcgtccttctaggtgctgggatcaccagggaagaaaaccagagcggtgccctcgtggagcctccttccagtggagagagacagacattaagccagtgggtacgatgggcagtgacgaatgttacaggaaagaaaggccttggaaactgtgaagggctttgtgcttcagctctgtggtggaggcagctctctgccggggtcgtctgtctcccgtggagcaggcagaaaaggccaagagtcagaaggtgctgctagtgccaaacatctcaggggtggagccggcaggccaggttccaagtccacctgctagtgtcctttcagaacctcggaatcctcaactatgaactgggatgggcaatacccacctcattgggctgttacgagggttaaatgaaaatcgatagtacttggtgttagttcctaaaggccgcctttcagcctaggcccagtggcgatgtagcatccttctctaagatgacattggctgactttccataacataagatttctgggtgaagcatggatacctgtaagtcctggacagtggggccactctggggagatgctgtcctaggtggcctctcactcggtgctgtcctgattttggccataggggtggcctaggctggcccattagggtacctcactggcagtaactctctaggcaaaccagatcttcccgctcaaacattttaactgggaaatacggagagattgaggcaagatgatagtgagatgaaccaccagtggcaagctgtgagaagggaccttagtcatgggaacccaggaacacctgccactttggacactggtaacttttttgttccagcgccaggaggctgtccctccaagagttcctgttctcctgaggttcctgtctccctcattgccatggctgtttgacagtaaattcccagtattccaggaagcctgcatgaatgcctatcaactcaaaggagccatcttctatgaagccactctaaataatgaagggatgttctctgaccatatgtggccaggttgagagcggggagaccaatgataggtatgtggtatgcattatggtgattaaaacctcagcagataaaactgtttcaaaagtttcccttcattaacagtaagggcctccatgctgttagaaaaattactttgtgtatcctaatgctgttttctttgtccttggagatggctagaaaaaaggggacaggactgatttactaactctttgtactggttaggccaggctgggtctgaaattatgtcactgctctccatgaagaatgtggctttcttcctcgatgagaagtcttcagcatcgattcttagttcagagcttgcagagaaattaaacttgggctcagccaacccagtgggggttgatggcccagaaaagattatgataagaaaggggtgaggggcaggaagaggggaggtgtgttggaatttgggataattgaatttgctgtgcagccagcagttatggctcgggtcatctgctgaagcttcagttataaatccaccaagaccaggaaattccatggttaggccaatctttccgttttctcagagatcagaatggttcagggtttagtgagagacggttttcacctagatttgctatgtctcttgctaaactatatttttccattaatatcattaagctgatttcctggaaacccagcatcagccccccgactttctgtcatattctcgcccaggaaaaccagcaggccctcatgcataaaggatacttgtccatctgtatccattctgattagccagaatgctggcagtagaataggctccctccagggaccaactgcagttgtcttaactccaatttcctctccgttgccttttggccagttgactgagcaaagctaagggaccatttgtaattagctcccagcaagctgaatagctgatctcttgagaattagacacttcttgcaaagaaatttaacctagatgaatgttgtatgtaaatacgatttttatggctcttttgagttttctggaaactccacaaatgcccataatatccctcccggaattaaacaaacttccccagaggtaatgggctttgatcttctaggaatatgggtttcctaaatgagcaggacgtcatagggggtgcctgtgtctttggtgacatagctctttgtggggatggaaacacctttattttttattttattttatttttttttgagaccaagtccactctgtcgcccaggctggcatacaatggtgccatctcggctcactgcaacctccacctcccggattcaagcgatcctcctgcctttgcctcctgaatctcctgaatagctgggattacaggcatgcaccaccacgcttagctaatttttgtatttttagtagagacagggtttcaccatgttggccaggctggtcttgaactcctgaccttaggtgatccacccgcctcagcctaccaaagtgctgcaattccaggcatgagccaccgcccccggcaggaaatggcttcttttctcgccttctccctcttcattctcatctacacaaaaccttggagtgttggctttgagcacaaatggcagccctatgatttggttgctgggttgaagccacttgaaaaattggattcatttgagttttgtgtcttggattctgatcaggtgatcactgaagtttgtaaatattcagtataaaaggaacaggctgagaagcatcagaaatatccttatgaaggcagatctagctataactgaattaattttgcttttcagaaattagtggcaagttcatatttcttccctacagactaagtccctatgggtagagtttgcattccccacattttaaacttctcaaatggatgtctgatgcaaattgatttcctaatggttatctgttctgttatgattttttttctaaatgacaaaactttgagttatgcagaaaatcactggatgatttgatgttcctaaaagagacaaagaaagagcgaaggaaggtaacgctgtcaagaaaagctgaggtgtctggaaagtattgcttgaatatatgcaatgcttgattaaacatttctgaaagccagcggctctgggcaatataatcatcagtggggaaagagatattgcatcttctggggaaaccaattaacaccaaagattggattggtaaaaattgctggcaagttttaacagtggtctagctccatactttaactgcatcttccgtgatttttattttctctgtgtatttccggaattaacagtaactgagcagaacggacagctcatgcttccctcagaatttctgggcagctgtattgggtttggacacgttttgtccagtaggtgtagtttgacaaatagacatgttctggatctttctagaagccaggcactggcttataaagaaagagttagacaaagtttctgcccttcattcccttattgtctaatggaggacacagacttcagatacaaatagatcctggggtcttgtattactctctcttgacagaacacaacaaccaaaaataattaaaaagccatgcattcttcaccccagcctctatcaaaaacattaacgttataacccagaacattgctttttcatccttaccagccacacttccaatttctcccctgcacacctaaaacaagattttaacatttcattttctccacttgtctgtgcctcgttccttattattatcttgttagcctctctggttaactactccttcatctctttctctcctttctctaactgcttgccagattctgcatctcaaaaggcacaagggtgtgtgcgtgtgtgtgtgtgtgtgtgtgtgtgtgtgtgtgtgtgagagagagaatatggaagcaggcaaaactacagtttaatggatcttgtggtccctttttgccatgcatgggcaacacatacacacacccaatgagatatgtgctgttgtaaatgtgtaagcacgcatcttcccttcttccttccccttccttccctcttcctccccctcccactgaagtcttgactgcaggagccatgggtgcagcacagcaaggcaggtgtcagggggtagtgatatcagagcctgaacggggtgagaagggcttccgtgtggcgcgtcctgatgggaagtgttagtgcccaagtggagtaaagagagcatgggacgcagggcgtgcagcctgtcctggctgtcagggctacagctggttgaggagggtttgcctgtggaggcgttgcctgggttggggcatcagagcttgaacagggtgagaacaacatccacacagaggcactgcctggggtggggtgaggagggtgcccatgcagtggggtggcctggatgggagtttagggccaatgcagggagatgaacacgttgcatggaggtgaggggtgcagcagagatggaagaccgggtgcatgcagaaggattgacaaggaagggcttataggatgtctaatggaaaccattcttttcactgtcaaataaaggaattacagacacaaaaggggaatcaacatccagtgttggattagaaatgaatgcttctgagtgaactcagggtttcaatatagataggtagtagaaataaatacagaaatagatgtatatgcatagtcatatagatagcagaaataaatatagatataaatgtataagcatatacagtcatgcactgcataaagatgtttaggtccgtgaaagaccccatatgcaatggtggtgccacaaggctataaaggaggtgaagaattcccatcacccagtgacatcggtgctcatgccctgtggaagtgcaatgcaatcttcatgtctgtggtgacgctgatgtgaacaaacctacttccctgacggtctatgaaagtctagcaggtgtagagtacgtaattcttgataatgatagtaaacaactatgttactgtttatgtatcattactttaaaatgatagatttttatcattattttagaatgatagattttagatatacgtagataatgcctacttacatgtttagaaagttaactgtaaaacagcctcaggcaggatataggctaaatatgaattcatgtcttcatttctaacaaaaatttcaaggagtaaaacgaaatatttttttaaataaaaacagtgtatagaataaggatatgaagatatttttatactgtacaatgtgtttgtgttttaagttaaatgttattaccaaagagtaaaagagttaaaaaatttagaactttataaagaattacggtaagctaaggttaatttattattgaagaaaggaaaaggttttgtagatttagcgtagcctgagtgtacaatgttgacagagtctgcagtggtgtgcagttatgtcctaggccttcacattcactcaccactcactcactgactcacctagattaatttgcagtcctgcaagctccattcatggtaagtgccctatacaggtgtaccattttttaacttttatcctcatatttttactgtaccttttccatgtttagatacacaaatacttcccattgtattacagtcacctacagtattcagtagagtaacatgccgtgcatgtttgtagcctcggagcaataggctgtaccatgtagcctaggtgtgtcataggctgttctatctaggtgtgtgaagtacactctatgatattcacaactgtaaaatcacctaaggacacattttccagaatgtatccccgttattaaggaaggcatgactgtatatgtatgtatgtacgtgagtgcatatagtcacatacatacatacataatatatgtgtatgtatgtatctacgtctattgcctggctctgtacactgagggagcctgggagcagggacaccccattagcaattggcacatctatcccccaggtattgggttctaaatagcattttccactaaaaagaactaggaatccatgaggagatgactaattccagggctagggcagaaactccaaaataagttgttgtgcgagaaagtaaggaagcacttaaagactgatgggaacatgtcaaaggagacagaagccagcgtgaatatccttccattgggacaatgtaatcattaaagaacagatcatatccactcaataaaatagagagccatgagtcttagagatataaataaatgaatgaatactttgcaatttgatgttgaatgggatatttacatattttgaaagtaaacctccgcaaaatacttattaattacaaagggtaaaggaataacttttcaaaggagaaggctgggaggcaccaccttaaacaaagagtgaacttcatcaataacgggatacgttgaaatgatgtaccatgcaatggaatacaggagaggaaggcagcatgacttctgcgatggtcctctcagaaaagccttggctcaatccaatcgcgaagagataccagcaatcccaaattggggaacattctacagaatacctgacctgtcatattcaaaattgtcacagacctgaaagaccgagggagactaatggtagatgacagctatacacaatcagtgttttagaatgggaaccttttgctccaaaagactgcagtggtgacaatcagccaacagtgcatggtgcctcgggattacataggagtaatccgcttgcattagttattcgattctcttgattatactggactatgtaggaaaaggttgttgtttaaatgaaatatacccttaagcatttggggttgatgaagcatggttggcaaatttctcttaaatgattcactaaaaattgttcgtcgtactgttctaacttttctggaagtttgtgactatttcaagattttacagttttttaaaaaatcacaatgtatattcacaatacagaatagaatagaatagaatagtgtggcttcactctatcttagatcagagaggaacagagacctgtacagagttttgaaggtaaagaggagttgcctctcgatgaagacagtaagaccttggcaataatacctaggaaatcttgcagtttcctagttcttttcaacatacagagcatttttatgtacactatcttacttaactccagtgatactcttgtacagttattaaatcatcctcattttatagatggaaaaatcaagctccgagcttgccgggcataaaatcccagctcccaacctctatttcttagccgattgaaaaatcccatccaacattgctgtgaaagcacatttttagcattcctttataaaatctcattttatttgcaacatcctgcagcttggccacacgctcccctggctttaggtgcacacatagagccaaggaagggcaaaagcccaagtggggcactgggagggccgtggatggggaaaatgcaaagactctctggaaaacccaacttatttctactttgcacccatttggaaaatgtctttctgaccacaaaacaaaaatgaccctgcactgaactccccaaacagggtgcccaccagctaccaaggacttaatgaatgttcttgaaaaatactagccaatactagcagacaacgatgattatccataaacctcctgtacagcagtctacaatgggttttccacactgtcgtccgatgcctcacagaaactcatgcaggaggtataactcaggtcctagttaatcgatgaagacaagttacccagtaggtggaagggccagcatttgaacccagggtttctggcattgtattcattttcatttgtctactcaaattgcctctttcctcccactaagaaaacatatgagttaactcagttaaaatgcagaaggttaatctagcagttgtaggtgagtgagtggtctcactggaaatttttcctgtctccctctagagcttttaagctgagtgtaaattgactatgtgcttagggatttaccagctcggacagactgaaacaattagacaggaggccgcatcagactgagagagagagacagatcccaggcttgtgggcccacattccttttaaaacttccctccctatcctttctcaactggctgaaaccctggaggtttgactggctaacccacttcctctcacaagtgtccatcccccgggggagcctgggatttgtagttttggtatcagcctgcctttcataatcccttagcgggactccctggctgagggcgtgtagtgtcagtttcagtagctttctacgtgatgaaatgcccaatgtgctttctgcaaaacctgcattccttcctgaataacagcaaagcttctgtatgctcaccagaacccagtcactcccctggcccccatcccggctcttattacctctcccatccctgcccccactgatacaaagcatcctcttacctcgaccccctgagggccttctggacacaagctcagtggtgctgttgatggtggaggaacttctgagcaaggtgtgggagtggggctgggcagcagacagccatgcttaagggttgcttcccccaagcacattcccccaaaggacaccttttcaagagtttttaaggcaacaggtttacatgatgcttgtaatgaacagatattagaggaaatacggtaagaatccaagtccacagaaaccacctctcacatgaagtactgcattttgttcaggtttttatttatccactaagcattgccttgggttggcagtaacttggcttggggtggacagatgctgctttcctcccttgtgttctagaacctcctgatctcatttggtctaaactagcaaaccttatctgagaacctcttaatccatttccctttgtgtatgttcatcgctcacttgcatgcagatgttattggttaagtaaaataacaatctttttaagtgtcattacattttctagtggctgttgactattaaaaatgttttaaaataacagatattgaaaataggcccagtgtggtggctcacgccagtaatcccaacactttgggaggttgaggtggaaggattgcttgaagccaggagtttgagacctgcctgggcaacatagagataccctatctccagaaataaaataaaataaaataaaataaaataaaataaaataaaataaaataaaatagaacttcctttgtgtgggactcaacaacatttttcgacactgaaaaaagatgacctctgctatagactgactgtgtctgtcccttctcccaaattcatatgctgaaacctaatccccaatgtgaaggtatttggaggtgattagggcatgagggtggagcactcaagagtgggattaattcccttatgaaagagaccccagagcattcccttgctccttacaccatatcagcacacagtgagaaggttccctctataaaccaaggcaagggccctcaccagacactgaatctgctggcaccttgatcttggacttcccagcctccagaactgtgagaaataaagtcctgtttttatgagccacccagtctatggtagtttgttatagcagaccaaatggactaagacgacctcctgctaaaggactgttggtcagtgtcccaaactgtggggaggaacagcttccatgagaaccacttgcaggcctgcatgcccgctttgcttggctggcactgtttgttagatggcagaaacctcatggcacaggcacagaatgatccagcagggaaaagactggactagcagacaggagggcaaagattctgtttgtcctctgggactagtccgctgcatgccctggagccagctagcaaacgttcaatctgggcattgcaggggaataaatgccagtgccccctctgtacaaatgcttatgaggagaaaatggtgccccagtcctgtcagccagtgggccagcttctgaggcataggacaaatcactgtggaacatattcagggggcgagatttggctaaagctctatgactgtgtagagaagatgagcctgagccagtgtttgagtaggacacataaagaaaacctttaaaagaatgaactaatgggctgagcatcttcttacagcactcagaaatatatgcctccattttccctaatgaatactttgcagatttcaaaattgatggggaaattgcgtggctaagatggagatctgccaaagaattcagctagtttgttcttaaacatacctggccttcatcattcctctttctatgcttgggccactaataccaagttttaattttctcctttcttggaagtcactagaaatccagtacatgcatacacttttttcactaaagaccaacatctttgttttgagagttaatagcagaggatattcaatatagagaaaataggaggaaaagagtagaatttcagtttcaatttatttttatatcaccatttaaaatgttctattttgtatttgttttctaatatgaagaataatgtaacagtttgtatatatgatttataaatcaatgtgcatatgttgagaatatgtgctttacacatctttttaaatggcagggtgcaagattaaaaaaaaactggagacaaatgttccgaaacacatcccatttcatttaggtagacatgttgtctagaaggtacttagtgttaccctaagaaggttctagggttaccaatgctgtgagtctaattccttgcaaatcaaggacttcccaggtctcactcttttcattgtaaaatagagaaaatgaaaataagctacctaacagtgaaggaactggaggcaagtttcttccttgggaagaaaaatgaccttaaaaatctgcatgagccataaagtcctggtctgagacctgaaggaagcagggcgcttattctttgctggagtggcagaaggtggccgtctgggtctgaagtgcccaggggaggctgcagagttaaatctcacagaccagtctggatagaccagctcgctttgctccagtccttacatacaggtttatccatggccttagctgctgttttataaaacccttttaggctggaggaagatttaaataacacacacaaaaacactacaaacatcatcaacaacaatgaaaaaccacactgattttttaccttctgctgtactgcagtaggtacattcgaaaaattcttgatagtgcaagaagtaaataggaaagttccccagggaaaaccctttgacctaacgggggcggtaaataagaaaactgtcctcagcactgagagaaggaaccatttatttagtcaaattattttacaacatggtcttctttgacagttgtcagcttaacacttaatatagttaaaaaagtcaacaattacctgcaaaattatatatattttaatgtctaaaaatatgttgcttatatagagcaggaaaatccctcctctccacaagggaaagtttcgttgtttttcccagagctgtgattattgcagtactgttacacgcatttccaaagcattaaagatctaaatggattatcttttccctgcttgtgtatgcctgttaaataactgtaccagtgctttgctttctcataagtcagtgacttaaacagccctgtttccttttcagctataggcatattatgctttttaaaaaccagctataaaaacatacagacagcccaaatgtacagattgaaaaaagatgtacaaattacattaaaaaaaataacagcgattgattcgatagtaaaactgcttttgtgaccgaggtcaactcgtttatttattcttaatttttaattatttatttttaatactgtgagatataggaaaataactctgcataatttatacagtaagttgccttctgattggttggccctggtctgatggtctgacaagcgcacagcacttgcgaatctgcttgagtttagaaatccctacaacttttccaagttctgggaccactgtcatcatttaaaaaaaaaaaaaaattagtaatttaattccccgtctttcaggaatgtatgtatttgcattaaaatttcttagttcatatcttgactatttctagagagagtggtcagctgagtgcatactgtccactgagagggattctgcaatgcccttggcgtcttaaacacacaaaccttctttccatcaaattccagttgggtgaaaacttcactggccttacaatcaatgttccagttgccatccactgaatttggtcctcctaaaattagattataagcttcccacctctatttgtcactaaatctcaaaccagaacatgacgggttaagtccatgattctgtgtcatactgaaccccgtgtattgacaagaaactgctttggtcataaaaacataaagaaaacgtacagcttctttctcagaaccatgacttaaccattccagtaatcttaatatgcaactcacaagatgctaggagactgagaattcaaactggcatactggcccatggaattattcatctctttgttcaggtagaggaagcaaaagttaccaacattaaaaaaaatgtttttaaagaacaaatacaaaggttctatccaacaagaaagaacatccagttttgtcttcccttcaaggccacatatgtcctgttgagtccaaagcatccagtaagtgtgcaggatgggcttcagctagaaggccactgatgagtaagcttctagtagtagctgcctaagtgtgaaggcacgtgggtgttaggatggcgggggacgttggggttggggtagattccccccgtgggggaggtccagtattgtgatgcggctccaaagaagctggaggaagtgacaggcatggaggatggatggggagggacaaagttcaccttctgctggtgggcatggtaggaaggcatgtaggagatgtcagaagggtacttgtacatggacgactcggtcggatgtggctgcagagcctgggcaatgccgtggaagtcaaatttgtaagcatatcttttgccgtgcactttggtcataatgtttttatcatagtaataacggagggcccggctcagcttgtcgtaattcatgttgggcttgcttttccgctcgccccagcgcctggccacctcatcggggtccgtcattttgaactccccgttggtcccctcccaggtgatacagctggcgttggcgctgtcggagagcagctccaggaggaattgccacagctggatctgcccgcttcctgcacgccgtgaggcaaacgggagagaacagaacacctcagcccagagaaggcagaacccagttccctaaatgcagggagcttctcatccttttaaagaaaccttttgtttccttcgacattgggatcgacttgacaagcccttcttatgtcattgttgatttgcctttctgcttgccttggagatgggtataataagcgaggttagatcctaagatgctttgccccaaggcctggtaaatggaatgtgggaagtgaggtgcaaactctgcccagaactagctgtgtgatcttgggtgagccatatcccccctcaatccctttggcaaggcttttgaatctcttcatctagaaaggcctgaatcactgactgatctctaattagtggtcatgtcccccagggaattccctgtcagcaataaaaagtcaggggcaaggcatgactgtgggagtcattgggagaagctgcgccatgagctttagcttttggatggacaggacctggattggcccttggcaggcccagagcttggcttgcagctctaagttctacagagaacttgtgcagagagaaaaatacccagaatatgctgggtggctgctttctcctctggcagtaatgaccaggcactaaggaatgggtaggcagagtccctgggatgggaaggtgagtgggccacactgcgacaagggcctgctagctcccaatctcgatggacttggtttagaaggaccctcttgagagttatttttgatactaaatctttaaagtacaaggtcaaattgactatatctgcaacttttccaggacacatctcttttataaggccagataacttggcaacactttctaaaatcacaaataaaaccctttggaatatttatgaacttgtgcctggcatgcgggagacaactgagagctgagtggagttgtcttcttttctttcttgcccattttctctgattgaaacgcctacctacctgtgccacttattactcatctacacctaagtgcacatgtgcagtgctgatgtgtttattcctagaagtatcctcagctaaccaaccttgacacctcataacaagccctgacctgttgttcacatgctccagaaacagacattgaacatttcaaggaaagacgtgcatgttactccccactcaggtgtctggacttaggacagaagtctctgtgatttcacaaagctacgaaacattctggcaaaaaaggcttgcaggccaaggtaaactcaccagggttggctaggcgactgctggtcgggcccaggatctgatacggatctaaggaaataaaaaaggaaatttgcttcagtgtttttaaaaaatatgacaaccgtaccaaccataagaaaaccataagggtttatacttttatttcaagatcacaggaaagactgatttcagaaaactttactgcttttatttgcagatctcaaagatcttgatgacatttgtggtcttcatctcaataattacagaaagaacaaagaataggaacaggattactttttcttattttggcatctaaaatgtgcagattatgttgtcattacccaaagcaaaacaaagaaaacatttggaaaggaactggataatattcaatgatacaacggacagctgactccatgggcttaaagcaggtctcatggttactggtctttaataactctacctaatactaacaacattattaatctgtttttttttttaaatgtagcatgaaaaacacatgcctagaaaccaagcagcctgggttttagcagcagctatgtgataaacaaataacttgttggacaatttctgggaatcagttttctcatctgacaaatgagtgggttgggctactggattcctcagttttcttctagtataacactctgtgatttgaaatgtcacacaagccagaaatgtcagcacaaaccagagtgtacattttagctataaaatgactattcttaaaatctcactttcctcaaaacgtatgtgtttatttagccatgaaaaagtctttgcaatactggtttaggtgagaggtttatctccttttttgttagttgaggaaatcatggtagagagctgggtctcgacttggcaaaattgtcatgtattttgtaaaattttgctatttttcaactataattgcagttttaaaaatatcactatgatttttgggtttctacttagaaccataaattaccttcaaaagtccttaagcccattgagaccatcttttctcatccacatcattaatatgataattatttttggcaggtgatgactaatgcataattttgttgttattggacagtctttaaaactctctacatctgacttatgatccacagtcagcaaattttttcttaaccttccaggtgaaatgtcagttgattttctcttgctctgccttctgtggagatggggaacaatgtttgcctaccccaaagcaaatgacttgttcagaacttcatctcagctgcatcacataagaagatagagagaggagctggggcttgggcacagcagctgtcttcagatatgcaaaggatttcggaggaagcaggaggaaggcttctccagaaggaaaagcttgagtggaaattccaggaggcagactttgggtcagatagtggaactgagcccagctagaaagtcaacgccctgttttactacaagcacaagtaaggtagaggtgagggtaggatagacccagaaatctccaagttcctctccaatacggagtctccaggtccatggctttcaaagttcctctgccttaattgttaagccaactcatcacaggatggggatatttctgaaagtaaggtttggtgaagcataaaaggcttggacaggaatttgggggatctgggattgtagccctatttctttcattaaccagctgtatggtttttagcaagtcacttcacctccccgggcctcagtttctttattgaacaaaataaagcattggaatagttcatcttcaagttctttcacctttgatatttaacaagtctctacttgatgtcagtacctgttacttcattcacaggactattagggtcaaagatagaccctctttgagagaaataagagaaaacatatgtggtatattgtttaaaccctccatcagttgaccatgtgaaatcaacaactgtgcaggaagcaaaggagagattacatatcctgggcaggtacctggctggggccgttgctctgtattcttactgatcgtttgtgcccctccaaggggaggacctgtggcaagagggaaagaaatgcagtgagtaggacccagctccccgaggggagcaagacgtcttgacagatgtgctttctcactcattccttcgcccactctccactgactcatttattcatcttattttagaaacatttacctagaatctactatgtgctggccctgttctccaggctggagattcaggaatgaacaagcagttcctggtagaactcgcattccaatgggagagacaataataaacacatttttaaattcttaaaattttgtctttgcttaaatgtcaccttttcattttcaaatttttaaaaagtaaactaacagtatagcatcactgatggtactgaggctgtggatttcattttcaaatcggaaagttagagaagtccttactgagaaagtgacatctgagcaaagatcagctgcttcctggtgtccctgtcttgtgagtttcctccttggtatctctcacacaccccttccattcccatgatcacttctgcatcacagatctgtattgcttcttgcatggtttctggcttagtctgactggtgtcctcattactcttctgtctccccacaacccaccatacacgccagtgttcaaaaccttagtgactcttcattgcctaaagaactaaggcatatcttcatagcatcatttacaattctgtttcttacctttccagacttcttctgcatcacacatcctaagctccaggaacctgaggtcctcactgactgtcagacatgccaagctcatgtcttccccagcccatatcgccacaggtccaaatcctgcctctccttccagagctaactcaagtgctaccaggtccacaaagccttccttgataccaaccagaagaaaggagttctgtgtgtgcttgatttctctctcccgcttatgggaccagtgcatgtctgattcatctttgtgaatcttatattgccaaatgtcatgtgcagagtaagtaaataattaatacacataattggaaggggtcttggttattgtttgggcattaatttgtaaccccaacctctttcttgaaagaattccctttaccacctgttcatgtgcttcatattttgcttcctaggcatggcaagtttgatttctggtacaggagttcatgagtcattcttgccccttattctcttactgggggatattgggtagacttcgacatgtcatcatctcaccacttggtggagaacctgatgtcccagaccccccggcatctcctcatcagggacagaagataacctgttgaggagatggcagggttctgagacatcaatttctccaccaagtggtgagatgatgatatgaggaaatctacccagtatcaaggggaatggggaaattggtacgacttagcctcaacagttacgggagcaaaattatagagagtcattatcttgatttaaataacaaaagcaaaacccagtgacagtgaccattcattggtacagaaccttgtctcaagaaaaccttcaaatttcccatgttctaaaaccgagcgcaataaaacaaaactcaaaaatctaaacgaaaatcccatatcatctttcaaggactggtatcatggaaaggccctaaattggcaaataattttgatgtctactcaaaaagcagggaaacaaatgcttgctgctctcctgtgtctcatgatcctgttctccaatcctgtcctcagaaacatgctttcctccaaagaactataaaacatttacttacttttgttgaggccagaattcatgttattgccccaagctcctcttctgactgagtcataagaagggtctaatgaacaataacaaataggggtacattagcatcgcctgcttctcagaaaagttgcatgagcattatctgtagtgatcaggagaaataaaattcaattcagcaatggcttttaaagcatccctaaattctggaagtgtactcaccccctggggttggaatattaacactctgactttcagaagattgtagtcttatctgggagccaaagtaatgggaagaaccctgaatgtgaagtcagaggattggttcaagttctcttcctgacactctttgttgtgaaacctgggatgaatcaaaagtctcctctgggcttcaattttaatacggaaataaaaatttatgttttatctaccttatggggttgtggaaatgatcagatgagataacatatggaaaagcaccttatgaagcgttctacaaatataaactgacacaaggttagacatttcttaaatgtccatagttctgtagcaaaatccttcaagcagctctgaagagcaggcaaggtctggattgggtgaaaggcccataagaagagtgtctcaaagcccatggccatgacattcctgggggccgactccagtccctgatttcagcacatggatgatgtgggatgacatcacagcggtgggagcacattccaggctctctgagggctctcgggcttttctattgatagtggagagggctgggctgatgaccacagagaaagggaagaggccagaaatgtggctgggaaaggggctggatcaggaaatgagaggttggagacctgctccccacctgggcatgactaagggcttgcttctcagttgtcttggagaatactcctcaaatcgaacttttgtgatcgtaacccctttcttgaaagattccacatgcttccataaatgtgttgagaaattgcttaactaactagctggaaacttcttccttccctttctcttggtatgagtcccattgagacattgagcaggaatagcagaggagcttgaggatacagaattatgaccttcaaagttattccatgaacaacaaagaaaccataaaaaccatccgaacaaatggagcacaaacctcatcaaacaacagagtctgacggggtgaaacacaaccatgcccttcagccccttctgagcctctcaaacaaattagaataagagttgggaagacggatggactctgattgcctggcctcattgtttctggctaagaagatccaaaagacagggacactttttttgtggaaaaatccacgtgcagatgcacattcctcaaggctctggaaaagcccgttcagttttaaaattacagtctttagcaactggcatgaaaagcaacacagaaagtgagggggatgggatagggaggaagggcaaggcaggggacaaaagagagagacaaacctccactccttctgtttctgtttgacttttttttctttcctaattcctcctctaaagggattcttcttgcttaaaaacaaacaagacaaatgaaagaccagcttgcttgcaagcttggaatgaggtggaaggctctgatgggcattttctgagatgtcttgcagaggaagtgcaatgttggcagcggcagaacatttttctttgagcaggaggaggctgctgcttaggcctctggtaatagatttgggaccaacttctgcactgtattgtgtgcatggccagggagtgggtgtgaagtaataggaaacaagttcctcgtccttgcatgtgagtatgagagggtaactgtgattgtgaggaaacacgggtcatgtgcctaaggcatggaggacacataaagggttcctggaggttgacagagaggtgagtggaactagggccaggtgactctttggagaggggagagtgcatcaggtaggaacaaggcagaggtgggtggtgagatgtcaaggtgaggtctagagacagccatgggaggagctgtaccactgaagtagagcaatgtggagggagaggagagagggccgaggcatgttcaaggtcttgctgatggtagctcagcaaactctgggaccttggcgttgcaggtgggaactaagggaggttttgcgcttgcagccatgctagaaaacagggtgtggtgaagaatgagcttgtggtatgtggggtggatctgagggcctgggggaaggagataattctagtgggagcagaacagaaagtagaagagaagtaacacattcaaacaaaaaatcactaaattccagggaatcgtacatgtcatctgaacttctgacttgacttctgacttactgcatggataaaatctgtctcaagttttctaaacatttttttctgctcaatcattagtctactgaaggcttcaaccctctctgaaagctatctggtaaccactcagaattatttcttttggagcccaaattatggccatggctatagttatcgttgacttcttatcggcttttctccctattctcttattctagttccagggacagagcaggcatgcaaaaatctgaatgcatgatggaattccctgtcaccaacagagggcggatgaccatgggattttcctgtagctctgagtgatggagcctggttaaaggcatgccttatcagagcagtggcttggcaggcccatctttctgtggtgccccagggccttaggaaggaggcagagttttatgggtcaatgtgcccacaggcccatctgatggcagaagcttggctaacaggactttggaagtcccaatcaatgctacagtcctcacataggtgaaaaaggaagtgacagaaacacagaggccacccagcagtcagcctgaactgtgctctcactgtgaagtaatagagtcataaatagcaacaggccatgccctaagctggtgtcttcatccaacgtccatcccagcagcctgtggagtcagagtagcaaagaccacaggcctccctctcatttcttttttattcccaagtatttgcatggaaaatcttcccactggtacctggctgcacaaaggacagcctgagcacattggctctggggtttaacaaaagcactccgtaggctctggggctcgaggagacgtctggtcaatgtaagatttaagttaaacccagcattttcagagcaatttctgctccaaagaaaaagcatgaagatgcagaaggccaagaactaaagtcttgcattctgccctaggggtatgaagaaccaggccagccttgcagagtaaatgagatacccaagtaaacacccagcatagtgcccagcacagaggtggcctcagtggatgttagcaatcaagaatacgatttgtgtcacagaccaaaaatattcagacccagaaacatgttgggcagccttccaaatccacattaattccctcctccccgcaactccctcatcctccttcctctgctcttccattttcacttatcacataatttaatcagtaattaatttgtatttgtcgtttatggttcatatccccctccctcctgaacatcaggtccataagagtagggatctctgttgtgttctctgatacatccaagcacttagaacagggccccacacagagttagtagactctaagtatttgttgaatgaataaacttggccaatattttctcctacttgctacatacacacaattcttcttattgttcatgatatcactagctgaagagaacccagtgctcctaccctgacttcttcacgaaattaagcctccaggcaaaagatttccatctggggtgttgaggggtacagactacatcactcctgtgtcccctctgagtggaccacaatccacctatttatgtatgaggcataggctaaaagcttgttcccacagggaagtcaaggcctgaatgctgctcggtgaagtggtgtgcattttatgtgtttttaacaatgtcattgttgaagtgagggttcatatttttttcctactaaaagtcactcaagaagaatttagcagtgtggtcatctctagtccccaacatacacacagagatatgtctataacctgaatgcagaagcctgaaccagggagctgacccagtggctcacatccccacacaaacccccttgcagagcccaacacctggctgcatgagagctcctgccccgactctccgtcagcgcatggagtggggctcaggcagggtgtgcctgctatgagaagaagcctgagcgtgcatggaggccctctcgaatgtggtgcctggagtctgcctcctgagaactgacaaacttgaggtggcagccaaaggcccagtgtgtaaaaatgtggccgtcggcaccagtgtaccagttgatgatcttggtctgtttctgtggtggcagatggcttaatcagcagacaatcacaccctggttctgacaaactaacttttcactgtcgtgaaggctgacaccttggctttacagagtaccaagataacagatcttattattgtgattccttttcagaagagtgacccaaagagctttgcctggagtttctggtttcaggcagtcctgagatcaactcttgccaaagcaaagaggccggagcctcagtctggagaatgaagacattgccagccattgtggataattcagcctcacatatatgatgtccttaacagtatcaccattatgtgatgcttagtggggctgaatttgacactaaatggcctcttagattccaggagagcctcctgaggtagagaaatatgagcatggagatttttttccgcaaagtctctgttggaaggcgaaagctgtttctggacatgaccctctcatagacataccaatgttaacttagcttctgtgtgaagcttttaacctggtcctagaaatatggccaaacatctttgggaagatatttgcttctgctctgatgcctctgctgtctgaaagcccaaacgtccctgccggcatgcagcgctccaccttgtgacctgaccagaggccagcaacacagcgacatcagcccacaaaagcctctctcttcatcctctgtgtcataaaaccttgctctcaatgactgggtggaaaaagatgaattttccctgaaacttctcattgaatttctggttgctgctaagaaggctggcagcacctaaccctgtttatccttggaaagcctggcttctgaatgcagacctttcagccgagcaatgggcaaggctgctcatgctcccagcagagcagggggatttggtagccagatccagacctcctttcttgaaagagtgaggatgcacaggagaaatgctcaaatcaatggcagacctgagacccaaagccctcaacttcccaagagagccaagcccacgaggaggaagattcactcccagactccgacagggaagaaactgcaggtgagcggcggtctttgttgttgggctgtccgacaggttatgacgtgtactggtagagggctggactaggagatcctctaaaaccccatctccatcagaggtcctgtgcttctaataggtccagtctttggggaggagcagcctctcccagccaccaacctgcagaagctgctctcctctaagcgttccttcatcctgctctccacctgtgagaactgctgcactgcccgaaccttcccaacccacagctcaggaccagcttctcatctgctgcagtctttgctcgagtccgcgccctcagccccaccctgaggcaaagtagatgcagggcttaggatgtcatcacgaaggtatcctttctctctggtgggcctggggattattttggcagttaggagataggacttcgaatcagttaacccgggattcaaatcccagctccgccattggccttgtggagtgaccttggtcatgttgctcagctgctttgaacctccagttctgcttctctgaaaagcattaataacaggtgctttctacggttgctatgaggattaaataagcatgtgataaatggtgattttaaaaatacacaccatatacatggagtctattccatcctgcttgcccctctaccatgcttatcttggtgagatgagattaccaagcccattgaggaaggccttgaaaaggaagagaagcctgagggctataaaggatgaaggacagttttattcctgtgctcctggaacagtgattcccaaatttaaataaagcttggctctcaggctgggtgtggtggctcagggctgtaatcccagcactttgggaggccaaggtgggaggaacacttgaggccaggagtttaaggctgcagtgagctatgattacactattgtactccagcctgggtgacaaagtgagatcctgtctccaaagcaaaataataataataataataataataataataatataataaaataaatcgtggctttcttttaaaagaagaggtggattattatcctggaccctggtttgagaaaccccaccccagaagacagagagggctgatggctacaggtggtctgcctggctgttaggcccaggcattacccagcatcctccttcctcccccactgtcaggtgccagagtcactggccacctggccttgaagctcaggaccaagtcctcactacatcccaccattctagaggggctattaaaccttcacttcagcggcgtcttacatcccaaagagcaacagaggagcttggcatccactgagaccttggaaggaggaaaatatccagggaacgctttccccaaacttggaactcacagggaaaaaacatcctggatcaggtttcctttgctcaaggatcttgtcctggaatccaacagcccctctgcctcggagctgaccctgctgtgtggagcataatggaggtactgttgaagatattagatgggcaaagggaaaaaaagacctacgaggaaaaggcttggaagaaatagctgacttttaaatatgaaaagcgtggagagtgaagtggcacattctctgggcacagccttgccatggccacgtgaggctccctgctgaacctgggaccttcttctatttcatttctcccacaggctctgtgtctaagtgacacagatgtctaaatgacctatttattttgataaggcctcaaagtgggatttttgagccagcctcatgtggaatagcaattcatactgactagattaactgggtgtttgccaaaacttccttccatattgggtcatgtagacgcaactaaattgcatacttcttaggtcaaatctgcctctggtttaagaggattccaggtagaaagaagaaaacataacagttcacttaggtaatcaggcttgaggataaatgagaggcagtttatacgcaacgccctctgccctgctccgaccctcataggttgcaatgttcacagcgaggttgcccttcttctccttggccataggggatacactcttgggtctgcgtaacattcagcttctgtgtcctttgctttcaaagttctgcaggtcaaggctcactggtgagttgtcttgtgtctactgcccgtgtcctgcttagcctttgagtgtaattctttgtacgcttgtgtccctcgctaggtgatcatctttaggaagaggggttgtatcttaagcacctttgtttctctcaaaaattcattcttgcccctcgccatcaccaacttattggatttaattgatgccttatgtcccaccacacatttattcattcaacaatgttttactgaatgtctactaccttgccagacactttacatgctgagaacacaacaatcgctagacaaacgtccttcctctgtggagctgacattcaagacaagtagtaaattacattgtatattagaaggcgatgaatgctatgaagaagagaaaaccagaggagggaagtaggcagtgcagggatgggaggtcttctctgaaaatatagaatttgagcaaagacttgatctaacattatgaaaatagagctctacatagttccataattttattttgaaaagtgacagattggctgacattggtctcaaagtccctctggaaagccaattccttttaattagttttttatgcatgagagttgctttatgttgtaggatagcaaagttagctaagaaacttgacagcatctctttgatgtttgggagaggaatagtaaaaggtgagatgaaccccatattttaaagactcaagtacttttcacatattttgaatcaggtgattgtcaagtctgtggtcttggattcacgttgaattagaacggccattcaaatcaagaaacgtaaaatcccaacaattcccatgatttgccttttgacctatgtctgaaatgctttgcaggaaaggacaagtctctgggttcagtgtagcagaagtggacaggtgagttcatgctgaaggagcactacttctttttgtttgtttgtttgttttgttttgagacgaagtcttgctcttgtcccccaggctggagtgcaatggcgcaatctcggctcactgcaacttccgtctcccggattcaagcaattcttctgcctcagcctcctgagtagctggtattataggcgcctgccaccatgcctggctgatttttatatttttagtagagacggggtttcaccatgttggccaggcttgtcttgaactcctgacctcaggtgatccactcacctcagcctcccaaagtgctgggattacaggcgtgagccaccacgcccggccaagagcactccttcttttgtggcctggcaggtgagcaggaaacacttccgtccctgagctgtgcatccacacatcagacagagcacagtagttaaaagaaaaagaaccatcaagtcttggtaggtggaatgtgatctcacttattatatcacagcatcagaggctcctttttagactggaaggacctcagacattatctaaaccagacatgcaaattagcacaggcccagaggcccaaagcctgagaggtagcatatgtggccatgtaagaattttaatagaaattgaaattatgactcatagcaaaaaactgcctctctctaacctcctctagtgtattgggcagggctgataattattttgcagacaggcccaaaaggccgaagacttcttaagctcaaagatttttcaaaatgataccaagaatgattttcatctctttggaagagtgatacctaaaatttatcaagcataggactgttggtggtgttactaagggctcttaaagatcttcatgggaagaaattccataatttctcgtgaatccattccaaacagggaaatggctcattgcaaaggaaagaactctgggctggggggtcagaactccttgctttgcctctcatctctgtcagttatgagctgtgtggtctgaggcaaatgacttaacctctctgaacctcttattgaacctctctgtaaaaggtagatacttggcaggggcgggagagagtggtgtgattattcctaaatttaagagtttggaaaagcaaatagcacactggatcctcacagggatcttttgagaataaatgacaccatgcatatgaaaatgctttctagggctgggcgcagtggctcacgcctgtaatcccagcactttgggaggcagaggcaggcagatcacgaggtgaggagatcaagaccatcctgactaacatggtgaaaccatgtctctactaaaaatacaaaaaattagttgggcgtggtggtgggtgcctgtagtcccagctactcgggaggctgaggcaggagaatggtgtgaacccgggaggcggagcttgcagtgagcgtcactgaactccagcctgggcgagagggcaagactctgtctcaaaaaaaaaaaaaaaaaattgctttctatattctaacgcatcctacagaactctagctgatactctttttcagagtttagttcatgggacataagaagttaatttttcttgtgtcaaccaaagctaatttcttctggttcttcctttattggagcaggattgagtaaatattcaatggtatttactgaatatatacagggctggaagaaaagagccaggagaaaactcacaattaaagaccacaaggtaatctgtaattaggtccataaatagcctgtgaatgaggtgaggctccgagaggagactatagtcttaaggaggaagaaaaacatatcttgaggcagataggacttgaatcgggttttgaagagtgtgttggattttgacagataaagtaattgtcccacttaattttaccatcttttctttagaatatgccaaatacaagaatttaaactttatcaaagaggcatgttaagcctctgtttaatatttttattttgaaacagggcctcactctgtcgctcaggctggagtgaagtggcgcaatgttggctcactgcagctttgacctcccaggctcaagcaattcttgtgcctaagcctcccaaatagttgggaccacaggcccgtgccaccatgcctggctaatttttttatttgatgtagagattgactctccccatgttgcctaggctgatcttgaactcctgagtttaagtgatctttccacctcgacctcccaaaatgttgagattacaggcgtgagccaccacacctgacccatgttaaacttctcgatcttacagatccctgagacaagaaagaaaaagcccactcacaacctgggtagtgtttctagcctccatatttcctcctcaaggactttcttttctccaacaaggatatttcatgagaaatatgctctttattatcttagataagggcttctgaagagagagagttattcaatctataaaaagggattagaaaggtttttatattaaaataacaaatgatgtttcctatacattggcctttcactagaagatgccctaagctcatagatctctgtctggcacaaaagaagcttctccgtctctctctctctccagatagatgaaagaaagaatttggttgatgagaatttggtgaaacaagtttcttttaaataccttccagctaccaatcgcctcaaataacctccatgtggtggaatttctaaatcagtatactaggcagaaccaacacatttggaacactctgtgctgaggtggcccctggcagagcattataggcctgtccttttttttcccaaagtattttgggacccttctcctctaaatggccaacggggatcacttttaacttctattgtgaaccaagcaatagcaatgaagctgcatcaagcaaggccaactgcatctgcagtcctcgctctgtcgtctggagtgggatgagcgtgtagtgtcaaggggaaacttggtagagatggcaggcctaaaatagtaacatcccagagtctgcagataaattagaagacatgcaaaacccaaacggcccacccagtggatgtgaactgccactgagaactgtagtggagctctaccctgccaagcactcagggtcatgaaagcccctccttggcagtgcgggaggagtcattgttgggctgagtccaatgggaacgaatggggagggtgctctggagacccccagcaacagtcccacagcctggcaccagttccctgccccacttggaggtttacctaatgtcaccgtcctttactaaaatgtagcagggctcatgcattcattgtcaccatcattaatgtagcagagcacatgggcacctatgagggtcttgatttattcagggtgcatttaagggcagctctgataagcagaaagaccaaagacagcccagggaaggcagaaagggcaaagtgggaacttctgagtggtcaggagcagtgcctggcctggagccttctggcacaggggtgagaagaggcgaactctgtagtggcaggaaggtgcctttcttctccagttaagcattgggatgaagccctggctctcaatactggggcagggcaggggtggggcattccagagcaatggaaggagattattctaagaacacaagtgttcatctccaaccttctcctcattccttcatctaccaagggcacaggtgaatttatggagggacacggggcagggtggggcagctggagcatcctggacgtgtctttaagatgctttaagttgattttgacatctcttccttcttctccttgggaaccatgggtttatgaagcttacagaggcagaggattacccatgaaactgatagacccatgaaattatttgagggaaactttatttccctcaaataataaatttattaaatttattgaatttatccacccccactcttattttgctttgtttttgagaacaaggtcttgttctgttgcccaggctggagtgcagtggtgcaatcccggctcatggcagcctcgatctcccgggctcgagcaatactcccacctgagcctctggagtagctgggactataggaacacaccactacacctggctacttttgtttattttttgtacatatggggtctagttgtgttgccagggctgatcttgaactcctgggctcaagtgatcctctcaccttgggtttccaaagtgctgggattacaggtgtgagccactgtgcctggatggtttcttaaattcagtttattgaaattctcatcaatagagtgttactcaatataatactttgttttctaaatctcttgttttcctttatcctcttaaatgtagtattaaacacaaaaggatatgtgtataattatataaattataaagcataacaatgaaaaaaaatctgtgaaaccaccacaaatgatgcttcctatacgttggtctttcactagaagatgtctgaagcccgtttgtctccatgtggcatggaagaagcttcctctccctctctctctccagggatggatagaaagaaagaatttgactgataagcgtggacaaagcatgtttcttttatatactttgcagctccattaccaccgccccatcccacccggcaaacaacctctttatagtggaatttctaaaattctaaattgctagattgcttcttgaaatgcaaataagattgattgcactgggtcaggctcctgattttttagatggtagcaggagtcaatagatgaatatatcttagcaactagacaacatcagctacttgggggaaatgcatgatgggggtggtagatgaagtaggaaagggtcattttggagcccttgccattgcctaggtggggaggggactacaggaacaggctctcttctgtttctgtttcatactagctttgtgattcaggcttaacatcatacctgtgattcaggtaaaatgggaataatcatagtgccaacttaacaaggttttatgaaggataaatgtgaaatgaataggaaatttcttggcacatagtaggtgcttaacaaatgttagctcttattgtggctgtctggggcataagtgaagaaaggaaggtggaattgagcagaaggtacactctccctgcagcgtcacctttcctcggcttggcgtgtcctcagcctcctcctgatgggcagagacctgaagggcctgtggagtccagttggcagcaggatcctgcggtggttgggccaagaaggggctctggtgccatcatcttgtgattgaaatctgctctttatcagttttgcttccttgttcagggatgggactgatcacagcttccaaggaaccaccctggggtcccatgcaatggaaatttagggcagggtagggaggaaaggcaatgccacaccagcagctgcagtggatagagccaaaacatccaccttgtagaaacatctcaaagggttagttctacaccagactgctggggaacagtttaaggtactttgcctattattttcatccatccatccaatagtccctaccttcaagacgcttcccgtctcacaagacagaagactgctgggctagaatctattgaatgctgtattggtaaaacagtgggtataagcaaagcatcctggggaagggtgcacaagaccgtaatgaggtgatgctgtctgatctgaccacggccctaaagggtgagtgtggtttcctagaatatggactgggggtggggactgagacggatgaaaggtatacccggcaaaggaagaatggggaaacattattccaaagtgtggttgaagatagagtagacaggaaccaagtcatgtttgaaggacaggtctttgggtcagaacctaaatgggcaaagctgtattactgagcaaaactatcacacctctacgctccagggggatccagacagttctggaacttgtctctagcggtcccacagagctgaatcgggatggtcttccaataggaacacattgaagggcaggtgatcacctcacagtccctcaggttatggtggtgactcaactgggtctgagtaattaaaagaaaccccaggatggccctgttcccaggcagaagacaggctcctttgaactctaggtggtcacccctagttgtgcccgtggcctgcacaacctctggtagctttgaggacatctgagttccctccacagtgggatgtatggtgatgcgtttcattaaattaatccatcaattaacacagaaactggggagaatgatcattgggagatattgttgtttgtgtctatttcaaaagaatcctcaaagaagtaaaacctacatacacaaaattcctcctctaatggaataggcccacctctaataaggcagtggactgatactcagtcttttgccttattatcctggaacaaatttacacttgtcttaggaaacgggctgtttccaataatttgaggaaagtgtgtcctagtcactgtgtgagccacacgtgtgcaatagcagttcgcacagcacacccacgaaaagaaataacagtccttttacttagagaaaggaaggataatggttacttagaaagtgtcccagacaagctgtcaaattgaattcagagagctggagtctgactccaggacagggcgggctggctaagttcccgagggattggggtttcctgcctgctccagcttagagacaacgagtctttgtttccagttctctcgctctccctcctcccccgatctctgtttctctctgtcaccctcgttctttctctctctctctctgtctctctctctcttaatctctctctcgtggaaaaaaaaaaaaatgcaactctccgaagagggtcagatagaaagcagacagaacattaactcaggaatttcaaaggaaaacagtttttaaaaaataaaatagagagagcaagctactgtctatcccataatcataaatcttgcctttggaccacagaaacagcacgcgtgcacacacacacacacacacacacacacgcatgcatgcacacacacacacacatccagcaatcatccctgcttttgctaagaatggcttaggcacatttcatcataaaggaagaacatataatgacaatgttcttcacaggctctcctgtgaggccgcgataccctccaatttgaagtgtgtgtgagctgacgtagatggggcctgtggggccacacaacctgctgcatgagagatgttatttactccctaaaaataacaggagattacctcacagtattacaggccttttcctttgggtacacatgttccagacctagcccccatacgctgcactctacaaggcaacacacacagcccacctccacactgagcaccagctcacgccctcctgcacagacacacacacaaggctgccaaatgcccgccttcccaagtactgcacccgggagcgcatcagcctgacacaggcagtgcatatcgcgagggacaaagatgccctcctcgggaaactcttcgcccggagaaataaggcaaagatatcttgaggcattttttgagttacggagaatttctaagatatatacaagtagagaggaaagtctaatgaaccctgaggccccatcaccctgctttaacaatcatgaattcatggtcagtcttatttcagctccatgcccacctactccgccctccccggccaaatgattttgacacaagtccctggctctccgctccttcgctgagcttcctgtctcacaatgaaacatccaactgcacccggttttccaggtaccaggaagccatggtgcacaggttctaccccagggtgtcttcctgaaacccacatcaaacacccaggcctcagttattcctgcaagggctcacctgggctcctgtctccaaaacccaacttgaaaactcacacacccaccccaacaaacacgctggtttccttggtgccttcctccttccctttgcttcaacatctatttccagccctgccatgctgcagcttgctagaggcctccatcttttactatgacctctaaaatcataaaggacatccacacaggagctaaatgcaggggaaaattgaaagacgtggtaatatacgtgcattgccctcactctaaagcacagtagttccttacttacttagctgtctgtctctctgtttgactagaacctgcttgagggtaggtagtgtgctgtgttcaccatggttttagggctcagcctggtattctatgcagagaagattctccataagaaagaaatgaatgaatggaggagagcatgaatcacagaatttaggtcaattcctgactaaggtatcatgtatctataatatctgcctacataggaataattgtatatatttgtcttcactccctgtgtgaccatggctgggtccacaccttctctggcctcagatctctcctgttctataagggatttggaggagatgttcagcttgagcattaatgattttccatctcttcattacactcagaaaatatcttgtgtgtagcatgcattgttgtttttcgattacatgcagttttatatttccttcatatttcctaggtgtgtctccctaaatagttgtttttttgctttgttttttgagacagagtctcactctgtcacccaggctggagtgcagtggtgtgatcttcgctcactgcaacctccgcctcccgggttcaagcaattctcctgcttcagcctcccgggtagctgggactacaggcacatgccaccacacctgactaattttttatttttagtagagacggggtttcaccatgttggccaagctggtcttgaacttctgacctcaggtggtctgcccaccttggcctcccaaagtgcagggattacaggcatgaaccaccatgcccggcccccgaataagttttaaagcagcttggctatctatgtatagtatccttcacgacccttggtacggtgttaacatctggtaaaccctcaaaaatactgtaattagcgggatactgtaattaggaggccgaggcgggcagatcatgaggtcaggaggtcgagaccatcctggctaacgtggtgaaaccccgtctctactaaaaaatacaaaaaaaaattagctgggcgtggtggcgggcacctgtagtcccagctactcaggaggctgaggcaggagaatggcgtgaacccgggaggtggagcttgcagtgagccgagatcacgccaccgcactccagcctgagcgacagagcgagactccatctcaaaaaaaaaaaaaaaaattgtaattagctttcaataataatgttaattactattagaatttgtactataataaattagaataacaatttactatccttattataacttttattgagcacttattggtgtgtcagaaactgtgctgatttatgagttttacattatccctgaaggggcactacaattatcctcatttatacatgagaaaactgaggcagaaaaatgtaagcaccttgtccaggtcacagtctgagtccagagcccaagtttttaatcagtatgctataatgctgaaataggagaccagtgcccaccttcggtaaattgagagtattaaagaatccttaagatgttgtcagatgcttgaatcaagtatgctgagataatgattccagaagcagcctagaggaaggacagaacacaccaaaggcccggacttgagtcttgttctgcttcatgacctgggtgccttctaaggaaccctgaaatctctctgtgccttgttttcattatctatagaagggggataataatactaccagccttctcatctcatggtgatggcaccagagggcacaaacgggataatggataggaacgtgcttggcaaaccctaccaggctgccaaaatgctgttgttaccatgtgcatggctcctgccacctaggactctcctggagagaagccagcctctcgttaacatgggcttcagcaccagccaggcatttcactctaagggacacagaaaggtagtttctcccctctcttttccatacttagcatgcaagccgacagactttttatccatcagccaaggcaatggctggagatggccattccgcttgcagtggggctgtggttttcagtttccgtgttcaatggcagtcctgaaaggctccaggctggggctagaagctcagtgctccacaggcccttggccggttgatgagttccaggagttaataaacaaggaactcaatatcctctgtcttttggaaagtcagaggtatttaaacagattcagcatgaggaactaaggaaatgagggcttaggcatgcaaagaagctctgaggaagagatgtgctgattgttgcacactgctgggccagctgagtgtgctgggaaggcctccggcagggtttgcccagaaaaacaaagggaagctctgacctgggaccagggcagacacacgcacatctgcagcctggaggacgggagagaacaaggtgtggaaagtcagtagccctggctccaggactcttacacacttgaaaaggccacttaacttctgcaaccccagtatccttcctataaaatcacgttaccaacaccatatctactttttagaggactgaatgaggacacgtcagaaagaaatttctgagatgtacgaacgtacagttgtctaaatcagtaacatcatgcatcaataaaatcagtcatcaatgacaatgacaaaaaactaatcaagatcgtacagtctcttcacttacctatacctttatcaatataccagtagggcctgctattccttttctaggacaatctgggtccagacaaccgcccagtgtgtctccaagaaaatctggagtagctctaacatgggcctcatttctctctagtttgtctctgttctataaagcaggcttctctagcttggctgcagcttggcttatatgaataacccggagagctctaaaacatttccaatgcccaggagtcacccttggaggttctgaattaatgcatcattttttggcacttgggcatcagtatttttttattttaatttttgcatttacaaaattttagtaaaatatgtaacataaaacttaccattttaaccattttaagtgtacaatttagtggcattaagtacattcacaatgctatgcaacgattaccaccatccagctccagaaccttttcatcttcccaaattgaaactcttacccattaaacactaacaccctatttccactccttgccgctcctggtaaccaccatgtaccttctggctctacaaagttgacagttacctcctatgagtgcaatcatgcaatgtttgtcctagagtcagtattttgaaagatctcctggtgattctctgtgctgtcagaactaagggctggtgccaagcataagttgtttattggttcatctttggaaagagagaaaagtttagggatggagatggagctgacagtgggaaaactgcatggacagaaatcaagtaatgcaaaacattcacatctttgcccaagttacatttaggctaggtattgcttttgcagaatggcagctggaagagaaaggctgtatttgtcagaaagtgagggggttctagtctaatcctctaacctggtttgagtccttgctctgccatctagtagctgtgtacccttcagtgagtcacttaatagtgctgaaccccactttctttgtctgcaaaatagagataataatatctacttcaaagacccagtgctaggctccaaagcaaagcatgtggaggtgtctgatatattccaaaaccctttacagatgacagttgtggctgctattgtaaatggataacaatagcttttatcctagtttatttttttaagtgccttagccttgataaactaaaggtagagcataactgctctagctggatccaatccatgtccatagaatatttaatttaaaggggcttaaagattgttctaaattaatttttaaaatctactcttacttcctgggcacaaataacccctagagattgcagccattttcaagagacaagctggaagggtgattatacaattttaaagcaaaaagccattctaatttgataagtgctttgaagacattaatagacagcatctcctcaacttccttgctttgtgcttgatgccagcacctgccctttgtggactgcaccagtgtgcactcacacacagacacacacacacacacacacagctctggtgctcttgatgaactctgggtttgtttggggctgtgtgtgtcttattcaaagaagatggagccaaggttgcctgatgtcttctaatagctaatagatagtgattagagcagagcaggagagccagtgagaggtggggaggaggcagggaggatagagggagggcttgcttagctttgtcttgctaatgtactttgttttgtggcttgatgggtcgttcagacagattcagaccacctcacaaggggaaggcatagaggagcaagacagctcaagtggagagctttactggggacaaaagatgcacctgcaaagcacaggcttaatcgtctctagaggccaggcccgatgttgggagataaatgccggcaccacctgaatgaggtcctggcagcgtgtgtttgcctggatactacagttaattcatttcagaagaggggttgctacccagcaagagggagctgctcctgcaataagcctgaatgagccagcagtgttacaaatgtcctccctaaacacaaaagggccaagggaaggaaatgtgtatggcaggtagaggacacggctgaacaataagacagcaggaggaggaggaggaggaggaggaggaggaggaggaggaggaggaggagatggttagcaacacatttcaacttggctaaaccagtttctaaactaaaccctatatctgaagcccaatatcagaaaatatttcattagctctgcttcagagcctcactggctaattctgatgttggtagcaggttgtagcctgaagtgttggagaaacttacaaaaatccgaactcagcagttcagaggttagggttcctcccatccctcccttcctccttccctcccttccttccttatagccttgcttttctccctccctatcttccttcccttcccttccttccctctctctctctccctctagtcatttttccccttcttttttccttccttccaaaaagtggatccctatccacaaatgaaataaaactcagtatgtagaacatatcaaaggacagtggctcttgagccctcgcaatgtgagtgctcctgtcatctccttagaggccaagatctccagagtcagggctggcctcttgctgacagagttcttctctttcgttctgcaggaaactgaggttcagggcctgaagtggttttctcacaggaagccaaaggtgccctgaccttcaatctaatgcgtttgccactaaaatgtattttctctcttacagacatttgcaacagcatattaaaataggtcaaaaagtgaaatctgactcacaatgtagaatgaatccatagaaattcagcgttcatgacaaaactcaagaaatctgatttggaaaggaaaaacagtggcagaaacaggactggctcagggtgggataggagagaaggaaacaaatgaaaaacacaaatgtttaaaagcggattcattatgttgtataattcttccactaaatgttctggtcattattaaattataaattgttaacaggaaacacaaagtgctgtgtgatcaaagttgtaaccttgggcaagacagccagctagtgcctttggctctctgtttccttcacaccccatgcggattttaagccaaatggtccttcccttagaagagcctttgtttctctgaaaggttttgcagtgctgtgctatatgtaactgatcctgagaacttctgcctttcttatatattttggggagggtgagttaaagaaaaactggggacagacagcgagccaaggaggacagagtgcctgccacactcttattattcttcaagctcctattcaaaagtcccctcctctgtggaatttttgctatgccgcgcaaatattttttccagtctctctctggttcctaataattatttgttcacatcttttcctcctttaaaccaggtactatgaattattcacttgtttcaatgcctgaaatctaacagtatctgaaccactcctcacgatgtttcataaagacgctgaggaattctattgtgacgtgtactaaaatcttcactggcaaaaatcatttgccgaggaagttttctttctcagcaaaaccaaaccaaaccagaccaaacccttaagccaccactttaaaaatgaattgacatcgctaaaattttttttgagacagagtcttgctctgtcgcccaggctggagtgcagtggcgcgaactcggctcattgcagcctctgcctcctgggtccaagcgattctcatgtctcagcctcctgagtagctggaattacaggtacctgccaccacacctggctaatttttgtattttttagctgagatggtggttttgccatgctggccaggctgggcttcgaactcctgaccccaagtgatccacccacttcggccccccaaagcgctgggattacaggtgtgagccagcatgaccggctgctaaaatttcttaggaaaaaaacctttaaaggtagacatgctggaatccttgaactcttcatttcattattttcatcagagaaaactcccaactttcaactttgaaagtaagcagcattcatttttttctaaaagtaacatgttttcctgcatggagtgacaacttcaagttgtatctttgtgatattattacaagatactgtaaaactttctttactgtatttttgcaactggtagcacaagtggcgaaaattttggcttgtctttgtatgctaggaaaagttgagtggaacacgcaagctggttttctgcaacaaccttaacagcatgggcctgtgtcatgtctggtacagaagaaaattttaagtgcacaaaagaacaaacttaccttctttgacactcaatcgtgaggattggtcggtgtgggaggttgtattataggccagcagtgaacctgagaggcaaaacataaacaggttataaccaaaatgttcttctgagatcaagagtaggagatgacatgaggagggagtagaaagggaaagagatggggagaggggaagagggacagaggactcctaggaagaaaggaaaagcgaatggaatccatttggttggagacaatcatacaggcctgtaatagctttatggagtgaagagacagaatactttggaatgaaatgctctctggggaaacaaacaccacgccccctaagctgccatattcatagttctgaagcgctgtggtctgtgccataatcatgataggaacacagcattgagaatcagtaaacccgggtctattccagttgttattaactcaccatgtgacagttggtgagtgacttgacatgtctagattttgattttttttcttgaactagagcagaggttggcagatttcttctatcaaaaggagatagtaaatattttggcttcataggctaactacaatctctgttgcacagtcttcttagtttttgttttgctttgtccatgggccacttttggccagatttggcctgcagcttgtactttgccatggcctggaggagaagccagtatcactccttcctgctgtggtatcttctgggtttatgtacatatgggtcctttcacaggtgagggtaaggtacacaggtatgttactggtggagggggcaatgggagttgggaaggaggtgagtggtagtattccaataggaacttttgcttcccttcacctatgtctaagagcacgcactgaacctgaggagtcacgcgttgaattttctgtaatctcagaatgctgatatccaatcttttcaaattaaacttcaattcatacctcttctgtacccagcactttgaaaaagcaatttgttgttacatgtaaaacacattctcccttctttcctaaaactagactttttcctttgtttaaagtgaattcaaggttgtattttgtgaaacttaggcatttttgccattctctttgagattctcctaaggaaatcttaaagagcccttgaaacgagggctgggatctgcttttataaaacataccataagctcaacacatgtattcgaggctaagaaaattcttctaaacaacccttttccccgctccctgtggccgagtggactggcttgggtgccaggggtgggaatgggctgtcagacacacccctatttttagtctccagtcatggaagggatgccgaaatggagttgccgcctcacccagctgtgggcgtttggttgtgtgcctcagagaaaatgtgtgcactatccaagccagacgatgaggaagagaatttatttatttattttttttgaaacggagtttcgctcttgttgcccaggctggagtgcaatggcgcgatctcagttcactgcaacctccgcctcgcagattcaagtgattctcctgcctcagcttccccagtagctgggattacaggcatgtgccaccatgctcggctaattttgtatttttagtagagacggggtttctccatgttggtcaggctggtctcaggtgatctgcctgcctcggcctcccaaagtgctgggattaccaccgcacccggcagaggaagagaattttataagaattgtccaattgcctagaatatgactgttagttctagctctgcagcagctccagatgaaaacaaggagggggatgacgggggtggtattgagcccgctgtatgccaaagtgtggctatgtggatgccattttagaaatgagacagtcacatgaatataacatccaagagccagctacatttggttattccatgttcaagaataccaatgacaaagtaaggctgggacaagttcctgttaatagtcacacaccaaaaaatgatgttttgggcaaagatggaccacatatacgacaacggtaatagtgtatttttactgtatcttttaaaagttagatgcacaaatacttgccattgtgctacggttgtctactatattcagtacaataacatgctatacagcttagtaagctaggagccacaggctgtagcatacagcctcagtgtgtagtaggctatgctatgtgggtttgtgtaagtacattttgtggtattcacatgaagatgaactatccccatcatgaagcaaagcacgactgtatgtttattaagcaaaggagactttaaaattagacctgcctcttatcactgactagctttgtgccctccactgatttccctcatctctttgagccagcagtttctcatctgtaaaatgggctaacaccactcaatggcattatgaagattaaatcaaataatgcatgcaatgtgctcagaatggaccttggctcataagtgttccataaatgctagctatgatcgttactatttttacatcctttctcccacagatgtcacaattacatacaatagttctctttatacatgcgtttactgaacattcgtcctgtcctctgattaaagttatgaatgggttctgctgcaataagaaataatccggcacgactggaaggaagtgaagaaatggaaccaaatgttcggagggaatacaaaaaaatcccagaagtaggaccaagaatgcttgcctctccgtccctgacgttctctccctcaggctgaaacctcactgctggagcaaataaagaaaaatgatggtctccgaggagcaaactgcctgagtcattagtgcagatgtagccgaaagcacgaaccttagataaaccacatttattaaatttccccattggtgaaagttcttctttgggcacacatgaattccacaggaaactcccagaaagctgagagaaagggtcatttgacctctccaaagcttgcatgaaatgtatatttcatggcaacctaggaaaaggattttgccctaaagactgttcttggttcaagtttcactcctagaaggagaggctgccttccccaaggaggggctggttgggggcatctggcctctctcccaagggacctagattccctcctcttctccgatttctacttcattagttccccaggctctgttttcttaaggaacttgttctgatgcaggcaggtcctcctggagtctggcctccctctctgtggctttggactgctttctcctgccttgaggctctttctggcctgaccctgccacaggcctgtgctgctgagctcccccaccttcccgatgccagcacatcagggtaaacaggccatgatgaaggtggtggtggggacgcagtgctccctgaacatgcacggtgtgccagacgctttccatctattttctcacttaatccttgcataagccatacagagccagcattcccttattcctttttacagatgaaaggagcaacactcagcgaagtcatatcattttcccaggatcacacagccagagagtgcagaaggcaggagccccatcgtggtctattcacaaaacctgtcctcaatctggcagatcccactgcctccaggctaaatcgtagaaataggcaaaactcacctatggggctgggaagcagggtggtggttagttttgtggaggaagcggttgtggggtggagagagggtacagggggctgaaattctactccttggcccgggaggtgcttatgggagtgggtggattcacgtcacgataatgtctcacgtagcgcacttcatgatttttgcacttctctctgtgttgtacttcagttcaaactgaagtataagatttgcctacttggttatttgtaagtttctgtatatgtgtttgtatgtatatatttgtatatgggtgtgtatgcatatacatatatctatttattgagggcatttttgctctaaaaagcataaagtagctcctgctgagaatagaatggccttcccaaagtgcaagcatggggaaaagatcattttccattccatgtttgaatccatgtgctgctagagacagtacctggatctgaaaggagaggggagtgagcagtgtgaggctttgcaggtgtggggtagaaccccaacaatcacggtttctgctgcttcacattccctcaacctaacctgcttttcatcggggacacctgggccagggggcgcaagcgtcccagtgccaaagcctttgtctcctgcctcgctgtgaccatagaattcaccagtgccccctcacagccagcctattgaatccaggtctctcttttctctgggctgcactgctatatcaacagctctggctgagtgtgcaggagcgggagggtgcaaggctctgggatctttaaacaacaatcctggctgactactgggtccagggaaacctggccttttgttcagctggcattctgttctccttcaccagtcaaacccaggcctggaagtgataagattgcaccagcttaattgcccagactcaaaacctctgcccgaccatctgaggctgcaggtggaaagaccagaaaatgcaaaatgtgttttccattaaagtttaaattaaaaatgggaatgaagatagacaccctttccgtggtctcccggtcgcgcagtttcattcttttgagcagccactgtttgaagacgcagtttcttagtgtttttttttccaggtcagacccagattgacatacaaaacgaacttgtttgtaaaacttaaaaaaggctctttttctttctgcctccccacctcccccggggcctcggggctcccagccttgcgcaaactccccccagcggccctgagcctgaactgccagcccggcgccctccgtttcttcgaggtccttccccgccttggcctgagaagggacaaatctcgttcccgcagcagctgctgcgaaggctcctctgccacacggggtgtgtccgggagagatactggtggggccgacagtcaggcccagagaaggacaaagttagcgtggtgataggtttggcttaatcggcctccttccaggaggccacaggaaagtttttggaaagcatttatctcttggtacaaatgacaacagaaaatgctgtgggggaagtggccgggctgcccacgtggaaggccgggagtgaggctgccttgcctgtgtggcgcaggctggcttgctgtctccagggccgggggaacgtcggcaacgcgaggccagggactgggactccagaggccctagtctgagatgccaggtgctctcaatcggctggatgcctttgaaccaatttctgaagctgtctgggcctcagtgggttcagcttcaaaatgggtactgtagatagttgtccacaagggggcaaccttttttcctctgaagacagagcctcggtctatcgcccaggccagagtgcggtggtgcgatctcagctcactgcagcctccccctcccgcattcaagcgactctcctgcctcagcctcccaagtagctaggattacaggcgcccaccaccacacctggctcatttttgtatgtttagtagagacggggtttcaccacgttggccaggctggtctccaacttctggcctcaggtgatccacccgccttggcctcccaaagtgctgggattgacaggtgtaaaccctggagtttcccaggactcatgggaattacccccaagaaccgtggccaccccagccatcacagtcctccttgcatttcctgtggtggtgggggggaggggtgggcgcctgtgtggcgtgtgacacagctcctctggcacagctgacacgcccaggtgtgaagaacaagcacctccctagcatgcctggccatcagacagggtctgtaggggcacagggaactgctatttcttctctaccctggaaaatacatttgcatttaaaatgtaaaagtctagctcccctcccaaaccaccagaataaatagtcaagcaccttttgtgaaatgtaaatttgatgccaaagcttcttatcctatgaagttttcctttttctagactttctataaagcccagaaagattagatcagagaagtgccaccaacttggactctactgacttccaaccagccacagtctcaggtccccgattctgctctatcaactttccttcaccctgcagtacttcctccaccggagtgaaggatctcagctattttccatccatctcttgctaaagtggaaatatctgagccccaccttcctctccaatgaaaggacaagatgataaagcacaaagaatcagcaccctctccccttgccttgactcatcgcctcaaactctccacaagcactggccttcctcctaagcacagaacatccactggaagtcagtctggaaaaacaataaagtgtttgaaggctttaaaagcgtttaaagtgctggttgtcacgggggagttcccagcaatccagagcagaaacagagcagacacgatcgccagcccatggcctcctgcaggcgcttagcagccagccaccacctcacactagagggtccccaaggctggaaccccaaggtagacaccaattaaaaagcagcatgaatctaaaagccttttgcctgacagtggatcattttaagtctaggttcctcaaaaggatatttcaataccatgttggggcaagttttttttttttttaatttaacacgattattttaattttttgctttcgcaggcagacatggtttttctatcagtgcacagaccactttataatgagcttttccacccaacattgtatcctaagcacttctcatggtgtttcccaataatcatttcaatggcagaacaactacttcccatcttgtggatgtactactgttcgccaccatcctccactctggatatctgccctgcattttcaaatgtcttcagtatacaagctggattccacctcctctccactctggaaatatgctccactaataagtcccttttgggaaacctaatatttttattgatttgggggcactttctgtctataaatattcttaaaaagaaagaagcaatttgctttttcttgccatgctataccccccaaaatgccatcctctgcacctccacttcaaccttgttatctgctcttctccaatagaaggtctctctactggcgaccagtgaccaccttctcaggcatttgtctcacttcagcatctgtgttcccattgttcggtggcaggaagtactaggggaccttgggctgtttatggactggttagggccccggggtcatatggcatgaatgggctttccccacatggagagaatgccttgaacattctcccaacaagggcatccgccgaagagtctcgaagcactgggccctttaactaacagttcagagcatgctgtctatgctactgttgtcctctctactcctggcaaatgaaggaaagggcttagggttcctgcaaactcctgctggaatcaggttgctttgctggtctctccttctcatgctaacctccacacacccaccctggcctgcctagatcactgcaggactctgttcaaagatccttattttttaaaattccacaaacagttaaaagctgaaaatatgaattagaaagtgctaattatccaaagctctgaaaaactgggtggaaaattgtccccttttttgaaattgtttcttgggctgacctcatgttgcagcaagactcagacatgaggtaattgctccggagctaacaaatactgcatcatctactttctcgcactagttaccagacgcctcggaaaggtgaccagagagcacagaggcaccagtggaaactgccaaagccagttttttgatttttcatttctccagccagcacgtgttgcccctgccccatgaggaacactgtcgctgaagggacagtggattccaaagatggggagttaaaggtccacagaacgatggcgagcaaacagagctcaccaacccagagccagccagtccaggaaaagcaggtcccagagttgctgtctaaggatctgaacttgcgaagggggcttaaaatcatcaagcccctgcccaaagctaaactcctgcaagactcgcagctgccttggccattcacaacaaatagcatctcaaggctgccctgtctttgcacagggctgctagaatgctcttacgtagtgtgagcccaaacctgtgttcctgtgatcctagcaccatcttttcaggccccaggacaatccttccatacttaggggtagcactgatattgatataccacctggcctggattcccagcagggcactcaggctgaggttaccagcaggactaaaataattccattcttctgctctgtgtatatttcatatcaaatgaaattcatatcagactgatgggcgcttggtgctagagtacctcatactagataaatctcttggacaactgcctgctttctttcttaagctcgccctttccaaagctcttttccttttcttggctgtaccagaagaaagcctccaatggatcctaacacacctgcacctttggctgctcttccttatcaaggaagtgtgcagatagcagccctgtcaaatggggttagggtgtgccagagtatcccaagattaagaggaagctaatatgtaaattattttcaacaccttaaatccaaaagccttgaatctagagtttcctggaggaattttaaataatcacttaggaaaacaccagccagggcaccacccatctctatctattttcaaattggaatagtttctggaaaggcggtctcatgggaagagtgtaaccagcctctgccagacccctccaggtcacagctctctacttttctccatttctcgtcttacttcctttgacacttcaggattgggtctgcccctcacagggtctgtaggagcccacgtgaccttggcaacactacaggccccacgatgctgctccggcggcatctgcccaacacgaacgggcagcactgacttcctctccctgggttggctccatgccaagcttcctcccagccctgggtacttgggcggcacttactttccctgaggtaactgaggtgtgacaacagcacttccgtgttgtagagggtggtggcgcggaggaagtcctccttgttcattttacacagttccttgccatccatgttctggaaaaaggatgtgtcgatctccatcaagctgtactcctttatggcccactccagccattgcctcacatgctcctgtgtccacagtgtggggtctgcagaggagaagacgttgttagcaaggactgcaggaaggtagaggctccctgagagcctaggcagcctccctcaccccttgtccctctttctttcccttctctttctctctgggagagctcccttccacatggttcccctagaacactcatcaggctccatggcatctggcgctgcctgaaccacttagcactccagggaggtgcttagctgcctcactacgtatcctgacagagcactctttaaagttttggagagcagttggaacctttgcctgagaaatggtggcatcaaaatgaaaataaacacaatttcacagaccccgggaccaatgtctctggaaacgggaaccatctgtattttaagaatattaatgatttcatgaaagaacacggatccctcagatggctgtagaaaagaaacagagagacttttactgcaattccatctgtgcagttgaaaaacccagcggtgttagtcttgaacagaaacccaaactagatttttctccttttgagcacagctgtgtagaaatttctaccagggcatccccaaaacatattttagatatttaaatacccaaagatgagagatgacgttggggagaacattttagctcttgagtgaacacaggtaaggtaaccactgaggccatctctatggtaggacactcatacctcctcctccttctcagtgtgtgtatgtgtgtgtgtgtgtgtgtgtgtgtgtgtgtgtgtgtgtgtgtgtgtgtggtggggatgttgcactttcagcacaagtgatgagttccagcaggttccacagtaggcagaactcttttatcactcatcacagtctgaagcccatctcttcacttggcaaccaatggttagtgggtccaataaacaccttaaatatccttatcatagaagaaaattacatgacgcttgccttcaagaaatactcattcccatgaaacaggtaggcaagcacaccactactaagcaatggactgtgtggcggtggttcgaggactcataagtggaagggaatagtgaaaatttggagagtcaaggaagacttcctgggggaggagagactcggcattttattgtaagtcggccattagcctccggcttctaatgagcctgtttgatttaacatatttattaggcaggaatatctgtgctacccctcaagcaactcaccctctcattctacagcgtctgtgaaggctcctggcaaagcagggaaccaggattgaatgactaggagtggatgtggggcaagaagcaaggctcacgcttcacagctgggcagccagaggcaagtttcccagcacttttacacaagcatccaccaactgtccttggactctccattccaccttggtttttatgtgtgagaatctgggtggcagggcccgagtagtctgctttgtaaagtgcccaggccctgcccatgcacgagagtggctgctgtgttgtgctgaaggtggaggagctggcaaaggggaggagttaggagagtttgggttcacaggtcacagcctgctgctgaatgtcattccaacaacctaatgccctgtgagcagtgacggctcagatggtgggtgctatgtgccacctgctccgcgagccctatttttacttaccaaggaaatcttttaatatccccattttacagatgcaaaatggagtcttaaaaggttaagtcctttgcccaaagccccatcgctggtaagtatctgggctggggttccaatagaaaccattataggacttcactaagctgaagaggtgggttcccccaaagcccctttcctcttctcaccatcctgctttacctcacctgtgagttacactgctctgaagccagaaagcggagctcctctaaagtgtcattgtacaagtatgtcttcctctctctctctcagatacatttcttgctcttttactctccagaagcaattaggcatggatcattggcaaatggaaataattttgcaccttttcagaattctagagaaacatatcctcgggagagttggattatgtagcatattatttcattcttcacttctcccagttcctcacttttagtatccaaggcctcaaattcaattttacaccatatattttatttattttattatttcctcccttgctttgggctctgcaacaatattattactctccctctacagcacaatgaattataaatcttcaactctggatcatgctaaactcttccaaatgcatttcctggatgatttagtcctagtttcttcccatctgaacatggagctagtgattaactagggcccacatttatacttgtctttaaatcccatcataaattcaatcggttattccactaatattttattgccttgatttgtggacttgcccaaatgagacttcccctcatatccacagcctggcctggaggaagccaaaatgtgtgaggacctaaaagatctagccggagctaaaataatgaagtaaatccatagcctgaaagtgctttgaaaatcatttgacatgaatttgttttattttcaccaccagcgctataggtaacttggctcagccaagcctgatgttttgctattccttttgaaagcatttcaacactgatcaaagaaagtttggagggtcgacatagcagtctggccacttctgcccatttccaagattccttccccaaaatgacgaccaaaatgagatggtgccaaaggttggttcaaagacaatctcagatccccaaacccttcagtccagcaagctttccctcccaggctgggagctgtttgactgaagcaggggagtttgaaaccatttgagtgaagacccagtgaggctcagctttgctttgggctgtacaaagagattcccacctgtcagttctaatacagtttcattgtctgctttcagtgaggagggagacgatacacctgggctaaacattactagctggtctcctgtgacaggtgttttaagtaatgccatggagataaagcaatttacgtggtgcctggcacctagaaagcactcaataaatggaagtgattcttcctcttcctttgttaggtcagatgcttgtggaagagcaaacttagaattgctttaggagtcatttctaagtcctaaagggtacagagaaatttctacaagccccacccgtctgctgcctcactcttgctcacaccttcttgaatttggcccagagcacagggaggcagctgtaatccagggatatggtgagatgcagcttcccagggaaaacaaacaccacgggccaaggcaggaggcagcccttaacatttctgcctttagacctacaagcagatgccttcggactacctcaaagagatgtctaaccttttgacttcagaggcaactacatttatgcttttacaaatggaaggagttttgcctctctggtaaagttattttggtaagatcaggtttaatccctgccctgtaatcactttgcttaagatttggacatccttgccccttctacctggcaccagttctacacgtggcagtttgtaaacacccttcttgtgcaggcagctgagcttgctggtgctagctggggtggagtgtccagccaatggactgaaggactgaacgatgattttattttctgggaccaacagcaccaacacctaggaaaaagaggctatttttacctaatgacataacttgtggcacacatgttaaggcactccattagttaaatatagttctttctattttaaaactgaaagagctggctgtaattttggaaaggtggaacctggtagatgccgggaagtacgagcctggagggaaggactggcctctgcagctgacctcctcctcacaggcagggatgcccacatccagagctcacgggattccttttgggtggaggcggccttgcctctgctctctgagcagcccgtccttgaggaccaggccattgatgtagagtctgtgatgtggtctgtttaagggtggggcttctagcacccacacatcaggtgacatctgggatactgccttaaagggcagctaggaagtcaggtaaaatgtgcagctttttttttttttttttttttttgagacagagtctcattccatcacccaggctggagtgcagtggtgtgatcttggctccctgcaacctccgccttcccggttaaagcgagtctcctgcttcagccccctgagtagctgggaatataagcgtccactaccacacctggctaatttttgtatttttttttttttttagtagagatgaggtttcaccacgttggctaggctggtcttgaactcctgacaagtgattcacccgtcttggcctctcaaagtgctgggattacaggcgcgagccaccactcccggctggcgtgcagctttctccattttgcaattccacagggaatagagtatcagataaaggtttagatgctccctgcccccccagagagtggggaagtgaatggcgcccaggcagcctggttctcgaattacctgcggggacgatgactctcctctcgttggtggtcatgttgggaggaggggggccattcttctcgtccatatagctgttgtagttcatggggttggactcgcctccgcccaccagcttgctgcatttgctaacgctgcagtccaccggagactccctaaagtgagaagagacaaagcccagaggcggtcagcactgacagggcagcttgcctcagcctctgaatcatgagcccagggctccgatgatgagcatggagccattgcccggccacacttggtgtcatgatgatgatgatgccctctttctatcctccatgctgccaccagagttttcttcaaatcccagcccaatcctataattacagtacgtaaaaactgctggcagcgcctcagtgccctcagaccaaggtctgagcttctttgtgtggcatcgcagccctccctgtctgactgcagcttacatttttagcctcactgccaggcaacctagtccatgctcccagacacgccttccccacagtcccccagcacttggtgcccgccttggttataaggacttgtcacactgtctgattctcagcttggcctgcgccccctgactgctgagttcttgagaggatagtcatcactttctttgtttaaccctagtattcttacaggaggtgagcagcaaatgctttctcagtgagttatttctattgcacatatataagtttaatgcatttcttatgcactgttgtattcgaatttcccaataagcccccaggataggcacagcaagggttactatctccttttcatggttaatgaaatcgagacaggggctgcctggctcagtcacacagctagtcaaggtggaaacaggactcaggtcttctgtgttaagcttcactatcaagcacacatgcaaaagagctggttgctacttggagaaggaatggagtccaggaacttccacctgatggagaggtggtggccctgtggcattttgcatccctggccccaagctcactgtggaagcagtatggacattcacaagagagaaagcagatcatccaacttagcctagaactacagaacttgatcagcacctggtattttgcagcactggtgatgggcagctgtctggaggggtgaagtcccacccatggccacctggcgccctgaagctggctggcaaacacactctgcatgccctccagcccagcatcacgcacctccagcatacttgggggaggtgccaccctgtcacacccagtgcccgctgctcagccactccagcagcagcaggaccaaaggagacgatgggaaggccaaggagaagctgtagccgccattatactgagcaggaagcatcggttctggcagcctgggagacagccagttctctcaagagctccaaaccaggccttcagaccaaggagttcagataaggttcagattacagccttccaactctaggccgcataacctctccggacgttccaaaggcctggccactgtcctccatcccctgccaggcgcaggaacggaccacagcgaggccttgaggagcagggccgtaccagatagggacccacccatcccacaagcagggacggcagtcactaacccaggagaagggagatcagcccagggcttcctgagacccaggcagggcggggaggcctgagcacattcaataaagaaaattaaatgaatttgtttcttaatctgaaaggaaaaaaatattgaagatcacttatcatagctgggagataaatgctccactgagatattagaagtcagacggtaattttttcctgatgtcttacagagggaaacatgggctgaaaatgaaaataagatgtataactcacacatgttagaatttaaggttttactattcgcctactgtttttccaggcagagaaccaaaaaccagccgtcagagtcccagattgctgaaggtttaacgtccccatggcaggggaggggaggggaggcagtagcacatcaggacttttcaccagcgtttggccctttggcttctgctgcggaaggacctggcctgagatgaagcagtcccagtcagaccctggtgcctgcatctgagctgagctctggcccgagtgcactgggtcccctcacccgccctggggctaactgcaggcacacactcacacacatgcatgcacatgtgcacacacactccaacacagaacacatgtgcacaatactttacccacatgcatgcacatacttcaacagagaacacgtgcacacatatgcttactcccatgcatggacacacttcaacacacatgcacagacatgcactgtacacattccaacatggaacacacatacttcacccacatggaagcacacatttcaacacagagaacatgcacacacatgcacgtacacttcatctgcacacacattcaacacatgcacacacatgcaaacacagtgcacacacacgcatacacattacacacacgcgtgcatacacacacactcacgcacatggtctggcagcctttccctgcatccttgtcagttgtgaaacagtccaagtgctgcagaagtttgaaggattaagttggcctgcaaccaagtgagcaaggttttcattggcaggcggcctctgtgggagaggtgggctccacactgcacgctcttcccttggaggacccccagagcaagagggcatagggtatgggcaggggtctctcggaaaggagaactacagcagggggcaggatggtgggacaggagggcacactccccgggctcctcccgtttgtggacggtggggatacgatatttggaaaaattcttttccacatcagccgggcccctggggatttctgagttaaaaactgacctcttgctgtgcagagaagtcagcacctcaggactcactgaaatggagtgagcctttatggttatggccatgtacggtaggcacaggtggcagggctggtcccaggtgccagggttggaggaaaataaatgtgaaaagctgaaagaaacatttccccaaacctgcctaacacgtgaccttgtaaggagaggagccatgggcacctagacgaagggaaagtggacgcagaggaggagggggctctcttgctggggtggccgctgccactcattccctgagcagaacctcctcattcactgacccatagaagttctcccagttccgcttccctcctcctctctccctcccccggccctgtgcacacacctgctctccagctggacaggtgatcggtttggccgctcgcccgccagggtgtttctcctctggaaaatggccctgtcctcggtcccaggcttctgcactaggacctgcaggcgggtgtccttagggagaagggctggcaccatcctggttccccacacttgcccagctggccctcctcccactgctcagggagagaaagaaggaaagccatacctcgcccgctcgcctgccagtcctccctccattcttgcagctcccaagcaccgtgcctcctccagccagcgcaagccctgcgtgcggccatggggctccacggctgccgctcagggtgggtacaggtgaagcccagcataaaaggctgctctttaatgaggcagctggcgcctgtgaagaaggcttgatgaaaacaagagggagggggagtgcgggacgaggttttgccattcagcttgcctgcactgctgctaatttgtattaagacctgcacttacagctagcatggggctggggcccactggcagctgatagcactgggacaggtgacaagagagcctggggctgccacaatagagcagggaggtggcggtggccccaagggtgtaataactcagcacatctccatctcagggcgacagaggccacagcagagctgccgagggtagggtagcccttgtccttcatttccaccactggacatagctcttgactcctcgagttctgtttgtgtgtgttctgtgaacattgctactggtttccaaaaaaagctttgcaatgtgttaggccatttaaaacaaggtgtaagatcttgggtgtttggatgaagggagatttcaaagacttctcctgaagattacctctttaggctgtacaaagatcttctctaccttcctagtcaactcagagcaactgaacttgggtatatcatcagacccgcacatctgagcccaggctcactgtcaaaggatacctgatgttcacgtggccaaagtgaggcctcgcgggctgcctaagtcacatggctgcattaggacccgcggcgtgtaactcctgcgtagtatgcaccctgtgcaaaaattaaacaatctgtattgcctttaggaagtctgtaggacatagatgtgacttttttgtttttgaaaaggagatgcaataacttaaaagcaaattccaagaaaagaaaaagcatcacttatgataaagccaccgccctaatccactagctgttttcatccccatacacagtagatgctgctaacttttccaggatcctgtgtatcctccccacccaggttatgtgtgacatgtctcatactgcaaggttgagaacacaagagtttagaaaggggcctcgcagccagagaggcacaagttccagggaacaggagctgatccttctctgtgtggaatgtgagtccctaggtgtccagggcatccagaccctgggggccaggccagggaatttcaaggaaggttagctctgaactctggtcctgaataccaggctcacaaggcaagtcttgcatttccctctataacctgatattcttttcttcatgggatgttttcccctatccctgtggttgagacaggatgcagctgagagttatttgcagaccacagtttggatcaagttgctgaagtctacatgcgacacagaacctatgggccatgctgtttcaaggcaacccagcctaacagagtcaaccacaacaggaagatatgaagaaagagagcacaaaactccctcaacatgggcaagccactctgtctctgagatcctcagacctcagtctctgcacttgaccctttgctcctgggccagagggtttgctactggggtgaaaagcaagtgggcatggtagcttcaggtgcaccgcacacctccttcccaccagagacacaaatgccaatgggtctccagtgagcatgaagacataactcagaagcccatgctgtcaaggaatgcagaaaaaatgcactgtgaatcacagaacagtccagaccaccatggcccagcactgtccaatagaagtagaatgggaaccacatgtgcgaactacataattttttttttttttgagatggtgtttcacttttgttgcccagaccggagtccagtggcatgatctcggctcacagcaacctccgtctcccagattcaagcaattctcctgcctcagcctcctgagtaggtgggattacaggcatgcgccaccatgccaggctaattttgtattttcagcagagacagggtttcaccatgttggccaggctggtctcgaactcccgacctcaggtgatccgccgccttggcctcccaaagtgctgggattacaggcatgagccaccacacctggccgagctacataattttaaatttactagtagccagatttttaaaagaaaacaaaacgatgaaatgaattttaataatatattaaagtatattaatatgttaactcaatatagccaaaagaagatcatttcagcataataaataatcaatgagatattttacactttttccatagtaagtcttctaaatccagtatgtggtttatatttagagcacatttcaattttcaactaaccgtatttcaagtgctcagtagcaacctgtggctagtggctgctgcattgaacagcacaggtctagcccatgagccaagcaatctcaaattttataccctgccttggttttctcatctgaagttcagaatcattataacatcctctcctatctttttgtgttatggcgaattagaccactgcaaacaatcaaatcatgtgcaagtaacgaactgtcattatcaataatactcagaggataggagaagcacagtgttcaggatgagagatttaaagagcctggcatttatttcattctgtcattgcttttggcataattaaatgatagggtctgacatggttccactgtaagcaatgacatttttctaaaactccttgcttcctgctagccactagtccagcttacatgtgagcccttagggaatatttgtggggtgctggcgatagctgtgcctaagctgcttggctctgagagtccacaggattgtctctgcttgcccagggtgggtgagaagatatcagtctttctgaacctactttgttacccgctgatggtatgggtcaagacaagcaactcaaaagcagaggttgctgctctgtgtagccaaagccaggtaaatatcctgtctgttcactggaatattcacacaggccctctccagctggcttttggtgtgactggagccaggtatgagctggcaagtgggttctgaaaaatcaatttccttgggggaccctctttgcacaggatcagtatcctgaagtgcttgaggattctctgagagcaggggagggagtggtgagcagcatacttccttcccaccagagacacaaatacccatgggtctccattgagcatgaagatggaactcagaagcccatgcatcaactcaggctcagcattgaaggggctgagtcagcagacctggatctgcgtcctaactttaaacaagcaccttctcttttgagtctgctcagccatgtgttctcagttatttatttgacgacaatttattgagcacctaccgtttcaggccctgcccacgtgtcagtgagggaggtgataagaactaggacagacactctaagcagggtaaagagtgaggaggcgctggtttcgatcaggtggccaggggaggcctctgaaaaggtgaggttcaggtagagaaacccaaaactcgtgagggagagagtcatatgactagatggagtaggaatgttccagaatgaaggagctcaggggaagagattctgaggcacgagggtgcctgggggtctaggagcagcagctagagtcttatgaggctggcgcggagggaagaagtgggagggagggggcagtagagaggatgtcagagggatggtggggccacactaagggctttgcattttgtcataagccattgaagagttttgagcaagaggattacaaacgaggaaagcatggctctggctgcttgctgtccggagaatagacttcaggaaggcaggaggaagtggggagagcaggatgcccccgcagaagcctaggagaggtgctgctggcttgcaccaggcaggggcagtggaggtaaggagtaggcagattcaggttacaacaggccagagaatctccaacaaagctgggtgcggtggctcacgcctgtaatcccagcactttgggaggccgaggcaggcggatcatgaggtcaggagttgaagaccagccgggccaacatagtaaaaccccgtctctactaaaaatacaaaaacttgccaggtgtggtgccatgtgcttgtaatcccagatactcaggaggctgaggcaagagaattgcttgaacctgggaggcagaggttgtagtgagccaagactgtaccactgcactccagcctgggcaacagagtgagactccatctcaaaaaaaaaaaaaaaaaaaaaaaaaggaatctccaccagtgggatctggatcttcaacaagcattgggagctccttggagaagggccccatttaggaggcatcgtagaataggcctcctcaccaggtgggcgttggcaggaatgaggtggtggtgcaaaagcatgacacacaagcagagggagcagaaaggtgcctaacagatggcacgtggggctggaaccaaacgcctgggttcgggctccaactttgcctcctttaaatccttagacaaagcactgtcccctgaaagccctgcttgccttcctgtgtaacagtgaagttacagtaactacttcttagtatagtggtgaggaacaagtggtaagataatatgggaaaacgttcaacacaccatgtccttcgactgttaggagctccggcaccatcagaattacatctggagagagattcatctgaggggctgcaggctcagaacctctgagccttcctgaaatcctgggatctggaaaggtggctgagatcccagtcactggttttggttagtagggttgaaatgtggtaggcctggcagttcccacaggcaggtctgaggccatgagctgctctggaggagttctccctcccaaccatgctcattcccttctctctcttcaatctagactagtttcctcggtgacctcatccactttcacagttcagactccttagagatgatgcccaaacgtaaattccaggcctgaaagattatctgagcttcagttcccaaagcctagtagacgtttttatctggatgttctacccattgctcacaaggaatctcaaagagaacactgacatcccatcctaaagcatttcctgtgccacctttctgcggctgctcacagcaccagcctttaaaatgtgcaggctttagtcgcctttgattctttcctgtcatgcacccccttcattcacactttactcacctaagccctgttaatcatctctttgctatcgcccttatgtatctgtccttttcactttccaaaatcactatcatcacttagttccgaacttcattatttcctatctgggatattttactaacttcttcacttgtctttctgactctcccatcctaccgtctgtgcgcaaggactgtcagctcgctagtcttaagtcactgctctgatgaggttaaatgtcacgtctgtgctcaaagtcagcctctgggttaaatgtcacatcggtgctcaaagtcagcctctggctgtggaataaatggcacatgttttcagcctgccattcagggccctctgttgctttttattttcatctctttgtgcctttggcccagtagattatctgatattttgtgaataagactgatgttctctgtctttcaagtctttgctcataacaatcactgtcactatagagcactttcctaacgcgtctcaggcaccatcccaggtcctttccctgaggcatcagagtaacgctagagtaaggaccataaggaagtgaatatcccagtcctgtttgagaagggagaaagctggtgctctgaggggtttcgatgacttgcccaaggggcagaggcaggacgcaaaactgaggccgcctgtccactgtcctcttccatgaccctgtgattttctctccctggaccctcctgtctccatttctacaagcaaagcccgaactgacccagtattgtacccacttcatgcacgccttccaggtgcctgccccctcccagacacagtgagcccccacaggaaggtagacaccttcctcatcccttctccactcttactaaagaatggtttggtcacctttgctctgctgagacctgcccagaggggttaagtatcttcaacaggacagggaagagtagcttattgctaagctgtccccaacaggactggacctgggcctgggattaacaagaaataagtgttccacgagtgtctgcataggcgcttggggcctgactcctacctggcctctgagggcttcgtgggccccagagaggcaggggggcttcctagccctactccaccccatcatcagtctgtggccctctctgccttagctctctagggactgacacaggcttcctggcccagctctagagccccatctgctgcaaaaaccttaagtgccagaagccacttgctgcagatctggcgactttgtgccttcccccaatcctgcacaggcctggtgagcttacctggatccattcatgtggtcatactcccgcttgacgttgaccctcactggctgattgatccactcctgctgtggtgggagggggttgatcttgtggggctgcccgtagtcaggactccccgaggcagtcatgtcggccttggggagatgggctgccgctccgtacgctgagtcaaagagggactggtcgtcgctcaccaccgacagagcctcctgcagggccagagaagagacagaaagcccagtgtcactcttcacccaagcaagtgacactcttgctttgagctggcaaggtggcccagggctgccccaggacagcttgtctggaagttcctgtttgactcacactccagggggcaggtttgcccttatgcaaaccagatgggtgtttgcaggttacctgggtgaggagggactttgggcagtggagtggggatggaggaatcatgaaagtgggtttgtttattggttctgtagtctgggacccccaaaaaggagggtggggatagggaggccaagaatagtggtgacttggcatggaatatagtattgtggtggtgtgtgaatgctagatttttccaggcataagcagaaatgcctcttacgagctgagtggagtcatcagcaatgaaggggagatgagatccagcatttattttccaggcaaggccagtgagatccacccagagaggctaggtgtgctgctcaaggtcacacaagggaagggtggtgcccatggctgtggccaggccaatttcagtttccttatttgtaacagggataaaaatagttttagcacagagtcgataggtggattaaatgagaagatctggtgtgggggtgtagcttgtaagaaatgctcagtggtttgctgagggccctctaggaggtgctggtgcatcctgtagatctcaatgttgatgactcagccagccaaaggacgaaagaggaacctcagacacgtgaagtgccagtcagggcaagaccctccaaaagaggttgttgggtcctcccactcatattatcccatcactgacttgggtgtgactttgggagatcatggattaagaaaagaagccttggccaggcatggtggctcatgcctgtaatcccagcattttgggagcctgaggtgggagaatctattgagtccaggagttctaaactagcctgggcaatgtggcaaaactgtgtttctacaaaaacagaaagagagaaagaaagaaagaaagaaagaaagaaagaaagaaagaaagaaagaaagaaagaaagaaagaaagaaaaaattagctagatatggtggcatgtgcccagctacttgggaggctgaggtgggaggatcacttgagccccggaagtagaggctgcagtgagccgtgatcgtgccattgcattcagcctgggcgacagtctcgaaacaacaacaacaacgacaactaaaaaactttgcacattccggagatctgctaccaatcaaaacatgagggtaagagtctcccattattccatgtctcatcgaatcacaggcatccaaggtcagggaccagggcatagtgttcactacagtcacataattacaccaaagtaagtcttcagagaagatggtagtcatctataattgatctataatctatataatcaataattatataatctataattgtgataatagttgtgataatacatgcaaagtacttagaagtctctggcacatagtgagtcacactcagaacatgttaggtatcatgattattagcattcaaacaaagattctcttaggccacctgttaggggctgccttgtgtcctcacaaaattcatatgctgaagcccttacccgcagtactcagaatgtgattgtatttggagataggacctttaaggaggtaaggtgaaatgaggctgatagggtgggttctaatccaatatgactggtgttcttataagaagagggaatttggacacacagagagcccccaggggagtgtgtgcacagaggggctgccatgtgaggacacagcagtcattggcaagccaaggagagaggcctctgaggaaaaccaaccctgctggcaccctgatcttggacttccagtctccagaactctgagcaaataaatttcttttgcttaagccactcagccctggtatgttgttatggaaaccctagcaaatggatacaccacctttacttgaaaatgtagtgataggtgaacagcacttgttaaagctgggatttgtctaccttccttgtgtaattcacattcctgaattgaatgtcttcttcagaatgaatgctcttcatatgcctgtagaattacaacctgctccatgggctgtctcttgtctcccagggccattctccaccccagcggacagacagccataattcaaaaagggaggctcttctatggctgttttcagctgggatcagggaaaaaatactggaatatactctaggagtcctgcttttgcaccagaaggctttggatggtgtaggtgcctccagacatacattcaaagcagagttgcccacacaatattaaaacacttacatcccccaaccgaggggatctccctagccctaacatctgctgggatccttcttcattttctaccagatgcccttgagtcatgctcagagtaaagctgtgcttgtcagaaccatttgtttcttggttattatatccactcttgatttcagctagagttcagctttggcttcatatcctaaattttgaactgttatctgggctcaaggaattatggttctgagctgaaaagggtgacattgcaacctttcagacagctgtccctgactccatgaaattccttgagctccgcactggaagcagaggacacattaccacctatgacccctaagtgtcttttggtgataagagtgaagaacatgtaccacagtcctgctacaaaaacagatgacatttcaggaatcaggtagcatcttctgctgtagagaatggcttacgttcttagtttatcattcatgaaccttggagtttccagtaaaataatttctttcccttccctcttctaggttgggggagaagatgacagaatatcagaggcaaagaagcccgggaggcagggctgggcacagtgatgctccatagatgggcaaaaagttcctcccatcattatcctaaggagggtggaccaggcaacagggaacacaggattgtcctggccaaggggacatgcagacggcaaaatcaagactcacagcaaagagaatacacagagaacacaaagccagcggttctggaggcagacccaggagagacttcttaaggaagtgagtggtacacagctagaaaaaaacaagtgatgagatagagtgtaggtgtagaaagggcacaaaaccagtttgaactcattttggaatagaagtttccttaagaatgtagttcacaatcaaggaaactccaatcaagtggcaacattgtaggaggagagcgtcccggttcaccgggaatgcctcacacttctgtccagtctgggcatttctctctgagactcttccctccctgacgacccactgacatgctcttccctcattcagtacaccttgtgcgctccctggctggatccagctcccttgcaagttgtgaatactgctgtcatcctgccacaatctgctcaaaaacctcagagagctccctagagatggaccacagcaaatctcttctcagccacttgtcttccaaaggtcatctttgtcccacctgccacacttacattgcacaacttcctcttgctgcaacttgtgtccaattctaactattctcactgctccactagacaagccctactcaggtatgcttctgtgccttaattttgtggttccttttgctgcaagtaacctttctttactctttcaccctgatgcacaattatctttgccattgtgtaaggtaagtgagatcttcctgagagcttcctgtttccatgaaacctttctgatgatgacctatgactcctttgagctgttaacagctcgtgagaatactgctttgggtatgcatatgtgcacacacacacacacacacacacacacacacacacacacacatcccccttctatttgcaatcatggctagacaaaaagctttttttccattacaatgtagagaaaagaagagatagatcatgggggctgtgaagagagagaagatgaaggagaagagttccctgtctggctcactgggctgaatttgaaaagccaatatgggcaagggaagggaggtgagggcccctaagtggaataaaagatttggggagataaggccccagacaagctgatttgagacccaagtgaaagagcagagttggggaggagagcattcttgtggcttctgcaaataaacggcacccctttttgcagttcaacagctttaggagcaccccaagaccatgcccttggcaagtacactgtcatttttatgatgccactggtagtagggagccctctccaaattgctctgggaagaccagagtagggacggaggaggcaaacaagaggaatgagtctgggcaacttgatgtggctgctgctgtctgcaggcgaggagctgctgagctggcagaaatttcacttatttgcagcttgttacacatgaggagctgttgctacttcatgtgtgtcttataaagctctttacttaaactcttaaaactttttaaagtttaaacttaaaactcttccttgtacttcaagctctttacagaaatgagcatgttgctagcgttcaagaactttccacggataaatcatcaataagtacttaactgaggtgataggctgggtgtaggaagaacaccagcatgcaaattcaccagccatcctcagagggactacattccttccgtttctcatgactttgcttctcctattgttgctgattattttattcaagggaagagaagttagttattatttaaaagacttgtggggtccatgaggctttagaccatgctatgtaaaattgacttccaagtgagaaagacaggaggcgtgggctcctagccctatgtggggctcagctctggggttccttcttgacccaacaattgtctctgtaaaaggaacccctgggctggcttagtcattggcttctgagaagcactttcctttgcagaatgctggaaaggctgggtctgtgggtccagagccactgagtcctagatccagagggtggcatagggtcccttgttccaggcagggaagtgccccagcacatttgtacccaatgatgcccctttaccagagacctctggcaaggcaagctgcttggggtggcatctgagctacagcagatcactcacatttgccgatagaaatgcttgctttccacgaccccctcctggtcctggatccagctggggcctgctaccagtaatgcacttgaaccggtgggatactttttctcctccagtttgggcaaggtgcctttagtacatgatataatacaccctctgtcgtcgttacagaaaacagataaaagtggtaataatcacagcacttattaaatacaaaacactgtttacatgagtaacctaatttaatcctcctggcaattctatgagggatgtattctattttttcagatgagaaaatggaaattcagaaaagtgaaataacttgctcaggcacacagaaagttagtgtgatgtgggatccaaattcaggtctacagcctaagcacataaccactactcttcacaggttctttcttgtgaattttctgtcctctcaattagaccataagctctttaagtgtaactccggtgtttattgtaacttagagcataaatcttgagtcagagagatttgagtttctatccaagcttcatctgctgctcattacgcatctagtacaatttccaagaacttcatttcctcatctgtaggttggggataatatcagtacctgatctggtaattctggataaagataaaatgagataatatgagtaaagtacctaaatcaagcacctgaagttcttgggacaaagtaaatacttaaaaatgtggccaggcatggtggctcatgcctgtaatcccagcattttggaaggctgaggcgggaagatcatctgaggccaggaggttgagaacagcctggccaacataatgaaaccctgtttctactaaaaatacaaaactcagccaggtgtggtggtgggtgcctataatcccagctactcaggaggctgaggcaggagaatcgattgaacccaggaggcggagcttgctgtgagccgatgtagcggcacagcactctggcttgggcaatagagtgagcctctgtctccaaagaaaaaaaagaaaaaaattgtttaaaaagctgggcacaatggctcatgcccataatcccagcacttttggaggctgaaccgggtggaatgcttgagcccaggcattcaagaccagcctaggtaacgtggcataactctttctctacaaaaaaaaaaaaacaaacccaaaaaaaaaaacccacgcctgtaatcccagcactttgggaggctgaggtgggtggatcacgaggtcaagagatcaagaccatcctggctaacatggtgaaaccctgtctctactaaaaaaatacaaaaaattaaccaggcgtggtggcgggtgcctgtagtcccagctacttgggaggctgaggtgggagaatggcgtgaacccgggaggcagagcttgcagtgagccgagatcacaccactgcacttcagcctgggcgacagagcgagactccgtctcaaaaaaataaataaataaaaataaaaaataaaaaaaaggtgtggtggtgtgtctgtggtcctagctacttggaaaactgaggtgagaggatcacctgagcccaggaggtggaggctgcagtgagccatgatcataccatccatcctgggcaacagagtaagacagtgtctcaaaaaaaaaaaaaaagttaaaaaaaattttaatgaaggccaatgctgagaaatggcgtgagaaccattgggttggagatgggtcaagagggagttcagataaagccagagcgatacctacttctccgaatgttgattgtttaaaagattagttgcctaaactactaataagtagatttggtgatgatagagcctgaaatgcaaatcccatgggctcctagagtacagagccgatttcactaatctgcgtgtccactcttcctttaaaaccatgggtgtcattccattgcaggctcagtcctctgcctgtctctggtttctgagtccaggcctctaggtgccatagataaggctctgttacatagcctgaatagccctgtgaatgaggagaggaggcatctgttgtgagataatgaaaatggtaggtggctagcacctatttatactgttgttcgtacaccacatactcagtgaatatcagaagaatggcgtgggtacatctgtgcattcacgaatttaaaaatttcacttattttggaatttgtcacatatgtgtgcctatatgcatcttttcttgttatacttacaaatgtgtcttccaacatttgttttccttagattaagtcaaatgttacttttcatgtgcacatgagttgagtgatgggatgtgatcagagcatggccgcacagtggcctggccgatatgaacgatgagcaaaccattgcatcttcaaacagtctagctaaggccgagatggaaaagcctccagaggggcaaggaaagaagaagagggtggtttgagtatctccccatttcactcgggaagacataacagaaatttctgccattatcctgtgtgtgggaaggaacaaatatttcacagttatgagtccagtggagttagaggaggaaaaatgccagaagtggacatgagtgggagaccctttccctctgttcttccttatacgtaggctgagctttatttctaacacagaatgacccaagacatggggcctgagaagcaccaatgtcccattgtgtccttcccattcctttccctctgttctgccctgaatctcctaaggacagttgtctggggctgaccagcttggctggaggtgtctggtgaaaggaatgtcaaaagcaaccagaccaagttccctgtggctgccctgctcagtgggcccactccgccgctcccagtgcagggctctggaaggctaatctctggcatatccattacccagggtcaccacagggagcacgctagttttggctttttattacattatttgcataatgacacgaagtcccttctcttgccagtcggagagaatatgaaatgcgaacaagatacttaggtgcaaagccctctgtgttctctgctttgggaaaccagcaggctctgcagcagtgggggtgatcagcctgggttggggtcactccaagtctcatctgaagtgccaagagcaggtggccgctgttagcaaggccaagccttttgcttctctctcctctctacatgtgcgcatttcttgctcctcatttccactgcgtaaagggcagggagggaaaagggaagaggaggtaaattttatggaaagttggataaggaagaaggtgggaaacattagtcagtcatcaagcattaactgaaaactcctttgcatgaggcacagtcgcattttctcaaaatgaccatcagaatatttcttatctttgcctctctcttcccatcaaaaggcagagcttattttcttcccccttgaactcagatggaactttatgattgcctcaagaaatggccttgcgtgacttccgggacaaggtgataaaggtattatgacttccacctgcttcttgttctctcttgggcctctagtccgtggaaatcgccaccatgctgtgaggaagctcagattagcccaagctgagcaaccgtatggagaggcccgcaggagaggaaccgaggccacagccaaccacagcgtcaacctccagacttgagagtgaacgagccttcagtgaaggataacaaaactcatgagcctaataattggtttatgccactaggtttcggggtaatttcttatgtagccatagtaaccggaacgtctccgagcattttactcagcaaccgaaaacccatattcaaaggctgtagaggtgactgtctgagtatcctttcactgtggttattgacactggctggcaggaatcagcaccatgactgtccaggtggggaaactgaggcacaaagcataacccttctaggttcacacagtgaggggggaatcgatctcagaattaaagtctaagtcctctgatagacacatagtggaattatctccaaacgacaaaaacaaaataaacaacagacaaaaaccaaacaaggaccacatttttaaatgagaacgatcaaatagaacatgtattatttgatgacttgaagtttccaaggaacttttactatcatcacctcatttaaccttttaaaatatgagttaggatcctcatattattgaaaagaaaattgaggcttaaagaggtttgctacttgcctctggcccctcacctcatgagtctccatgctgctggcctgactgcaaagcttctactcctcccctaaaccgtttccactttgccgtctccaattttaggccgtagcacacagccaaatctgccacagagcttcagagtgtccggctgacttttcttttctttctttctttttttttttgagacagagtttcactcttgtcgcccaggctggagtgcagaggcgcgatctcagcttaccgcaacctctgcctcccagggtcaagtaattctcctgcctcagcctcctgagtagctgggattacaggcgcccaccaccacgcccatctaattagtagagacagggtttcaccatgttggtcaggctggtctcaaactcctgacctcaggtgacccacctgcctcggcctcccaaagtgctgggattacaggtgtgagccaccgtgcctggaccccggctgacttttcaaggagtcttgttgaacatcattccccctcccaagtgcctttcccctttcacttacaattccacttcctggggagggggctcagcagtggatgacccagagaaagaattcctagaagatgcaattgcaattatttgcagacgaaagtactttatttaatggtgttttacaaatgaagggtatagcctaagtgagcacagagaagaggatctctgcatcctcccaggactgtaccctgtaacagaatccagagccatggccttctgtgcctcacgggcctcccgttcagtgctgctccaggtctcccgtggtatttacctttgcctgttgactttgagtgttcacagtcacttttttgaccataaccacatttaaagggcatctctaaagatcaaagttaaattctcctcccacagagaatgcttttactgctgaaaagcaaaaagtgctgaatatggaaactcacaggatgggagatagaacattcatctgaaccccacgaagagaacattttacagtgtgttttactttctgtttctttacactgggtctgtccactgtccagtggctttttctagatggcagtgggaaccacaaaagggtcggcaatgctctactgggtgtaattcttcacacttgaccgtccgggacgaagctcctctcagagaataaagtagggggtggcctgaccattaaagtaggtcccacagtatcaaagggacagcgcaaagcaaagccagactgagatgttgagacttactaccattaagcagcttagatgttctcttctgtaagacggagccagtattctcccacctagccggatgggtaggaagtattaaatacaggcctcactggagcaaaggtgggatgataaaaatggaagcagcaaccaccacgacaaaacccacatggcatgggagaacctgcagggagggctgcttctgggaaggccacctggatgcaccagcacaagtgctgtcccacatacttttccctgggactctattccgccagatgtcactggagtggctgtacccgtcatgaaaaatactgcagcacagccacacaggtggataaagtgctgctgcgctgagattcgtcatttccctcctctgctctgggacaaagaaagggcaggtgatgggcaccgtgtctcctccagaaccctgcttcaagacaatgggctgctgtcttgcagcccgcgccttacagattgtcatgatgtgaatgttgtccctgacctggggaatggtttcctgatcccagtgatggtgccgcctgaggatgggtgaagatctggaccacactgggagcagcctcttcctgcagaggagccctggccatcctggctgcagatggggtcaaaaggcagccaatcaccacactgcttgcttcccttcatggacagctgctttaaatctgttctaacaaaaggcactggccaccagctgggtcaatgtggagctttattggctgtgcaactttgggcaagttacttaatctcccagctcctggacatttttaaccatcctttactgaaagtttcatgctttccgatgatgataaatggtcagacttccctgaccaccaagagctgaaagtttggaagaaaagcttccgtggggagtgactgcagtgcttcctcgtggagtgaatttcacccactgcagggttgaaatagtagcctgggagccaggatggagttccggagctttcctattgcttgagaaagaggcttctaagaatgtcccttgaggcctggtctttatgggtctgacctggcagctagaccaagaggatctcaatctgggtctgcagggacaagagaggactctgcgtgacaaagggaaggtgggagtcagaacattcagatcctaaaggatgggctcccacaggggaagcagaggcttgtccaccaggggtggaggcggcaggttctgcagtttttctaagccttgaggagaggaaagagtgtggatggcatgtgcccttggttgtctcttcgattcctggggtcatgggaactttcctattctttttctcgaggacaaattctagttaggcaccctgaagagaagaacctcatcagtctgattcctggttttcatccccagttgttggcacacttcctggcacctaagaagtgtgcaatgaattaagttaaataaaaacctcagcgcccgatgggaaatgcaaaccctccctgcctgcccacacctccacaccagccagactaccccttctatctttgcgctttgagtaattttgatgaagccttcccccaaggcttgcctaattttcttttaaagcagccacacccagtgactgtttcttgttcaaatttaaacatgaagccactgaccactttccccaaacaaccacttgaggtcctattcctagaagctatgatcttatccgacaatttcctcacgtggcagttgccatggtaaccggggcccttacaatcacagggagcccacgaggaaacatgcatatgggggggcttcactcccttccagcaacacccagagagcagcctggcagggggacgaaggcaaaatcagccttgcgaagcaaggacgtcctgcctcacgcacacaagccgggacgctttgtgtgactggcagcagccagaaaagaatgccgcttcaactcgacgcacagatgaggcgtgcatccattttatttcgtttcctctcagggcatggggacaggggagaccctgaatccgttttccagctcttaatggccgcttcttttccgtgattcacggctgagccatgcttggtgacctcaggcccatcaagtcaggaagcaggtcctgagggtgcagtatttccaactagcacatctgggtgaactgctctgtccaaggtgtttagttcttttgtggctcggggcatatggttaccatattgttgctgtgacatgtggcagaaaccttgtggatgggagtgatggagggaggtggggcctggggaggtccattttctgggagagctcggcagccagggccgtctctgcgcagttcctgtgctctatttcattctgctcctcctttccttttgtgttctctgttcattttccctctgtcaccttcaattgttctgccctgtgctcccatgccttctctttcttgctcaacctcctgcattttaaggtcctatttcaaatagtttttcttcttgttatgtaagactcccccacctctttctcgcctgcactcttaacctttggaggcatatttaatgtacatttaatatacatatgcagcttcacctgcatagaattgcctccctgtcttctctgcctaatcatatctcattcattcaccaaactgttgaacacctcacattctgcctcctccaggaagtctccctgctcactccagcccagcataagaacctccattctgctgaagtctgttggcaccaatttggcactttatcttagactgccttgtcatgttgcttttatatttatttaaccattgccttccattgttgtttttcatagtttatgttctatctctcctactagattgagaattccccacgataattttctttgtgcttttctgtagacatgattgccacttactagctgagtgaattggttctccccttatccataaaatgggcacaatgacagcacccacagggttttgatgtgagggttgagggggctctccattctgctggtttgtgagaggtacagtctgtcatctttgacatgttacccgcagagccagactgtcaggatctgaattctacatctaccacttgccagtcttgtgaccttggacaagttctttaatctctccatgcctcagtttcctttttggaaaactagcgataataatagtgttctaactcatgcctatcacatagtaagccctccctaaatgtaatcatcttattataattcacaaattatagtacagaaaaggcactttatctctctgggcttatttctttacctactacataaaaggactgagctacatgatccgtaagatcccttccaggtcttcaaccctaaaatctattagtggagtgattctacagcccctttacctggaacagttccgctttatgctgttgttccaggaaatgcttatcccgctcaaaattatcccacttttgttgatgcattatatggccactctgtctacgagtaagctcagataactcagtgttcatgagcttcatggccccattgattgtcatctttgctctcccttctaaagggaatcaggggaactgaggacagcctggtctctacacgaggagccaagcatcctctcatcacagagctcagactccctctctggtgcacagctggtccctccattggcagctaccctggagacagtcactgacagggctggcctacatcctgcttgactggagtgctaagcctggacagtccagcacaggggtctcctgtctcccggcatccatctacaggaaaagtagatattttgtgaacaagtcctgctgtggtcctccaaagaaaacatttcattgggtttacctggagatgttttctttgtcaagctcagtaaagctagctgagcagaaaacccagctaaaacccacggacagttcctgggggcttgggactggtttagttactccataagggacagttagtgttctattcttggaagcttctggaggtgccaaccttgcccaacagagccatgcctgtctgtctgtctcaaggacatgtgtcttcagggcagggaggctcaatctccacattataaaaacttgtgggaaatggataattaacctaccaggtggacatgccctgagatgtcccaaaccgcctcaaaaatttctgagctcctttgtcccgttcagttccattttcctcaggatccattgtcaaagcctgccaagtggtcaagttctttttttttttttttttttttagagacatggtcttgccatgttgcccaggctgaagtgcagtggcatgatcacggctcactgcagcctcaaacttttgggcccaaggaatcctcctacctcagcctcctaagtaccaagtagctgagactacaggcacacaccaccatgccagctaatttatttttttattctttattttttgtagagacagggtcttactatgttgcctaggctggtcttgaactccttgcttcaggtggtcctcttgccttggcctcccaaagtgataggattacgggcatgagccaccatgtccagatggctcccagttctcgcactgctacttccacctggttttctgtgtgattgagatctcccatgttcattataggttggtgatgttcatgagaaacccaaagtcaatgaagccagtgaagccaaccttctcaaacctttctctcttgggaaactgtgagagcaaaatgtccatggggaaccttgtggtcctcttgcttcttttaatcatgaaccagaaatgctctcaggtataacatcagcctgaatggcctgtaaaatgtgctgacgattccacgtaaaaccaacaaatgcatactcgtcagcatcaatcttaaaataaaatcaggatcaagaaacaaaaacctttacctaaacttcttattcatttccatagaaagaagttgaattctctgatttggtccaggggagatgactgtgacgctggcactgttctaaaatctgcaccatgcaatgcagaagcaactcgccttgtgaggctattgaggacttgaaatgtgtctggtgtgactgaggaactgaatttttaattttagtcaactttagttcatttgaatttaaaaagccacatgttatgagtggttaccatcttggagagcacaggctgtggacacttgtgtttggtgaccagactatgtgctcctcgaaacatgcaaaggtcactctggatatttctttaacatgtcttgtctcacaatggggccataaaacagatttgtcacacaaaagaacactcattcactgatgcattcattaatttagcaaatatttattggatatcttctatgtgctgggcactgttgataaaagccaggaatatgtctatggaaaaatgatgccatcattttaatggcgttgttgatgactatgagattaggagaattgtgggacttttcctccatggaactggctaagtttctacagtgagctaaatgggtgaaacgcagattattatgggaatatgcatggtaaccctggacaagtgagtagctgcggcaaacctgctgtgtaaacacaggctgtgcacacagatggggaagtgacgacaggaaaggagaaaagagtctgaattaaatatggtaggaacgatgctatgtttgaagcttagatgaaataacaataaggtcctcaaaagcattctggaaagcacatggcatttacaaatggaagcagtgcattgtcaccgtcactgggagctcccgagacagtccaggcacaagcttccccagcctcccccactcagcatcccagaaaccaaccaagcaagggagccattgcctcaggagaaggtggcagaacttgaagtaaagaggtggtgcaactggctaccaaggaagggatttcagaggacaggaaagccgtgaactgagcaggaatcggggggaggggcaaaggcattaacacttcattggctcagggactttctggtcacagagagccagccaggacctcagatgagccttttatcccctcctctgcagatcacacagcaagaaggagaaggggacacaaaggcttgactgtggcactttctccattgttgtggctctcactgcagggtcctgaaacacccattagatctggagtcctctggaaaggcgggagagagagtccacagtaagttgcccctgcatccggactggctgggggctctggcctgaagagtcaccgtaggcagaatgactgtgtcttattttatttatttatttattacttttgagacggagtctcactctgctgcccaggctggagtgcactggcacgatctcagctcaatggaacctctgcctcccgggttcaagcgattctcctgcctcagcctcccgagtagatgggattacaggcgcccatgaccacacctggctaatttttgtattttagtagagacagggtttcgttatgtttgccagcctggtctccaactcctgacctcaagtgatccgcccgcctcagcctcccaaagtgctgggattataagcatgagccaccatgcctggctgagtgactgtattttaaaccagagcttgcagactgtgggcctttagccccttaactcattgctggtgctccttaaatgtcaaacccagcctggggatgctggcgtgccaacgtgcctgggagctcttccctttttccctctgggttaacaacaacgttggcatgagaacgggatctctgtggctgcaccttctctccttcctcatctctccaccagccttcctttctgttcacctagtccccatccccattagcaccaggctgaggcccaaacatcatctaagcaaccacctaccaccccaactctaagaagtggcctctgagctgtaggggtgtacccctctgaagggaggaccctataatactaatctactcctggtctgactgccaacattgtctgatctaagtgaggaagagctgatctaaaacattgctgtcataacccaaagggattactgaactgtagtttgggcggggcttctccctccctcccagcagactaaccctcctacttatttttaatttaagctaatgtgaaaatatttgcattctctgagcatgcagaaaatgaaccagggcaagtgggggaaaaagtggggagctaaaagtatgttggaaccatgattaggccagcctaggagaaacaaggttgaccatatttatggggtctcgttctttggcgagccaacagtgtttaaggatttctctgacttaattacaggactctcatgggtcatgacttctgtaaccaaatgttactttgaaagggaagaagtgaatagatagaaaaggttttgtctttagacaccataatttgtcgtgacaacatttcctctttcaggcccgtgtgggtccctggagagccttatggagtgcacctttcaggttggagatggtctgatctctctctgtccatgtacttgtgcgtatacattcccaaatatttatttcactaggtagcttctcttccaactcccgctacaggccttagggtttcttgggagattgctttctgcgcttatggggcagagatgtggggtggaagttggtgacaaggagacatctattccctaccaatattagggcacgtgaaccaaggcccatgtgtccctcacacgtggggatgagagaccttgccagtggctctggccaggcctgatgcggctcagacgtggccctttgctcccacagctagaggaaaatcctgtcaaaatgccttaacgatcttctaatatttccatgcaattaaggccacatctgtctcccaggcccccacactcctttgctggtgcacagacatgaaccaaacagtctgtcttgtcgatctggaaggtaacaaagagctccattcataactgtaggcactttcaccatttttttttcgaagtaaaatagagttttcactttgagaataacctgtgtggcaagcaagcgaaggatttttcccccctaataaatcaaattcaacagcctaataaaatgctggctccccctgcccacaccactgcctccctccctcccactgtcccactctcagccaacaatccttgggaatggagagtagtgggcagacccaaaggaggtagggaaggtgagctgggagcagatgaagtgaattaaaatgccttttgaaggctcacgggcttgtttggcagattaaagactgagatgggtggggcaggggggttgaggggtgggggcagcaggagcgtaaggagtgtgcctttccctttccctctctacctactttctcagcctttccgggcttgttttaaaatacttgttttcttctcctgctccctctaccccacagctcatccccataccttcagtaaacctgctgcttcctttttttgcatggggaagagcaagagaaccacgttcctaagaatggagcaagtgctattgggccacacctgcagctgaagccccggggaggagtgcctgcctgtctcctcagagcaaggctaagagatctccctcagcctttgaagcctccagagagtgagtttgcaggagataagtgctgataaacatcgagtttggtgcttatccgcagcaaacatgatcttttgaggttctctctgcactcataagccatagagactctaatcagaaaacagaagggaaaatgcaaaaccaagcagtatttgctgctgatttttcttcttttttgttttgttttgtttcggtttacacactgaaaagcccaacatagatactgtcatacaagagactccagagcagaaatgtagccctgggtctttgctttgcttgggttttttggttctgacatcaagggaagatgtcttcacagagctgcacataaaaaggatgggctggacactaataacgacgacacctgcatccagcattctcctttccaaagcgctcttagtcattgcattgtctggccctcatggcaactctttaaggtaggtgggacagacggttcacaggtaaagaaactgcgcctgagctaggatatgtgatttgtccaatgtcacacagcttgaagtggggtgccaggagtaaaagccagatctttctggctgcaaagctgggctctgttcacgctatacaatgcagaggctcagcagctagaagataaccaggaatcaaaggggccttgaacttgggtgtcccacctggaagcatttggagagctcaggcggtagtggatgaagtcaggtggagagggcttcgggctttgcatcatttgagtaatgagagaaaggtgaggccttggttgtcttgtatttcaaggcattgtttatatcttatttcttagctatgggatattagcaaaaagcagatgtggaagatggagtgtagagtagaaacagcatggagccagaggtccagggttctggtctctgctcctcccctgcccaggtagcgggtcttgagtttcagtattttcttctataaaataaggcggatggcacttaagtcaggagagcagggtgacgttaaggggagcatggagaatgtttgctcccctataaactcattcttctaaaattatactgtaataatgacaatattaaggtaaaaccttgccatgacttgttaaggctcaaacaatggtagaacctcgtcttgttgatcccttccagcttcagaactcaatggtattgtcatgggagtcttgaatttggggaactgctgatgaccatttaagtccatagagataacaggctatttccacacaggttttgattaagcaatcctacttctgacagccaagcaagcccttgatgttatatatcataagctccgagcatttgtctgcaggtagatagaaagtgaaccttccacaagaacctcacaacaaaagtaactggaactgagcccaaaagaacatttcctaaggctaaaagtgacatcattcacataagctatcttaggtacctcaataagccctggatggccatttctaggatgggaagtgagattatggggtaccctgaggcaagagggcttttcctcgatctctatttaaattttctacagaatacattcatgcatcatttatttcatttaaaataaatttttaaagataaaggaaaatagaaatgtcttgttcacagatgagttcatggtttggagacagagctggactacattcttgacaaagatttgttcaagttctagaactcatagacattagagaggaggaccatgttgaacagagctcgtgttccggtgtggtgggggctgtgatgggagacgcatgccccatatgtgtctatcattcaagccttgtttgtaaaaaccctcctttctgcttcagcgtttgtctttttcagctcccagtgaaggaggcctgacaatagtgtggtgaggtggtcagggaactaacccattttacagatgagggagtggatgagcttgcaccctggcctcccctactgtgtcctgctcccactgagccctgccatcccttccatgtagctagctggattcaacaaactcagtttgaaaaagggctttccgaagtccctatccacttgagttagatctactgcagaatactgcctcttgagcactgaaagatatccatattctttcacagaaatatatacatctttttgaaaatgtttggttgggtttgtggtcggaggcttggcatggttgtttgtttgttagaatgtgcctcctttgggaagaatgcaaaccaggggctgtattgggatgctgagtcaggctctgccctcagtgacaaggggtctttgtcttgttcatggttctccccacacacctgcatacacacagatacccacaaaagtgcattttgaaaactaataaaaattgcactgaaaatatttaacttatgcaaatactactatagcagaaagtacacacatatacaaaacagcagctatcttttctagaatctgaacaaaattttctgttgattatatatacagaatttgctgaacatttgccttgggaaaccaataaacaatgcagttattggtccactgtcagcttaggcttctgttttgagatgttttacctatagtggaaattgtcatctgtacctggcatgtttctgggtgtgtctaaaatgagcatgtctcaagaaatctttccaggttcctacattctcaaccaaagttgctcaagtgagaaagcaactcaggatatcaagctaccagttagaatttcaagtatgacaagcctgctacaagagtgtatcttatctgtggcctctagggtttcagaagccagagggctcatgctaccgccaaaagctgtggcttaccaactcgtatcacccctttcattggaagtttcttaagattccaaaatgtgagaattattatcaggtgttctttgtctaatgatgtctgattgctctgcatatatgaatgaatgcctacagctcttcggaaaggaaagcaaagaataatgttcttatgctgggcgggggtggagggtggggacttagggggtggttgaatgttcagctctagtagcttgcatttcctgtttagtgggtgtgaggggtttacacaagaaagtctcagtgttacgctagatggatagcctcatcgatcatgtctaaggaatctctgcctaaagatgatcaatttggcctctgcataccacaaggaggtttcagtatttaagaacttcgggatcaaccatgtcctaattctagatacgtgtttcgattgtcttgtcctatttgttcaaaattcccttcaaagttaaacaatttatcaggccagctcataggacccttgaaggaaaatttgaaaaacatcttattattctaaatactattttctgtttgcaggaatgatatgaatttgcaaagagacttggcatctaaaggtggggggaggctcaggaagccctaggaagttcataagaactttacaacttagtttccaagttcagacttctggttcactcagctacctaggccatcatgggtcacacagctgtgataaagttacctttcctatcttatctagacatctgataatgtggataatgtgaggattatttctccatcatcaaattgatctctaaaggaattataccaaacatacagtcacaaagttctcccaaattggtgatcagctctctgaaaattaaaatcaaatggtatcttaggaagtatgctattttcttagatgtatccaaaccttagaaataaaaagcccaccttaaatccatcaatacaaataagcgataaccatgattacttctatgttattatacaggactttaaatatacactgaggtgccagaacaaagtcctaggctggttgaattcttgtgtccagctccatctctgcctctgtctctttttaatggaacaggcagatgatgcattttctagacttatttcccctcattttgttgttatcagtaataataatgacaaggaaaattgtagattattttatagtttaagacattgatcttaataggagccttcccacatctataatcttatttaattactctaataaactggagaagaaggcaggattattcccctcccccactttgctgatgaagaaacaaaggttctgaaggactacgttcgtggtcataaagcgggaaggggaagagtgtgaggccaaccctctggactcccttccgtggggccctttccacgaggctgcactttctcagctgcattctttgcccacaaacactacagcaattagtacatttatttttccatattgatactatttttctttcccttttgatcttgcccctttggttagatggtaggcgattttagggcaagatctttatctgttcgttatttaccgtttgaactttcagtgggctcattaggggtccagggacatttgctgattgatggcatgcactggacatgagcctgctggctttgacattttaaaactgcacacttccctcagtgacagtatgcccaagcaacaggcctccctgacattttctcaaaaccaggaaatgaaactggccaccaagagcaagtgaccgccagccagggcattggtgcaaaccaagcaaaacacaccacagtgcaggcagcgcgggtcacaaggatgaaggcattcgatctgcagttatctttgaagaaatgtaacatgttccttcctcccaccgtggtttcagccacaatcatcctcctgttttaaacaggttgaattatgttcctatacaatatttgtacacaaaacccaaccttagacatgcttttccctatgatcttggtctctgcacacgcacgagaatagccttcttccatctgagtactcagctcgatcctgcttagcttccaagatcagatgaggcacgttcagagcactgtggacgtggacagcgcagcctcctccaaacgttttggctgaattggaggacaaagcagggctgtttaatatgcaaaacatctttttctcgcattttcctttctatagcttcccctgtttaaccacccctctccacctcgcttttaaccaagtcaaatctttggcaaatggttttggggatatttttcagcacgtggtagcaaagatattttctgtctgtggcctcggagcccctgggcgctctggggaagctgccattgcacaggtagcagtactctgaacccctgcagctcagcagcaagccccggtcataatcatgtgctctgtcgctcctctcctcactgtgctgattgcagcccagataggaggagcatgtgggagctgactcctcactgaacaatgacttgagagagagaaagacaagaacttctttgcatatgaatgcatcaacatgtgcctctctgggtacctttgctccatgtgaaaggaagggaggcagccaaagtgacccttggctaattagacaaaggcagatgggcacaacagagaaaacttctgctggatccagtatttgcacagcttcagggactttcagcgcacagcatcttatatcacacatgcataacattcctgccaactgagtccaaatggcgaatgtgatctttgtagcttgacctgtgacacccaacaaattctaggcaatggttggatttgctgtctgtgactcactttgcatgtttccattatttttatctactctggcccactaacttgaccgtgttcactcagcatcagccaggttctaaagagtgaggggaagctgagaaagcttgaatggcggagtgtgtagagctactgagatgcttccgggacaccagcaggacactaatcctactagtttttctcctagtgtggatcctggacttgctgcctcaaaatcacttgaagtgttgttaaaaatgaagattcccgggaccattccagatccagtgaattagaatctctggagctggagccgaggaatcagcattctttacactccccaagggaattttgtgcagatgtaagtttcagagccactgagttaggtactcagtgaaaaaaaaaaacctcttgcaatcaaatttgattggaaaacgctgcagactgcattgtgcggccctttcccttggagcttcaggatctccattagtatattcaaggctctgataagtcctgatgcaaagagacttgtttaagttcctttgaatttcccacactcagttgaacacagaatcctgttttgagaaagcagctttgagcatcccttggacacatttgagaagcaatgagatgctttagtaagagccactattgcaagtcgctgaaggactctacttctctagatctgatttttcctctctttctctgccacaaacctcccaaacaattgtaaaaggaagtgtgcttctctgggcaaaacaagggcatgtcaagcccaagagatcatttacttttttctttcttttttggtaactagttggttttttagaatcataacttgctttggttatgtgttggaagcaacgaagcatattcctctcatcttaatcatttttgtgtaaatgtcatgtaaaaaagtggggctttccttgacttctccaatcccaggcttgtatctatccggccttaacgtctttctcagagcactctagtttttcttcataatacctaccacatgtataattagatattcacctatgcaaaagtgtgatttgtgtcgctctcccattggactacactcaatggaggcagggtcttcctctgttttgttcacctgtgtccccaaggacttagcacaatgcctggcagagtatgcactccaaaactatttgtcacatgaaagactttcaaagtttttatttagcagcccatatagaacatgagagtcaaaatgacatagactcacgttggttctgtctgcccatcagaatttcctgaaaagcttttttaagatgcacggttctaccttagatgtcctagatgagaaggggggaagatagctggagaataatctggtactgattggctgaatggatggagaaagaagggaaccagtgaatttttttctggcctcttctgctataggattttagacaaggctcagcatgctttggtgccttaatttatttcactgtttagtaaagctggagtcacatttaccactcatctcttctccaaaattgcatgacatgtctagttaagcaatttttgtttcttttcttttcttttctttttttttttgagatggagtctcgctctgtccaccagcctggagcacagtggcacgatctcggctcactgcaacctccgcctcccggttcgaagtgattctcctgcctcagcctccgaagtggctggaattacaggcgtgtgccaccacactaagctaatttttgtatttttattagagacaaggttttgccatgttggccaggctgatctcgaactcctgacctcaagtgatttgcccgcctccgcctcccaaagtgctggattacaggcctgagccgctgcgccccatctacttaagcattttgaaatcttaaaataggagacggttctgaggtcaaatcacgatgaccgtttctagcatgatggcttttcagcacatggctatgaactttgggttttgccaaatgatttttcatgcaagttcactcaggaagggtttttttgtttgttttttgttttatttttgttttttgttttgtttttgttttttgtttgttttttctgacacggcccctttaacagaaaaaaaaaagggctgctcaatttgttaaccaccctttcatacttgacctcttgttttgtggtgcaaaagttacacgagcagaccgttagacaagcacactggctcgctggtgtgttttgcaccatctatctgcagccaggcaacctgtgctcagagaagatgagagcaaactcaccaacccccccacatttaggtcctaagggctccctgcccctgagcagtgctggggttagtccagcccaggtcataagcagcacaggaagcagagggcatggctaatgtacatgtcaccgtgtggcttatggtcacagcctcaccctaccttcaaacctgtgcaagctgcaagagcaacaggaaacggccaagcgtctatatatagccacattgaacttatccaaaggtgctgttttgcacagattattatgaacttctttcacggggagaggacatgatggcatgtgccttttcctcaggacctctcgaagcacttgtaaaattaactactccacctgagaaggaagaaggatgttacaccttttggtttcttcattttcaaggcaaacagactggtgccttttcttttgcaaaagatttccggacacattcagcaaaggctaagaaaggatgggaaacggcaatggaagcatgcaggatttctgtgagcctctaaatacagcccattgggaaaaccattcattccatagattgagtttcccttgaaaatcattaattagtctttgcttctccctaatacatttccctggcaaataaataaatacaccccttcgtggtgtatccatcacgcagcccttggtgtagctctcccaagatcccaagaggcagagacaaaaggagtgggtgtcagggcttgaagggcccagcaccacagaccacctttgttctcaaagggaagccttcaaaaagaaatgaaaacatgtgtctgttccagagcccttctttactgctttggaagtgactttctgggactgccagtgtatttatcagcattctagaatagaatgcatgttcttgatactgagcctgactttagtagcaccgatttgctccttacccagctcttctccctattgagtaagcacagaaatgaataggatgagcagcgcagctactgagaggctgacccacaaaggtgagcgtaaacgtgtggcctacacccgcagtctgggtgacctcagccaattaggaaacctctttgagattccagttttcatctgtaaaatagggttgtgaggatggaatgagaggatataagtaaagtttttaacacagtacacacttaacaaatgcacaatacaaggtaggcatagtcaaggtggtgataatatacaaatcagagtgggacttgagaacagaaagaatccagatttcaagattttcgacttttctgtttcctgaaacttcccttgctaactcagttggctagctctggcaacatgaatgaactttgtgttctgatattagaaatgtttcaaggtcaaatgccagatcaacatagtttcctcagagcactccctaacacagggccacttaatcaacatggtgcctaaaaggtgcagttcttctgttctgaaaaggcattaaagttatagaattgcattttgaaaaaataagcatctctttagcaaaaatcattctggagaacaaggtcaaaatgcttcccatctccacagtcccaccagccagtacctgggacatgctcttccagcctggttctcaagaaccgggctcttggaatggggaaggagaggtgaatgatctggttgccatccttttaaaaaggggtgacaggtatgtgcattgatttagtgtacatgacgactggtaaaaggacaccaaagggagcaaaaggggacctcagttgtcctgagtcctgagttcattctggagcctgcttggtgcactcgtgtttcccccgggcagtgccatatgcctcacatacctccactctgatccttttcttttcccacctctttaaatgcaaagcatcgccaaccattgttcagtctcatcactgaaagctgaacacacagtggcagaggccaaagcctgtggctgtgtgtgcctgagattaagacttttatctgatctttgacaacttgcagaggaaatcctgttccaaaactcacagccctgagagaagggttgccagcagttcttccctcccacctgtgagataaatcagggcacttgaaatgcgaacatggttgataaatataataagcttgcctcctctcgctccattaatctctccccctaccttttttctttgaaccatggagcacaacaaagtctcttggcagagccgggctgggagtcctttgtgttgccctcgtacacatccgattacaaagcagaggtgcctagcagaagaatccctgcagctgaaactcaaatgaccgtcctgtctttaggattcacgcaggagctcagccagctctttctaaaccgaggcagacacgggtagctgtgtcatatctgtgtagacccaaagtggttctcaactccttgagtcaaagaacatcaggcagaagggtgtgtctctggcggttggagtagaggttgcaaaaagttgtaggttcctctcatttccttcaccccacccttggctaggggactaattgaatgtggttagttctagatggttcatcatatccctggacttgatgtagccaaggcaggtttacctgatactcaggtacagctgggatgcccaccagggcaaatggggagtgcaaatgagaatttctgtgcctgaagggaagaatcccaatacagaacgcactggaacgtttgccttgactctgctccttgtttggcttcccttactgcaaaacaggagtggctctggtcacaaggacactcagggcatactgggtgcccaaggggaatggacaagagaaggcatagaacctgcctcagggagattttactcacaggggccactgcagttatggaagaaatgttgttcaaaaagtgtccaagcgtcaacacgcaggagcaccaccagcagcaggccagagagggcggtccagctccagaggtgacacagctaagaggtgcggcctctgccgcagcaccctcattgcgcagcaaagggacacacaggtgattactaagctctttttggctctggcgtcccatggttctgtgacagcctctgccagatagttcattaaggatgaggccagaccctccctgctgcctcccaaagggaatccggaagtgcactgcctaggccaaggcatgcccatgtcctggccgctccacctgcgtggtgagctgggtggagacagcgttagcccccggcctgctgcactatcagactccatggcatttggggctgcaccctgtgattcctcttaaagcggagctactctgctgaaggcccaagggagagggccacgttttgtgttttgttttgtttcagcttgtgaggaaaatgaacttgctagtcagtatggaactggcctgaggggaagtgggtcagggagggaagctttacttctggccggtgtgggacagagaagagagcaggaatgcctgctcttctccccgctttaactccttacctctccacttagacaaagctaggtcagacatagaggacaggtgcctcttttgctctgagatgggctgtggttgtgggacagggtggctggatgcagtggtgtgctggaactggctcatgaggttcctgagagccagttgcacgcatctcttctcaactgcatgcccagtgggagcttgaagctgggcatcatgaaataagtgcaaattacacaaacctggagagccagttgttaagtgtttatgaacacatgtggctgaatgcacctccttctcaatcagatgggacttaaatctatgtaccaaggtcttgggctgcagcaagtcagcctttgaagctgatacatcagccctttccgcaaccactactctagacctggcccttgggctctgtccaggtcctggctgcctgcatctcacggaaaggttgaaacagggcctgacttgctgagatcagcatctagaccacccaactccttacactcttcctcttgaggacttaaagtggcttgctatcgctggttttctaatccataagctataaagtatatacataatactagccattattgatttaggagctactgtttgccaggtatggaactaaggactttgcgtaagttatctcgtttcattctcaccatagccttatgaaataatttcctcattttatagttcaggaaggtgaggcttgggaggttacccagcttataagtggcagagctaagatctcaactcagatctgattctgaagtgtgctccttccaaaatctacattctttcaactacggacatgcctattactaatacagaagaggattctccctctttgaaaatatatccaaatattaacgccaggcaggaccttcaagagtggcacagctcccagggccaccatgcaatcagtattgcccttcccaaagacacagcaccctcccctgcagaacacacttcctcttcccccctctgccccagccgttgtccctcccctccttcagaacttaacttcctccttgaagcgttctgtcattaaccccattccgttttgatcacttcactaactttgcttctcctcaaatacttataatattcacatagatttctgctgccctgtttttacaaccgtgtcctctggctgtccttcattaagctgcacctatgggcaaagcaccccaagacacttgttccactgtggtctctggggcttggcctcctctgtctctgtctgtgggcctatggatggcctgcctttcctatacaaaagagggcaccgcccaactatctagccaagtgactcaagtatccactttgttctggccagaggccattggtatggagcttaggcgggggtgggggtaggggggtgggagggtggcaggagaaatagccaggctggttagtgtccctccaggaactctccttctccagtcttcatctttgatgacacctgaggatttcctctgtccagccttggggccaggcaggaccctcattctctccaagtggatcttcccttgggcttcccggttgcacccccagccccctgcacccctggattgagttgtaggttgaaactagccatagagtaggagtctggggctgggttggggcagcgtcttaatgtgtaatcgggagtgttctgaaaggtgagcctacacaggggagcatgggtgggtgtcagcttcaggggagggcaggggggctgagccagcggttgggggagatttatgtctgccagtcatgcttcagaagcttctgagtggatggagaggggagaccggacctcgggggttctggaagaagactcagtaatgtgatagtagcagctggtctgatttgcatctgggaagctgaatttttcagagggctcagctgaagcacggagccattccagagaggcctcccctggccagccaggatctggactcctcagtcccctccggcttctcttctgccttgtccttgtcccctactgtccccatgcccaggacacatttgaattcctcctcactgtcaagagccagctgtgatctcacactgcctgcttctgccctgaacgttgacaggctttttctcctgcacggactgccacttttagactggcacacagttttcacaagacggggttttgtggtttgggtttttttttcccttcataagtttgcagctgctagttttgaaaccaccagccctgaggcaactcagacacacacacacacacacaaacacacacacacagagagagagagagagggagagagaatgaaagaaaggatgatgagatgtctttttagaaatcatttattacattccaaaggtccttccttcatcttgcagtcaggcttcagttggtgaaaggttcctagacacatttaagggtttgtgggcatttgcgggcacttgagcattggggtagttctcatgaggtgtgcctcccatgctgggtccctggctgcctgaggctgacaggtgagtggtgaggggccaagacttttggttatgatctgaagtggaccggccggccgccttatgtcctgcttgaatgtgtgtgcatgtggatgcactgacatgtgcaggttggaggcaggagaaaggggaggaagcgggagatacaggaagaccttgattgagtttctgagaattatgcaagaatcaccttcaggctcacctaacaggtccctttgcctatgcagccatatatctttagctgaacacagacttgaggctagaagagcccaaaataaactgaaatcagaacaaactactcatcttcagctctcccctcaccctcacacatccactggtacttgtggtggtcaattatagtttttatcgaaactacgagaacacctagagtctcagcctagcatcctccccctggacagagcatgggggactatcaagaggccacgctgtcagccccattctgggtggcttttatgccgtctctttgctggcattcttactgaaccccatcattctctgcaggcttaatcaaacactttggccagtgggaggagagagaatcgtagtgatattaccaaggaagggaaatgaggaatgactgggcctcctaaataaggcctgctttgacctgagagtgaagaaacaaatctgggacactgggaatctctacctccataaacccttgtgcctctcctagaaccatgcacccatttagatcccgtatcaagacgatgtgtgctcttgtttctcctcaccctttctcaccactcattccttaccaaacttatttagggtcccatgaggctcaggcagtgtaggcaggagggcttgggatagatttttctttgtatcatccatactcgattcagtgagtgttctgcatgtggtagacactctataagtgcttatttaactcaattgaacaaaatgtgagttgtcacatcctcttctggaaacctgcactgattttcccatcattgacaacagaaaacccaaattccctatagcctggcacaataggctttctggggtcaggcctcacctgtgtcctgcctcctcacctgctgccccatatccgtggcactctcactggcctggcaccatcccatgttcacaccctttccgtgctggtccctctccctggaataccctgtctggtaaattctgagtcatgttcaaaatcaactccaggccaggcacggtggctcatgcctgtaatcccagcactttgggaggccaaggcgggtggatcacctgaggtaaagagttcgagaccagcctgcccaacatggtgaaaccccatctctactaaaaatacaaacaacttagcctggagtggtggtgggcacctgtaatcccagctactcaggaggctgaggcaggagaattgcttgaacctgggaggcagaggttacagtgagcccagatggcgccactatactccagcctgagcgacaagagtgaaactccgtctcaaaaaaaaaaaaaaaaaaaaaaaaaatcaactccattgttcctcctcctctataaatctgttcctgactctgttgggtctttccagtagagctggttgctcctgtggttgggtttttgtgatgttttgcacctagcaccatgaaagcacttgtttttagtgtgagtgttcatttacacctctttccttcagaggatcttaaattcatcaaagacagggaccatgtcttatgcataattgcattctcaatttggcacactgcccaggatagtaggtattcaataaaggatgattacattaatgaaagaacaaatgggttgcattgatctacttttggaatctcaagcagggtttttctatacctatcctccttcttcccctttctttcccatatgtcactgcttcatggggctcagcacatatatggcagcaggaatgcacctcttttatttctttttctggaatgtctccatccttgtgcacaaatttcctaagattacccatagtgttcctgctcaccatgcttcttgggtttctgatgtttgcaaagacattgactcatcacctggagacgtagacacccatggagatgggccttcctgcaccacaatgtacctcctccatgaagccctcctacatgagtccaagcccacagggagcttccatcccgcctacactgcctgagcccccacttgctcctctcttctctttaattgtgccatggtgccagctgtcatgttgttatggagtgagtgtttgtgtccctccccagactcatacattaaatcctaacggacaatgtgatggtataggaggtgggatcttcagggggtgatttgatcgtggaggtggagccttcagagcgggattagtaccctaataaagaggacccaagagagctagcttgccctctttctaccacgcagatacacagtgaggaagacagccctcactagaacccgatcatgctggcactctgatctcagactcctggcctccagaactgtgagagataagcattcactgttgatgagccacccagttatgggactccattacagcagcctgaacagctagaacagggatatttttcctcccgattgtttggattctcccccaccccgcggttcccagagctcgataggagaatgactgcacgaggtgtttccgcacggcttttctgcacactggcctccatccctcattccccaggctctgtgctttcccaaagggactttacctcatctgagtagctcctgatctagcaatattaatccaccacatctcaaggactgtcatttttgttatagaatacatctttgataatttatacatttttggaagatagttgcactttcctgtggaggtcacgcaaatctcttggttcaaatacaggttaaaaatggtaagattctccccagcagacaaagctgcattgcctgaagtctgagcaagcaaatcctgcagtgtttgctggcactctgggcagtgggcacagcaggaatggcattgtgagggccacctctggctaagcagccaaggtgtccataatcaccaaactggcatctccaggctgctctgctccttgcctgaacatcctcctcctgcccttctcccttctccgagaagcatcccttgaccttgtcagcttttcctctgctttctccccttcctctcctccataccctgtcaaaatgtttcaggttttccatattcccaggaccttgctaggctcagccatatagtaaatgtcatatagtcgtgtgtcaaatgtcatatggttaagtcacgtcagggggtaacttttacatttttacatgaacctcctggacgttcaaaggagtgaacccatggcaaggatttcaggcagacagaaacgtgatggaggtttctgcggggtgggtcttttggagcatcctaccatactacctgggctgcctccctctaagaccagctgcagacagacaggagaagcattcccactactcaagatgaccagggagcctctgactctagccacttagtggggccttcttaggcaggaagaggagggaagcagatccctcaaattaatacctggcctgagtcactgggcttgggattcagagtttggaaagtcacccaaatgccttcattcccaaacctgaccttctagagagcctggagcgggcaagcttcagattcatttgtgtcaacatgttgtttggttaatgtagctgagcatctaggcccattttcttagaaacaggaaatcccagagtgccaagagtaaacatcccagcccccaaaggtttgggttcatgtaggaactccctgaccacaagggtctgtgggtctgtgtgcttgagccaggcatgctcttgcacccataattgatcttgtataaagagatggtctctctacagctcagcagctggactgtgagactgaaccatgcttgaggctggttgggaataggctaaggacagggtcacaatttcaaacataaagcaaaaatgtattagggccttttataacttgacaggcatctcccctgcaatccccaccacagactcttcaattctagtttcttctctttttattctttgtttcttctgtgacagcagggacctcgtctgtcttcgcctccattcttccatccctatattctacaccgtgctgagaataggaggtgccaagtacaggctggcggaatgaatgaatgattgagtggatggcaccatgtgaatcaaggcagcagaagaaggcatccctgaagggcttgaccattccagctgtctgtggtgcatcctacaggggtgagctccacatagttactagtcttaaggggctcacagagaattaattctctctcacgaacttgccagcccctagttggcaaggacagattctccagaagcttctctggattagttgagagagctcaggttagctggggctggaggagaaaacactggctgtgcagaacttgactgggtggagggggaagggccgggggtggccagaggcggcttctgttgcacagaggtccggcttgctcgccagacaaagagccctcagaaagcaccttccccacctccgccacacacagagaaggcgcagagggcctggcctctttcttacaaggagcccggctgaccctgttgctgtgaggggcagaaagagaggcaggcagctgcttggagacgcgggagtcactgagcagggcccgcggagtctgacaacggaagaaaagaggcaacccttctattattagtggctgctttccacgtatgtgtaaatcagacagcctatgcaaaaagaggcctcctggtagcaggaaattcagagttgtgggtgtctttgtgctatcagatcgggccctgggcttgcctgcaatccggtcttggacgggcttccatctgggctgcattaagaggcacaaggaggtgagcgaaggcccggcttggcctccccaccccccagtgtttctggttttatgactctagggggactttgtgactttttaaacatcgtcttttcagcatttcacgtgggctcctttttagagcctatactgaagattttatgaaaatacaaaagagataaggctgcgtctgttacaaaatgccatcccaggtccagaagctgggcataactaaaataatatatactattccagagcccaggacttgacttccgtgtttagtggtttgctgtacttccatcagaagtagtgatatagtgtaatatttaatgatacaggaacatggccgtaatttaatataaagagaataaaaggaggttacaaagcaatatgattctggctagataaaataatacatatatgtctatatatttgcattataaagaccggaaggaagggcaccaaaatatgaatcggctgctttctgtattgtgagactatgcgtgcttttacattcttattttgaaattttctatacgttttaaattttatacaaggatgaagtgacacttctgcaatcattattttaaagaacttaaacgatgcacgtaatgagttttaaaaaaaagtaagccaagaaacagagaagaagtagtagcacctgcaggatgggcttactaacttagtcctgtttctcagcagccttgggtgggttttccatgtcccttgtctcccatggccctgactccctctcctccctttttccttgccctgcatagctcttgtccatttcagccggtgactccatgctgctggagcaccttgctttctcacagcactgacctgcccagcgccttgcccttgcttgtcccaggaaagcaaatgaggccccagaaacatgagtagacgggatgaatgtaattcagctcccaaaatttgcagtaagtctccgttgcccttcaagtccaccagagatcgtgccagtccttagagcttagactgaatgcagagccctcgctgtctttgtataatgcactctttgacagctaattaggtggatttcagcaacttcacaatgtcacatctatcagaggcaggcagcctgagactcccaggggaacttattcaagctataagtaaataaatattacagattttacacacacacacacacacacacacacacacacacacacacgggaaaaggggagaaagagtacacacacacgcagaccattttgtcctcacaacattacgaactgttttttttttttttaatctaactgatgaggaaactgagactctgacaggtccagtcacatggccggaaatggcagagctagaatttgaacagggtcctgcctgtctccaaagcctggactctccaccaaaatgccttcccctctcccatactgcaatccaggcaggccactgtgggtgtagtgagtcccaaagctccgtaattacagggttcaactctgcctccagaataaccatgacaaaatttgtggaaatgttcacaacagctctttacttccaggttctgagatcagaaacggaagtttcaaaataccgaaagttcgtttatgttgaacatagtgcttaggctaaaagcaggaagtccaagaaagcctgatctcatgagattttttcagcccaatttggatccacatctgcacttctggattttccactgagtctaacctcagctgctctgctggtctcaccgagtctgcacctccagcatggggcacagataaataacacagtcgactgctattcactaagatttacccagggattggcctcttgaaaagtagtgagcttggacaggcagtagaaaggaacaattgaaatttgaaaaataggcatttcttttcataaagctaaaaaaacccaaaccaaaacaaacaaaactctaaacaataactcatccaaataatggtcttgctgttgtctccaggtgcaggaaacaagtgaaaaagaatcttaccacctactccttcccgccccagtcctggtttctccattggtcagtatccggccagcagaggggaggagaaggcagtggcacttagtggtgtgccttgggctgccagctctgggggagcctctgaatgttggggagactcattcccgtatccccactcccatagcttgaggcactttggaaagcaagtttctcatgttgcagatgaggaaactaaggttaggagaagtggaaggatttgctcagaccacacacatctagtgacggcaggagctgggattagaacccaaatccacaaagatgtggcctcttttttgaatcataatagctgccctgcctacctctcagcatttgaatggattaacggacatgatagggtttgcaaatgacaaacataaagtaagtgttagttgctgtatcttgacatattccaggtagtggctcagttagtcttgctggtgctgtatttaatttgggtcccattccaagtgtagagttttctggggatgccattatctatgaggcttctctgccaggagggctcagaggcccccaagggaacactccctatacacacaacatccccagcaacaccttagagatccttttgggaacatctggaggacttctggatcacaaagatctacagtgcactgtggtgtgagctcctctattcagggactagaactcattcttttgaagcacaatttcaaatcagccacacccaactgcaacagtccaggagaggtagtagaccacatcttagagccaccccttttcaacttcaggcacccaggcatgcaggggttactgacttgctttgtaaacctgttcaaactaggtgcaaagtggatgtagcatgacacatttagcagatgtatggcctggagtgaatgatttaacttctctgagcctcagtttcctcatcagaatgtggtaattgcaatatatactcctgggttggcaagggaagtaaaggggatgtttataaaccgcctggcatgcacacaaacaaaggcacttcctgcctgccctgcagtcccaaactgccctttggggtagaccctcagcacctacatgccttagaaacagcatccctgggctccagaaggacctccagaatctggaagagcaagtccttaaatcttgccatatactatttcgttttcaaggaatttcttacaggtagcaagtatgaaataaatgtcacacgatagcaaaaccatcatgcgtgtgcttttctattagtgaggtcctcctgggaatctcctctctccttacacaggtccagtgaggcctccttagccccatcacaggtgtgcattcttggctgggtgctctgggttgtgatgcacttggagcaggggtgaggagggtaatctccccatcgcttgaagctgaagtgggaggaagcaaggcctttcatgtggcagggtcaggcattctccccagagcagcgtgtgccccggaagccaagccggtaggaccaagcagaagccgccactgcttcctccctaccttggaaaattacacagcatgccactttgcctgctggctgccaggcagatgccctgctgctttctgaagctgtcctacctccttaggatgaaaacagcaatgtgcccatgcccacagtgacgagcatgccctgccttcttcctcctccctgcactggaaaaagtacagggtctgtaaacaagtcattagattcaagatcctgcccaatttagactctttgtctcagttttctccagagtaaactggcggtcacacccactcaaaccaagcaaagcccagaaggaatgcagagccctgtggccaggctcaccgcagctgaccctgagatgcccagagctccagccctcctggactgggagaggagagtgggaagcccagagcactccattccatcaggagcagagcagcggctctgatgggcacacggctaagatcccagtgtctaggttcaagtccccaaagcagcttttacttttggaactagctctccaaactatcaaaaatcaaaaatccacctcctttgaagtctggcaagaaaacccccacgatcagcttctctttattcctgtacttcccgtacaggcaggcttctagaaaacagaggttggagaaaatgaaagtcaatgccaaatactaaccagacagaagaataactgcttttccccacagcacccccacccccagctctggcattatgggctggggaactgggcccctctcctgctgctgaggatctgtttattttgcactccataaagggaaaccaggcccttttctgacattttggcttggagggggtggggagagaaggaggtccagaatttaaactcaaaaccagatcaacttctctaaatctcctggtgcttttgctatgattcctaaatgggctgcattgtatgaatcaggctttttactcccccagccaatgtgcctccatttctaacagtctggctcctaaccctaccaatgccataaactgccatgaccccttattgacttctaaccatgcaaatgcttccccagatgaaattaaggacaggcatactcacaggcagcttggcagctctccctgcctctcctgcagggaaatctgtgcctacatcacaaaccttgctctccttagtggatggtggcttcctttaaacaatacaacagggaatttcctttgtcctggaaatgttccacttgtcattaatgttatccttatcagcagaccacaatgcaaccaggagaggccccagcatgctcaggactcgtggggtatcattgcaaaatgttttcttcattttttttcctctgccttgaattcaaagcatgacctttacgggtggaattcaatcaggtcatctctcagattccccagtgggaaaataaaagtggcacaagcaaagcctattgtttccattgcaagaaggtagaaatgctgttttctctctagatcatccaactaaatgaggtgggatgggggatacggagataataaaatgacccttacaaattgagatcttattaataaaatatagcctcggtcctggtagtcccatggaagttgcacagcaggggctctgcaaatgtcattgactcctcaactttttcagtccttcaccatggctttcactatttttaatgcaattcatttctatttggacaagtttgagaataaatttttgttttctttaaacaacaggcaagcaatacgttaggaaaaggggtggaggcatgtgggaacaccagaaggccagaggaattgcaaaaataaacttctgctaatggtaacactcttgtcttccagggcaggaataattaattgtatatgtttaatcacttagcaaccctgagctcttattctgaaaatctcaaaatatttcacatatgcagtgagtaaagtctttggtatcagacagaacctgctagctgcacaacttttggcaagtcacttgagtttcgtatgtcttggttcttctcactgggtgcgtgcgagtcatgatagatggattccttggggctgtggtggaagtcaagtgctaaaatgccttcaagggccgggtgcggtagctcacccctgtcatcccagcactttgggaggctgaggctggcggatgacgaggtcaagagattgagaccattccggccaacatggtgaaaccccgtctctactaaaaatacaaaaattagctgggcgtggtggtgcgtgcctgtagtccaagctacacggaaggctgaggcaggagaattgcttgaacctgggaggcggaggttgctgtgagctgagattacaccactgcactccagcctggtgacagagcaagactctgtcaaaaaaaaaaaaaaaaaaaggtccttcaagtgtttagcacagtgctgggctcatcagtaactactcagtaaccatcatcatcatcatcattattgttattggcattactgatatctcctgccaaagttgtttaaagtaataatgaggtaaagggaacagccattccagaaaagatcttaaaagccaatcccagttatcaacctctgtagactctctagaatcttagaccagagggtttcctcagaaattctaacaaacaccagatatagacagcatgcctgtttagtaggtgtttctttttttggtcttgcaaaatgcttttaccaccatctttattacaacatcacttcgaggtaaaattatcattggaagaatctccctgttctgcagttgaggaaactgcagcatgagaaggcccacatctttgatggagatcaggatagcagtttatgtcggcgccagccagcgcatcttccagagctctatttgccaaagagttgccgtttttttttttttttttttttctggccagtgaagagttatatcaagttgaaacccagagctttcatagctgagatttctaaaggtggaattcagcctcctagaatcttcttgactttgaaatttctggatgcattgcatagtaaaggcatattaacctatagatatgtactctatgcactcagtaaaacattagtctgataatgccttctaaggtaattgtcctctcacagtattcttcattacactctacttgcctttactgaagaagagagtggctaagaaaatggcttatggccacacagataatgcctggggggactatggttaggatgactaagctcaaggtacttaatttagcaatgccccgggtggccatttcattcattcactcatccagtaaagacttattggaaggcctgttctctttcatactgactccgaggcttatctttcagggttcggcctaaatgtcacttccttaaggaagcctttgacctctgagactaggttaggtccccacgttgtgccctcccgaggcaccccatacttcccctttcatagaaccctttgcacttataacaacaagctcaataactgttttttttttttgccttgactattacctctgtccaaggaggaactatacctgtctgctttactgctgtactccagcacctggcacatagaagcagctcaattaatacatggatatgtgtcaggcactgaggacttgaggacaaatggccagagtttctgccctcaaggagcaagtaactcactcactttgttcacagaattgtattctatacatactccttaccttcttcccaatgcaatttgaaaaaacaacaacaaaaaacaatggtggaatgttttaaactgaagaaggatttttctgaaaatgcatgagctgcagaactgtcaaactattgataaattctacataggaagagactaataaagactctaattggacatttataattttatcctttctggagggcaggtatgagtgagaagcaggactacagtgcttcatcacccctaagaccattacatagagttggacctctaggaacatggcctcattttctgagaggagtctgcccatctttgttttaaacagttcacctcacaaatttatgccattcagtgatggacacaggattgaccttcgcaatgatgtgtacctgaagacttccaaagaaaaagctgctataggtctgctcattagcgagacctcagtaatgaagtcagatctccccatgagaaagcctggggtatttattcctcacagtgattctaaaaccacaggaggtgtagcaggcaatatatttctattatccatgggtgagaagtatgaagggtagagagaaattgcttcatgtctcaggatatcaaggatatagatctttggaaagtgtatgatatgttttggctctgtgtccccacccaaagctcccataactcccacatgttgcgggagggacctggtgggagatgattgaattctgggggtgggtctttcctgtgctgttctcatgatagtgaatgggtttcatgacatctgatggtttttaaacaagctctctttttgcctgctgccatccgtgtaaggtgtgactttctcctccttgccttccgccatgattgtgaagcctccctagccatgtggaactgtaagtccaataaacctctttctttcttttataaattgccccatctcgggtatatctttaccagcaatgtgaaaacagactaatacagtgtaccatagaacagcactagcttaatccattttctgtagctataacggaatatctgaggctaggtaatttataaagaaaagaggtttatttggctcatggtgctcatggttctgcaggctgtacagaaagcatggtgccagcatctgcttctgatgaggcctcagaaagcatacaattgtggtggaaagtgaatggggagccagcgtgtcacatagcaagagcaggagcaagagagagaaggaggaggtcccagactcttttaacaaccagatctcaggcgagctaactgagccagaactcacttctcgcccagagatgacactaattccttcaccagggatctgccccccatgatctaatcacctcccaccaggccccacctccaacactgcgaatcatacttcaacatgagatttggagaggacaaacgaccaaactgtgttgaatacaaacctagggaatactcattggagagaaattggctttcaaggactaccagtctaactagtaagttttaaaataaaatttttttaaaaaaagacaaagactaccactttagctggttatttgctaaattaaagtgctttgttcacatttatacttaagaagaaatattacaaacggttatagggatctgggaactagaaaagcaaaccatctgttaatagtatggagctctacctaataggaaatcatattttcatggtggcataaagcattagagctaaaaatgaccttaaaaataagcaagtacaatgccagtattttgcaaatggagaaactgaaatcgccattatgtataatagggattccttttggccaagattatttttcaatgaaaaggtatagggcaaagcccatacctttctttgataagcccaataaacattcgatcatgattcgtgactatccttttgataaattccaaatgccctcatttgataaaagggaaataaagtattacattcttaaaggtcagcagagaattgatgatgaagccaggagacgggatagaaaacttagctccagccccaggccaacatgataatgctgaacattcacttttcattttgctttgctttaatgttagtcataagaataaatggaagtgttagtctccatgtggacaacacattgctgactcagatcaaaataatccgtgtaaatatgcccctctgactgaattcagatttcaagatgatgtttttaacttgaatgatgcagtcttgtactgcccactatggtagcttctaaccatatttaattaattagattaatcaactaattaaacttaattgacttaatgaaaaaagaacacaattttacatttcctttctctagccatatttcaaatactcaatagccactcaaatagagagtacagtggctaccatagtgaacagtgcagaacaggacatttccatgtttgtagaaagttctgttggacagccctgataaggaaagttttcttaatctttcactttccttggactttaagatagagttaaaaaggttgagaaaaactgataaagtttcccaaatctcttctcctaaaaattgtgcaagagctatatctgttacagagtttcctacacatgaatatcttcaaaagagagattttggaaccttgtgtagcccaataaaatactattgctcccatatcaaatgcaaaatcagaaacttagtagctgaagagattatatttttttatgtagttaaggtggtaggacaatgagtatgtccaaaccctttatacaatccaacatcacaaagatagacaaataaattttctgcaaggctgcatttgctttcattgtgtcagatgttcttcataatttgaaatataaatttgagatgctctctaatctctttaccttcactctgtggtgttagtgtggaaaaacacagcatgctctttcaatacagcatctcggtcttggtggtgatttgttgtcatggagaaaaagcagtagggctgatcttagctagattgtggtccctaggaactacagactagtgtttgagcagttcaatgttcggcctcatgaactttgaaatcccaattctgttggccaaggataacaccctaatacctagttcaatgcgttcaataaaaagattgcaaaagaagttcatcattttaatactaaatgtctgaatgagcacttaaatggaaatggtcaactccattttcctttcttcatctcttcatttttgagctacttcagtgtgggtagaatatgggcaaatgttctccttcccttcacttctggtcacataatcatacttggttgtgcagtgtaccgtgaaagacagcaatatgacctttcctaaaatattgatgatgcatgatgagaataaagaccaacccagctttcctggcctcgttaagtgaaagaagggcctccatcacttgtgacttcaacactaaaagaggatcatcttcaaggcaaattacttcttttgttctgttgtcccttcactcacaccaaagtcagttaaacctattagtagcatttacacttaatacagactgtcacaacccaattaaattcacatcccttaatcagggagctcagttctactggtatctccctctgaattaacctacttctagcctggttctgtactgtattaccacaaggacatggggaagataatagaagaggtggcgtagatgtatgggtggaggcagccataggtatttggtcagccagacggatgttttaaaactattcacaagggagtgctgtagcataggttggacaagagaatttgtttctctggtgttttctgtttgacacaactctctttatcagcagcacaagcctggaattcctgaagccacactcatatcctgccatcggtttttacgtaaaccccccattgattgggatgggagtttcacaagtagaacaatggccggatacgtgggagggaaaggaggaatatgggatgtttgatctgtacttgtgcatttgtaggggatggtgtctacatgggcaaagagatatgaataagtcactaactggtgaatttaaccacatgcaagcaagtctttgaaatcactaaggccagaaaaaagcaacccaacagatttaagttacatttattatctgttatattcatgcatcgacttgaatgagaataataactaagataataacaactagcagttgcacagcactttacaattacaaagtgcttttacttccatactacttttgattcttattattagtaaggttggtagaaaaattaacgttatgcattattactaccagtactactattattttacaggtaggaaaggagattggagaagttattatctgaccgaagaccacacaattaataagtgggtctgaacctagatttccaaacttcagactgcatgtggctttcacaaaatcattctgccactgtcacagtaatctggcaaaatactccagaggtttactgccagccttcctaaggttttgtctcaccttttttaggcaagaagcaccttacagcacacagcattgacacattatatttacattgtgtgggcatgaagtcacatttggtaactttggctaactgaatattggctgactgaactttgcctgacaaataaaaagacggggcgggtgctctttctttagtaaaaagtccaaataaggctcggaatctgaaatgccgcatgatttacagcaatcttgttacattggcaacaagaaagccatccaatgagccacccagtagttagtcaaagtgtagtaattaattcacgcttttcttgaagaaactcaaagcaactcactactccagttttttaccaaatccatggaagaagaggatcatcaagaagccttaatccttttgggtaaatggacccactgagaaggggagagtaacttgtccaatgtcacgaagccagcctaaggcaaaaccaggtacagaactcagactacccaagccggtgcccacattagcactttagagggaccgatatataaaactctctcaggggagctaggcacaggtgcacctagacagcttcaccagcaaagtttttaaaggaggtggagaacgaggcttgctctaatagcagacaaccaactccttccaatcagaagggagttaaaagtagtgttagcatatggaaaatgccaatccacctgttccatcttggatgagactgaccactcaactgactgcttgtcgatggtaactgaccacagtaagaaggattcttgtgtctcatgtaacgctcctctccctttttggtagctctgagctgaaagcttcctcccccatgcacggcaatggggaaaccaaggcacccaccttcagggatacccctgttttcccaggagtttcccttcactgaggctgtgtctctccttcccttgtaagtgtgcttgtactgtgcacactaacaaaacattctttcctgtttccaattattttcaacagttaagcatgcaaatgtctgaacaacatttattaagcttctatggacatttaggagagaaaaaaagatgaaccaacaagaatctgaatcatcaaagagctcttacaaaaccagtgttttgagcctttaattggaagtgaatcagaaacaggcatgtgaaatttcccatgaaatacacacagggttttaaattttttaaaagggtgctctgggcagagaagagtctgggtcataccctgtccaaactgataggaagaaataaataattctgatgagctctaaacccagtcctactgccctgtcatggcttgtctacaaaactcagggggcaaactccaagaaggcagggagggggagccatggtaattcctttaccacacttcagactcagtatgtttatagagacccacagtctccaaaaggaatggcttagaagcccagagcagcacagccacagggctggatgccttccccaaggcaccctgggaagtctccacatgctggtttcctgaaatgacgtttctagaaaagtcacctgctctttctccctctcctttctagaaaagtgcaaaaagtacaggtgcccttcaagtccctcacctctagggaagtcctatgttgcaccaaagaccgtatttgagaaagaggacttgtgcccttcgaccaatgtgttcttattatggagaagtcgaagggcaggttagcatggttctctacaggcagtgttatcagggcgggggaagttgcttaagataatgtatgaatcttttcttcaggattcctgactgttcatgaacttgggtacagggctattgacagagtatcgtgctgggaaaagaaagatcctaagctcatagtgtggggcagtcattttaaccccttgcctttgctatcgcccaagcaggttatacaaagcagagcacaccaaccgtgcccataaccccctcacagtctcctcatgccacatagtttctgagttattttcttctttgtgaatattctttaaatccattttcaactagacatgataacaatgagaactgggttaggaaaaatcattatgaattaaccatgttgaattagccctaagaaatgcctcttgccagaagagctacatttgttttgttgtttaccctcttccaaatcagcaatccttttaaagagaaaaatctactttagtaaaatttgggtggctacatgattactcacttacccatgtggttcctatggaaagtgccctcttcaatcacccagaaatattatgacaatggtcagaaaataggaccaatgaacaaagaagcaggagtccctgtgggttaaatgagccttgatatctttgctccagaaaacaccctcattgtagagcgtggtgtttgggggcatgaatacttgagttctgcttccaggggctcttgcctggttcccatcttttgacacactacatcttgaagcctcagttgtctctccgtcaatggcctctttctttttgagactactggggagggggctatcctaagttggcaatgtgtgataggtactttgggagatatgacagagaaacaagcaactttcttaacagtgctcccttgttaccctgggtcatgcctaaaggtctttcagtagtaatgtgtagagtgaatagtgaggccacgttgtatggagtgatgtgggagacactccaggcaaaagagaaaagcagcgatctcaactcaatttctggaatttcttcttcaactgactttgatgatcctttggatacaccttgaagcttcttctcctatacgcatgtttctagagtcagaactgcaaaaacagataggttgaaatctctagacaagagggtttccttgcacacctgttgtgttgagctcaggtaacaaaaggttaaaccctatgtagagaggtgttccacgtccctcttgaaggtgtatgcgtgtatgaggtgggggtgcttgtgcactgaaaatggcttaattttcctactttgaataaaatcaaactacaactaggatgaattcaagtagctcatcgacccctggtaattgcacatagggttcatcgggacattacacagaatgctgtggggaaaaaaaaagcaaaggcaggcgcttggccctacgcattgagaatgaaaaatttaaaataataggttcttcagggctaaattgtgtttgctcccaaggatccttggagctatggttttctttgttctgccaaaggaaaaaggaaatatatcaggaagctgggccagtccacaggaagtctcacttggtctgataaaaggaactggtgtgaggcagctttggatgcagttataagtcaatcagccttgaaataacaagaaaggctattcaagagaaactggagcctgaagtcagccctactcaatgatttccttttaacctcgcaaaacattcccttctttgtgttttatataacctcctgaatctgttatgttttttaaaaaaaattgtgtatagttttgtgtgtatatgagtggaatagaatgaagaagagagcaagatttcgaggaggaaaggaagaaagaacgaaggtacaagggtagaggaggaagccttggcaggtcaaagaatatgccgttctctattgagctataaaacatttaaaaatcaactcattggatcattatgtaaaaagagaacctgtcagtttcacaccagtgcacctgctaacaaagccaggcaggctttcttacctgggaaataggccttcttgaataaagagttgtgaagaattgagcagtttcatgaatctgaccggtgcagactgtggatagtggtcacttagacaaagagataaaacaaatagtaacaaaacctacatggtccccatagatgggctcgtagcctaaactatatggagatgtatgtatcaatctggtgatgtatcacagtggctaagctttatggaatttggaagtaagcaggattaggttccaataattgcttttctattttctacctgtatgaccatgagtaacttacccaatctcttcaaaatggaaatattacatacatcacagggttgttacagggatcaagtgcatgtcttaaaggtttgaatagatattgtcaccttgagctggatagataacttattctctttataactatgattgttcttcctcatttttattccccctctgatgaaagatgagcatctctttctcttaggtgagtactagggaaagaaaggccttagcttggggtcatgaggacccatgcaaaatggtgggtgatacagtttcaaactgaattggggccttctggggttgactgtgtttgcccatagaacaccacttcctgttttaacaagaagaaacaaagccttccagaaaacccattaagagactcaaaattctccttggacatcaaattattgtttttagaagagttaagtgtaaatgaatcaaaaccagacaaattcaatttcctttcaattaaacaggatttttttaaaggccacgggaaagacgcttggagccaaagagtgttttgggttttaaatgagaccaaatttcggaaaagaatctaagaccccagagtggcgtcaggccctattcttagtttgcattaacggaaagggattagcacagttctagtgtcacttggcaataaaaacaaccagctcggagaaactcaccaagcacctgctgagagcccctgccttcacctggccttgagggtcactccacagtacaaaatgtagccctgagattatgggagaagagccacacaggatcagatagaacatctacgtgaggttctatcatccacacccccaaataagaaatgttttaaagcctgtctaggatcagagtcaaatgaacatgagagctgaaagcaaattttgaaatcataccttcattttatatatgagaagacctttaacatgaatgatgaggaagtgaagtgacttgcctaacatcccatagctagtttgggatagagctggggctggaactcaggtctccggatcctaggccagccaatttctccctgcatttacctcaatttcgaatcttaaagtcaccgggaccagcacattcaggataaaatcttggtgcccattcacctttttacaagtctgtttctgtgtctctcttaacgtttgtttttttttttttttttttttgagacggagtctcgctctgtcacccaggctggagtgtagtgttgcaacctcggctcaccacaacttctgcctcctgggttcaagcgattctcctgcctcagcctccccagtagctgggactacaggcatgcaccaccacacccagctaatttttgtatttttagtagaggtagagtttcaccatgttggccaggatggtctcaatctcttgacctcattatctgctagcctcggcctcccaaagtgctaggattacaggagtgagccaccgtgcccggcccaatattttggaactttttgcttttttccatgtaataatatacattggagaattttctaaatcagtgtatacgacaattgattttatcccattttgtagttgcatggcattttcttacatgaatctttcctcctttgtttatctagtcccctactggtggacatttagattatttccaacttttgctgtaacaaacaatgctacaataaacacattgtacatatatctgagtgaacatagctgtagaattggcattatcaaatttgtgtaaatagttaacttctcaaatagatgttgctctgtggaaagattataccaagtcatactcctaccaagaggataagacagtgacatttcctttactctttccaacatgagacattaagctgttttagtctctgctgtcctcctaggtcataaacattggaattttattatttttatttgaatgtctttatgcatgtgcttgaaattcttttcatttatttattgcccatttgtattttctttctagtgttgtctattcatagcatttttgcctattttctgttaagtggtgtgtcttttcttattgatttgtaagtagtctttgtatgataggacatttatgctttatgtatgataaatattctttctccgtttctcatttagttttcaccttacctatggtatttttctccatgttttttttttttttctttgagacagaatctcgccctgttgcccaggctggagtgcagaggcacgatcttggctcactgcaacctccacctcctatgttcaagcaattcttctgcctcagcctcccaagtagctgggactacaagcatgcgccagcatgaccagctaatttttgtacttttagtaaagacagggtttcaccatattggccaggctggtcttgaactcctgacctcaggtgatccacccgccttggcctcccaaaatgctgggattacaggtgtgagccaccgtgcctggccccatgttaatatataaatagaggaactaaagctgagaaagggagaatcagaagaagaaatatccttggctgaagacctagccttccaaaaatatccttacagtaaattatatcaccaagggtgaaggggcaatggagaatataaactggttgttacctttaagaaaatgtgtctaaccatccttatgattataagccacaaataaagatttctccaatgagtattgcttcttttggaatttccaatactcagagctaaaaatcagaaagaagagaaatgtctactctctcaaagcctggaagaaatagcatagaaaccttattcttgttcatttacatgaatgctctattgagattggtgcctggtaatattattcaacatttgggtgaatgaatacatgaatgagtattgaatacatgaatgagtatgaattcagtcataaatgtctaaagacaaaatgactctgtagacatgagaatttcaattgaaacatacgcttttccatagactgtaacagcagtaacttaaaacaactcatgagcagagtaattttctaatattaacctgtttgttttcacacttttgctacatgaatggtactgcagaattgctcactctccgattcctttcccataacatcaatgaatacccatatattcagacctaacaattctgctactggagtgttagattccagtagacatgtgaaacccacacaatgtctagaaattcgaggttaaagctcccatggcacctgtaattccagcctcttgcatgtgtgcactgagatgtgacataagatctttcattgccttggacacatagcactggctgggtaaatggggcttgctcttgggaaagcatttcagtgttcaagtctgccttccctttgaggtgatttgaaaaattctcatactctgagattttgatcttaaactaaatggcagacacattgtttcccaaagatggcaaatctcttaaatacattagtgtttgcttcatttttgtagggatgagcaattttgaaggtactgtaaagttgatctgaattatctgaaaatgcgtctgaacactccatctctgatcctacttggaatgacggtgatgagtctctgcgtttttggtttgctggggtgaagtgtcagtattcctaactgagaccagcggcccagccaactcatggaagaatgtcagacttgtctgaaggcccacagaaatttgatttgagttttagagagacttttttttttcttttttctcctctcaagcactatctgctgactcattctcaaaaggaactaaaattgtagcccaggatagaaggcccaattgaaaagattgctcatggtgaaatcccctgggaaggaagggatgagaaggataatcacagttttatgtcatctggtgaaatagagtttctcctccctcccctaatgccatatttaatcaacaggtgtctttgaagacagaagacagcactgctggttgcctgaatctatctctggttgtctaatcctgactgctgctcatttcttgtgtggcctctgataagtgatggagccacttccatcttcatttcctaaggagaagagagtacgaaggatttgtttctaagagacttgtacagctatgtagatcatccctctagtcacaagttttcattcctcctttctatacatgttacaagacccaagttattattattttgaggcaggtattcactttgtcatctagggtggaatacagtggcgctcatggctgattgtagccttgacctcccttggctcaggtgatcctcccacctcagctccctgagcagctgggactacaggtgagtgccaccatgcccggctaatttttgtagtttttgtagagactaggtttctccatgttgcccagtctggtcttgaattcctgggctcaagtgatccacccatttccgtctcccaaagaactgggattacaggcatgagccaccatactcacccccaaattctttgttatagtatgtaaggtcctctgtagtctagttcaattcagtctttccactcccatcctctccatcacctgtacactttcctccccaaagtaccctccactctcctagaaagccctttaccatagtttcctatgcaagacctacctatctttcaaggccaggcttagatccacctgtgccaagaggcagtgtggccagtgtgtgtagtaaaagcaggaatcaggaatgagaaacactgggcttgaaacccagatctgtcccctgttagttatactcttgggcaagttacctcactcctctgaactttaacttcttccatatgaagtagagacatcatggtattatctcccatagggctactgtgagaatgggatgcaagagtgtgtgggccagtgatctgtggagggactgtatgatctgtgaagagatttatgaaagggactacataaacaactattatcatgaggtctttgtctgtctctccagttcaaatcatcctttcttttctcagggctatggtaacacttgctgtgctctgcagggcacacatatgtggcttatcttctcgctagatctcctggcagagcccttttgccattggggttctatcttcacagaacatagtttagtccctgcctaacagacatgcaatcaccttcatatggttggtcagtttatgatgcccctgagactgaggtaccaccaattcccataaggccagctagctttgcacaggaaaggtttattccatagattacctaaattttgtcagatttgcactatattggccctgcagatagtgtggggacatataaccctatccatagcctctggggaaacatctcagtgcacaggcaactgatggtgggtctatcaggtcagtggcagaactgtaatacacaaagagtgacatcacttaatgatatcatcccatggatcaattaatacataatgggaagaacgctatagatatgaaatcattaaagcaacagaaattgaaacagggtgtagtcttctgcagaggaaaagacacctgtataactctgagattacgaaaaaagctattgtggctggttgaaggttttatgagattgtgtgtgtaggtgtgtgtttgtgtgtacgtaacagacaatgtcccttagcctacttaattcgttacaaaacaacaagcaaaatatagacttaaaaggaatgttttaagtacagaacaaaaaaactatcaatataaaaattttcccaactcttttctttctttctatttttttggctgggggtaacttagtactggcattagactaatgctatatacctagaaagaggcttggtttaaatcaactgttttttaaacaaatgccaagttaactgtttaaccccaaacagaaagagacatgaaaatcccaaatcttttttaatgcaattgttattcaagacctacttatgacacagtctgatggatccataagatgccttctaatagattttatttaaatagtccaatattccattattaaaggagctgaaataagaattccgtctgtctacctgcccatgatctgtagaagggcctgggtatttcagtaaactactatatttttggttgtctccttgtaatggagactgtttactttgtctgctggaaaagaaggacttattttggaaaacagttgtataaaaattctatccaaaaatttggaatttcttcttttctttaaggataaaaataattcaagatggtagtgatacaattttatttatttttcattaaataccagaggtgtctttagtgtaaagtgccaaattctttatgatttttcttttaaagacttctctctctctctctctctctcacacacacacacacacacacacgcaaacacatacacacactgcctccacgattctataattcataaaaatgtaacaaaagcaaatgatattttcatggtatagtggaaagaacactggcctaagggtgcagagccctgaactttcactatgactctgttggtagttagctgtatgatcttggacaattcatttaacaacctagacctcagtttccccacccataaagtgagaaattcaagctaaacactctctaaagctttaaagttgccaacctataaacttaaatttggatggcagtggaactggaaggaagccttttggtggaaattattcacacacaaaacaggattccacttggtaaccacctgaggggagcaattctgtgtggtcacggggacagatcaatagacagaggccatcttgtctggagttcttgtgaatccaggtgacatggagattacaaggtgtgtgtggtagagggaggcagcaacaccttcttgaggacagaagtcaagcctctgttcccaagtattcctcactctgctgcttcttccaaaccttgtccagatgtttccctgccctgccagtgacaacctgccctccagagccttgcagagccagccataaccctggcccttctttcgggctgtgcttgtccattgttgactggctgtgtggttggtgctgtactcttctggagttaatgacgagagagtgcctctgcccgactgtgactttgttagacacgcttctcctcaccatcctggctatatagcgtcattactttccattccctaacctgcgttattgttcttcagaagatatatcaccactcaactgagattgttctctgtatgtgtcagctccctccactagcgtctacattcctggagggttttgacccctgttttatcctcaatacacagtgcagagccttgcaacataatagatgcatcataaacatttgttgaattaatgaaatatgcatgatggtaaatttggacctgtgttctaattttctgaccaatctgtcctggtatgcccattcccaaaagcaaagttcaattaatgtgtatccagctaaggtggcaggctttaaaacattattcctgtgacttgtggcaaggaggtgctttggccccattttctagataaggaaacagattcaagaggtgccttgctataaggcacatgaagttaatttaatgtgtatccagctaaggtagcagactttaaaaattcttcctatggcttgtggcaaggaggtgctttggccccattttctagataaggaaacagatacaagaagtgccttgctataaggcacacagctactaggtagcagagctgagaatgaacccgggctttctgactccaaatccactgttcattctctatttcccaccttcattcaccatgtctgtcttctctgtctccccatctgtaatgacaccacgtgcactgagtcaggcattcatagataaaattaactggattcaactgaagccagcctaaaattaagatgcagtttttgaaaccaggtcatttcttaaagcagcaaacagtatcatgtgctttttaacactgataatatcagtgtgggaagcaggggcgtgggtcgggtgttgtttaatactgcaagttaacctgtctgtgacaaaagagtagcgtggctccagcaaatattgcttctcccaatgtgacggtcagagcctttccaggagccgttcttggaaaagagaagagaatataatatggagggacttataaggagggcaacaagattgggattttgtaatcacatagagttgtgcaaattatgcacaaaataaagggcttctgtgaagaaatccagacttccctggcttcctgcaccaaataccacctaagtgccaagacccacaggtattttgaaatatagacatgacttatatttgaggaagaactatgcaggtgcataaaatcacatcctagaatcactcaaacctgatttttccaggcagttcaaactggaaatggacaccctggatttgtgtacacaaattagattctctctagagtgtcgtcaacctcgatcagtgtagggctggatttagtgcacatacaggcaagtgttcttgtaaacacatatgagcacattttaggcactgagaagattggttagatactactgtagaggtaacctagttccactgtttcatttttgtgatgactatgaatctcaaacaggcttaatggacggttcattctcaccaagagagcagaagaatgctggcctctctcctggtccactgtcctctccaagcacagtatttgaactattgtgggaacaggatctggaaaccccaagatccagaggtcacatgcgaacagaaaactgtggctttcacacaacttaaacaccaacacacacactaaaggctcaatcttgcagaatgcttggagactgaaggtagctctgtggggactcagcctagccaggtaacttaggtgaatgacaggttgctcacagggagggtttggaggagctcatggctcctaccacccacaaaaaaaggaaggactttcactcccatccttggcctgaagtgtcaggttcctgctctaagcctgttctcgaggcctgccatgccaatccctgtgtgtatctaaagaggttagcacatcctgggtacacagaccacagcttcctccttttgctcagggcctgtgcgtagagtttaagcagtgtggagatatttcttcacttttccttagggtgtccacatcaagaccctgaggccatcttaccacccttctggatcagaagaggccttcagagtaagtggtaactgtcctgattggggcgagggagttttctagaggggagcatctcattactaaacccagaaatacagagacacttgcatgaacacatcaacaggaagcagagaaacaggcataaaatggcccaatgacccccactctcgggtctttgcaggaatcccctctcacctacttctcacctactcactttgggtttgaggaacccaggctcttataggctcttatagctccctttaacccatcacagtcagttatctcatctccagatttgcaagttccttcggttggtgtcttttacctaagtcagcatatttcaaactttcataaaaaaaacttagaaaataaaaaccacgaccccacccagaagataaaaatctcttgaattctctgagcccaacatcttagccttctcttgctgagccctgagcagggagtcgattctttcgggttctggggaatggcgggctctgccagtccccacctcgccagcctaatagtttttccagacagactcccgcttggtgttgcgcggcagcctcgaagctaacccctggtcccattcattcccctaggtcctctaaggcccgtcacgttagggggtgtccctcctctctgctcctggccctacttggcgaaccctttcagagacagcagtcaacttttctgaagtgagacgcgaacccaaaccctcacctttccgcctgggttgcactttgcaacctagacccaggcttggcggcggcggctggggtgggaatggccgggcgggcgcggggcgcgggctcacagccggcccctgcaacggaggcggctccgaaggacgcaggaccctttcggaggcgacagctccaggagccctggtcctggagccggcgcacgcctaggcgcgaagggcgggggctcggggcgctagggatctgtgcggacgggggctggggaaggttccccgccggagaggcggcgaggccggcccaggagtcccgcggagccggcggctctccagcgcctagagccgggcgactgagtgccgagaggaagggaaagcgctgacatgtaaacaggggcttccatctggaggagcccgctcagatagatcccccgacacactcacttgcacccctaccctcgtgcaacgaggccacttacccaccccagggcccaccaggcagggacccgagcccgggcgactgcagcccccgcccccgccgtgttccgcctctgcggagaggaagcccagtgcctagcgctggggccacgggagccccgggtgtcggtgggagtggtggaccccgaggtctctcgcccttgactccgttccgtaccctggggtcccccggtttcccgccgtcccctcctgcagccccggcgggcagcgaggtgggaggggggccggggctccactttgggggctgggatttcgggggagggtcgccctcaatgcgggcgcctggccggctggcccgcgagtaggactcgccacccgagcgccggaggagccggcgcgaagccggggcgcggagggaagggagagaggccacgtcttccgggacgcgggccccgcacctacccgcccgccgcttcgcctccccggccggtccccgccgcccgcgtccgttgccccgccgcttaccttaatagtcccgtccatttggccaagtctgcagccgagccccccaatattccacacattgacccggttacagcctgacctcgcagccccttcggattagcccggcgcggcctccctggcgccctgggccctccctgcgtgccccctgcgagcgccctgccctcactcccctgtgcacgtttgttgttgtagcggagcgaaagagacagttaaccggatgaaacttttttttcagctaattttgggaagtgacttcactttgcgaatcggggaggaagtcctatctctctctctctctctctctctctctctctctctctctctctctctctctcgcctcgagctctcctctctcttctctcccctctgctctccctcgtcttccctccccccccacaccccctcttcctcccctgctggtcctgcttttcgcatcacacactatataaatatacgcggagatgcccagacacattcatgcgctgcgcacacaggatacttgctcctgggagataagagctagccgggaacaatgacggggtccacgcccagcgtccgcgccctgattcccgaagtctgaacctccccccatcaccttcccccaaaatccaaagccaaagacctttggcttctttgcttttcctgaggcggttggccgaaggtggccctcctgactcattcactttccgtttcttcccacagatacgttcattaatgctttttccagccggagacaaactttttgggggtggggtagggggggtatggagggagagttggctagggctgcgggtaacccagcgcctactgccggggaagactcggacgaaaaccgaggcaaaccaaccattaaaaagtgcatccaataagaatttttccactcaggccctccgctgccgagacgcggcagactcccagagcggctcacccactcatcgaagcggattctgggcggtttcgggctgacccgcgctgtcagggcgcggactccattccgggcgcattgttaggagaaggggcccctcggggcggcgcgcctcgaccctgggctcccggtgcccgcagagggcggagatccgcggcgccctaggccacctatccgcatcttctcgagccaaacccccagcgcttacccggacccgacggcccaagcactgactcccaggcaagagtcgcccttcctggtccccagggaactgacactaccgcgggacgttccctctaggacagtcagcaggtcccaggagcgcagcacgcaacagcgcagagcagacccagacttttcccggggtgagacccggaggcccgcgctctggaccgtcctccctacccagcctggaggccggcgttccccggcccaacccggagacctccccgcctccctcctgggccgccgcgcgccccagttggagcagcctcgaggggctgggccctttcggccggactcccttctcccggacatccaaaacaggttaccttgtccacgctctccggaccacgctttggacttgctcacttttatttaagagtccgacgggggaaagagggaaaaaaaatccagaggagatccaagtcaattggaagaaaaaatttcaaaagggtgtccacagaggcgaaaaaaggtgacttattaattctttatttcttcaggagcaattgagcccgagagctcactcgtctccctccctccccctccctctctagaaattagtctcatcaattcggctccaattttgggttcgaatacagacacgggtctgaacgtgaccagacctggagtggcgggtgcagcctgccagcaattgagacttggtgtgcgtgttgggggtgggggtggggtggatggtgggatgggggccgggctgactccccccgctcctgtctgcttctcaatccaggggtctgctccggggctcccctgggaccgccacatctggttaccgctagcggggtcagtccccccctttgcctggggccaccagttctggagttcaattaaaagaaatcaggcttaaccctttcctccccgcggcaggctgcctgccctctcactcctcccttcagcgtttccacgtgctttccagagaggaaagaggttaacgggaaaggaagaatgaattacatcctttcaaaccccaaattgtttccttttcagcccaggctctaccgaccttcaaactacaacagagctttcaggagaatgcggagagacggcttcccacccggacctcaccagaaacccgcacaccccagccacattgctcctcattcagccagaaaggactccaactccaccaccaggaggccccccttcctggtgctggccagttgcagaggctgttcatggcatcccacaggtggcgactgccccccaccctcctcctagcactttagagggtccctctgtggcagacaccatggctaggtttctctttccaactcctgttggtctggcaagtgacagatcatcttcactacattaatcagtagtcacccgaacattcctatactgtcccccaattcctttcagcaccagctgcctcccccactggaattattcaatatggaactagattaaattgaagacttgccctttagtttttaactgtggaactccatcgcactttctgtttctccaaagctacggcaatttcatggttttggagatgggcggggggtagtggagagcctggcacaggcaccactagatgcatagacacaggcaccccggccctttgggactcacagactggcactggtgccactgttgttggcgattttcagccccctgggagaagctcctgtccattcacagaggtctccacccagaaagaagaccccacctaactctgactagatgcctgcgggaatctcggatttcctccatccagtgttggcatgcccgtaggtcagtttgccccacttttatgtaactcagggtttgatggtcaactccactgctactgctgcttttttaaatcctgaaaggggatgggggaagcgccctaaccaagcacaatagtaaacaagtctaccctgtttaatgtggttaccaccagacatctggaaagatggtttgatcctggcagctcacattgttttcacgagcagccaaaggggatattttgaatgtttgcattgagacaaattgatagagagcctgcggtgagggcctacaaatgaaaactgtcttgtgttagtggggcagacctccccttccctctcctctccctcctctcttctctccttcctctttccttagtctctgggcccagcttggggaaggctgcccctgcccacacacttgtgcacaccctctttcctggcttaccatggctccaatggcctcgccctttcccagactgggcagagctgctgaacaggagctggtatgagtgccatcggcgacagctcactttccagcagctcggggctggttttcaagtcagaggcagctcacagccaaggaagctcttcccagtatttaaaacaaaagctaccaactggagaaaaaaatgtcccaacaacaaaacagcccaccacatgtttccaagtctggggtcacttacagaaaccgtgcacatgggcgtgaatactcaggaaatatttggatttggagcattttcatttggaacgctggtgagacgacttgcctcgcaccattcgcacttgacagtattttcaaagatgcggaagtcctgcttcccccgggaggggagcggcgggtcgaaacgtgtcttggctcgctcaatgtcagcccttttgacccggtcaagactttccagacacgggcttcccgggcttcttcggccccagactgggtttggggtgggcggacctgacgatctgagcctggtccctggggtaacagacccaggggtggctccgtcacttgaaactccgcaggatgccaggcctggcagaatgtctcgggccgctcctctccctccgtccttcgtcctcccctcccatgcccctctggtccagcgaggccgcagcgggtatccgagctggcaaagggggaggaggagagggcgggagaaaaccggaggggtgggcgggcaagcgccaaaactccagactgcacaaatgcagcttcaagtgtctggcctctcgctcgaggccataattaatttgagatttatttttattggagaactcgagtctcgtctgaccttagccaaacaaggcagctcaagccgcccctggatgcgcttgaatgccggggaatatttctgcaggaaggctctgcaggcgcgcctgctttgaatttgtttctcagacttcatctactcacagagtgaaggaagatttagagcctctgctcgcctggcccgctccccacgctggttcttgccttagcgctgagcgggttcagaacgctacgtgggaggccgcggcggcgggagggccgggggcgggcgggttggggaggaggagggtctccgagcccccagaccacgcggcgtcgctgaggaaaccccgagggagtccaatcctgaccagagagagcaggctgacaagaggtggagaccagccaggtgtccagaccctcgcccagtggcggatccaagatggggccgttgggatggggccaaggtgggttcagcttctccaatctccatcacaccccctcctcccagccgccccaaacagcattcattctaagaacagatccgtggtcttgaaactcagcttcgagacccgccggcaagaccaccttaggggtgggtcactgtgaacattctggggctagcaacctcctttcgtccgggggacaggcggaagacggcatctccctcagaatgcagcctgggcccaatcctcaggctgataagtgaaggagttagagcaaggaacctggggggtacacaaggagaaaaaaaggaggaccctgccagtcctgcgggggtgttgggcggaggacgggcgagaagctttcagatatatgctctgcgcgctaggagaaagtgctttgcactccgcgggcatcgtgcaggtgcgggtcagggttactccactgggtctcctggtccctccacgcctccatccttaaacaaaatatcaggagcggaagttccagtttgaggactagcgcacctaggtttgaattctagctctacacttactagctctgagggcttgaacaagttacttaacctccctgtgcctcactgtcctcatctgtacaatggggttataataggacttatctcaaagggctgttgtaaagacgaaataagcctttagaacttgcctggcagccagcacaactttgtcattactctatgtatcttggctctgcccctcacatcacattaacctcacaatgcctcagtttctcgcctgcagaatggactacctcctaagattgttgttaatattaaatgagctaatacagacacaacgcttagagcagcggctggcgaaggtaagatctgagaggtagctatgaatgtcgttgcggttatccatcaactactgcatgtcagtgtctccaagtgtcaccctcttccctctctccctttcccttgttcttccctgcccctttcctacctaaagcgctcttatgtgggcaattacctcctttacctctctgtgggacccctcagagcccagaccactgttcagatcgtgaccccggtggagccggcacccttggcccctaggggccaggctgggctcctccctcatggggcctgggcgcctgggcctgcggtgtttgtcaacaactcctgagccgggtgcctgccggacaacggcaggggcttggcagcctgcaactgtttgtgcccctctggcaaatgttcgatggagggagccggtggaacagactcaagattgtccctgccacgcagacctttcgccgccatcaatgcacccctttgtgcaacaatacaaactttgtggctgctgaaaaatccatttttccaccttgaaaagagctcctgcagcgagcagcttctctggcggcccacagctcccagactgccgtctcctcgcctccgctttgtccctgacccgtggcctgagtcgggttccggggctcccacgtgcccctctagggctcctcatccctgaggtcctgggtcccggggtgtgtatggactcgagggttcctatgagtgggagagagactgcagctcccctccccggggccatttacaatcctcagtgcagagctagaagtgagagctcctcttgccgggctcgggtactccgagtggtgggagtacccgagtactcttcctaaacttctcaggaaaactggggacagcgaatccgtgcgcgccttagtctaaccttaaagtatgctctgtaacctcctgggagtcattttgctatccatccattcactggttattgctacatgaattacactgtatttcattcattcattcactcactcaggcattgtcaatgaaacacccctttttgggccaagcctctaggattaggccttcccttcctgaaatgacgagtgactgcttcacacgggaagatgcgtccgtgtgacaagttttcctttagagagatctgaggagggttggacgcataattggcaatccttggacaggacccgagagtctgcatcccatcacacagggccagggactgccctggcatttgcccgacactcgagggagctcagctgggcctcactgaccggtctggggagcacttggaggcggggcttcaggatggggagggcggggcagagatctgggaaaagtatgcgggtgtttgcagcactgcggagagtccttcctcctccgctctcggactgactcagatggtcctaagctttgggtccctactcggagggcgtcaggtcgcggctgcatggcgtgaggggacccagtcaccgcccctcccatgagcagggcctcctggtgcgcactccccgccccacccagccagcggattttcatttaacttgtaacccaggtgtcccagcttcagtttgtttacattcttggaaactgttgtggaaaagaaaaaaaaaaaccaaaacccttcgatgtgctgtcaaatatagcaatctgcgcttccgaagggcgggcggggccaaagaaggtgggctcgaggactgagcgcgtgtctcacctgtaggagaagcgcgtggcgcccgcatacccgcacacaaccccacatacacacgcccacatgcaaacaggcgcacgcatgcacacatgcacagacgcgctcacacacaagcgcgcgcacgcgcttaatgcagggaacacgctgtgcgccagccgctcagagcaccccacccgttgggacctgacgcggcgagctgctcggtcttcctgcacaggcttcgccaggctctcctgctccaagtttcccaaacactagccgccaggagcgttgcttctcaacctaggattcccgagggtctgtgccactctcatctggccaggagcgccctagcttgagatccacgagccgagagtagggcccacttccacccctacccctttttcccggggaaagggaaaagggaccataggcccgggtggggtagaagctgggggtcatcacctgtttaaagacgctgccatgtcttaccttgatgtaagacgacgtgtcggggactgtctgaaacatcgtgggtagctaagggtcgggaacgcccaagaaccagcctgggagggagaagcctcggttacccgcgagtggagcgagggagagacggtgggatggtgatgaagtggggatgcagatggagagactgtaggggtttgggaagctcagatccgcctagtccggcgagggagggtccgagtggttgggtgttgagcactctccctacgcctcagtcccgtccccgggcttcaggccaggggacggtgagaactgagagccacctcacaccattgggtctcctccctacagtccttttactctcccctgcccgaaatcagactgccgcctcccccagggcctgggcagtttcgaactggggatgcccgcagcttgttctggaaaccaggatgttctagttcttggtgcgtgttgaggagagaacgcgaccaggacagaggtaggactcccctttcttgcaggctgaggagcagaagcttacagagctgccaacactcgcccctcagtgcacagacctgcttgacttcctcaccaccctttctctgccagcatccagctgcgctgctcttccctgctggtggcccggggacggaggaagactaacgcaaggttagggaggtctgtggaggccccttagaaaataggtttttgggaagagactgctacaatgactgtcaggtcctcatttttagtggcaggagagtcttacttaggtctgataatttgggctggaaggcgcaaaagccaccctaggttgccaggtgcctctgcgtgagtgggtctctccctgacttagcccagtctggcggccgtatctctcctcttcctttccttccttctcttaaccatctttaacgtggcggctcacagcttctctggcagccaatgtgtttctgataaagcacttttctccccactaacaaattccagcttttttttttttttttttttttttttggctcctcaagccacaagagaacacacactagtgcagggacaaggtatattcctcgggcccagagattcccttcgccgcctccgcccaggcgcactttcttcagtctctcccccaaccccagcgaccccaccggtcccctacatttttttttttgaaagtcgaagtgtaatttacaagaaaacagagaggaaagaaggagaaaaaagaaagccggagaaaggagaagaccccaaagtcccacatttcccgactgcaaccagaacaagcagcgagacacactgaggcgccccgaccctgcatcgcccccagaggatcggacgcaagtgggcactcaccttaggcaccctttcctgctaagcccgcaggagcggaactccgggcagctccaggatgtgttagttcttggtgcctatcctgtgtgcccagagctcccagaacccagccagtgaggagttaaacctgctgcgtgcctggagtcaaagtttgcctctctctagggcctgcccacaagcagcctcagctcaggcgcatcctggggggctgcaggagccgctgtgcaggagctatgcgtgcactgaagctttccccttcgctgcctcccgccagctctctgggtcccactccctcttcctttctctttccctttcttgtaatttgatttccgctttcttatcaatattccaactgctgtctgatgaattattcttacaggacagccaccagtttgcccccagctgcttttctagaaaccactcggtgttactaggaaactttaaagaacgctagaaatcatgaacgcatatcataaataaagacatacaactaagcgaagccaaaagaagacatgcagacccaggcttctttgagctgattatttattctttgaaagttccaaattatcgatatgcaagtaatcattcctcaaacttgatatcggtgaagttatcttttactttttgagcccttatgtttttctttcgtaagggttactccttccccttattgagtcctattgcgcccgccctcccaaccaccaccgagaatacacctcttcttgatccactttttctaggcagtatctataagagcaaagtggattgcaaatgccatagaaatagccatattatgaggttttaatttaaaaaacctcaaacatttaaaagcattcttgttaaggagttgtttctgggttgtcaaatttgtgttttcttaaaatttggaacgttgctcattctttcactcgaatggggctcagatttctgagtcaatgctcatatgggccctttccactgcccaatcccagggccattacccacaaaatagaatctgcattgctgagttggttgtgctttggggtgggcggcaccccacccctcactctcctctgtggatctctggcaacagggagttgttcacagttgtttctaacctgggtgtgggggggggggcagggtggcaggggagaggtgacaggtaaggatggagatgggagtatgtcagttagcaaaagcaaaccccacagcttcctgcaccactctgagttggcttctgtttctcaagcgttctcttccttccttcttgggtacccagatccctgactgctttgctctggaaccttcgagaaaatttatttagtacctgctccccctacccccttccccaattggctctggacatttctgaccaaaaggcaattagtaggattccatttcaggagaaaacacacctatcatccagatctccccacgtggggggtatgagggctggcggcagggttattcgttatttccttctcaacaatatcccgatttttctctcccatccctcccccagagttccacatattgaaacattttgctgcttaataagagcagccgggagagcaatgaggtgaaaggccagcctgggactgtgactggggctgcctgggctgggcacagagggctgggctgccccccgccccacattcctgaccattgcttaggaaaacaagacagggggcctggggagggggggggcctgaaggactagagccactgccccagatttttgttcttgggattcttggggagatcatcttccctcccaaaggaacaagcatgctattccaaacaactgcaaataaaacagtagatgctcctatatcagataatgcatcctaccctgatgtcatgcattttgaagatagattatctttaggaaacctggagacttgaaaatgaaggcttcagctgtattagagaaagtgaggactaaacaaattgtcgaatatctcaccatcctcagtttttccccttcttccctccctccctccctccctccttttcttcttccctccttccctccttccctccttctttccttccttccttccttcttttcctgagagagatttctaagagatcacttgggtacatccttctagatttgaagctcttccttcttcacattttcacagttgttattgcatccttatttgtagatgtatctgtttaatgtttgtctccttccaataccttgtaagctccctgaaagcaaaagttgagcttgttttgttcacagctagacacccaacgttcacactgatatccttaggcagagaagtggaacaactattaagctacctcccttctgtctaaccaataactcataacagaaatataaaacaaacaaaacaaaagtgtcacattgttattaaggaaaaactgacaggaaagttttacctgagtgatactgattcattttctgctttgcagggagggttacataaaatcagtgctcatgggtctgcttcatttgtgcataaatggtttaactagagagatcatgccccttccaagcaccctgggagatggtcacagatggagaggccagtgtcctaggctttgtacgaaactcatgtgtgtgtgtgtgtgtgtgtatgtgtgtgtgtgtgtcctatttcccattcttcctgtgattttagaagccagaatgggtgctcattccaagggttaggcaaatgatcaaaatcttggtggtcttaggaaaacagatgagctgagaatgaactgaggaagaatctgaagttcctttcaaacagggtttaagaaatggacatacacctggaagcctgctgtgtgtgtgtatgtggtggggggtggtgatgggaagggttgtgacatgctcactgggaaagtgagccctagccacccagtccagggtcaggggtggggtgagagtggaacccaggctatcttattttccaggaggatatggccaactccctttgtcacctggagccttcaattcaccggaagaaaattgctgaaattggcaacagctgccatgaaacaggagcaagagagaggcagctgggggcagggaggactcattaaagccaacttacccctcaaaagggagaatggggtggggagggggttcttgccccacagttatgctccctcgccagcctataccaagctgcttccctgggccatagatttgcaatgcagagcctgggtagaaagagactctcgtgtggaggttacagcagcaagagattggaatccaagaagggcactccagtaggagagcaggagaagatatctgggcagtgcccctctgaatcatccatgcactccatcattctgagcaagacaattaggacttagcttccttctttggcaaatgagagggctacattatatcatcatgaaatactttcaaatttgaacatgctatacttctgtaagattatttagcccggggaaaggatatgaacataaggcaaattaatgttctaggatta

SEQ ID NO: 15 - DNA, 143161 bp, Mus musculus
tggttaagcaacagatacatatatttggtcacccttctaggcagtagaaacccaagatcaaggatctgttaggtctctttccttggctagaaaatggcatcatctttctgcatcatcccaaagtcttttctctaggttctgtcttccccgggttctaggttcctctccttttttggtttgttttttttttttgttttttttttttttttggttttggttttggttttggttttttcaagacagggtttctctgtgtagccctggctgtcttggaactcactttgtagaccaggctggcctcgaactcagaaatctgcctgcctctgcctcccgagtgctgggattaaaggagtgcgccaccagcgcccggcttaggttcctcttcttagaaaagactgatcatattggattaaagcccacctgcatgactttagtttttactatctgacccctttaaaggccctgtctactaaagaccttcacactctggagtcctttaaatatctacagggatcactatgtaaattctgaaatgacacaacttcatcaagaacaccaggattaggagcagaatcaagactggattgtaaatgtcttaagacctcagaatgttgattttgccgatcatccgtacatagccttctccaggttcaacactctcacagagaacatagtgtattcagattggcccacattgcacgattgtgtaaacacatcagcatcacttgccaggtaaggaatccgagtcctaattgccttgctcagaatcacagactgttggatggaccacagcgtaccacccggatttcctctcctttcccctgctgacagtcttctactccccttcctctcctgacctctgtgtcagcattgctttctagactctgggtagaaagtctacaagcccagtcttgatagaagatgagtggccagtgacaactctatgaccttctttatacgacactgaaagtaccagctggctttaatgagtccttcctgtccacccttcccacttgttccggcttctggcagctactacaaatttgtgtacgtatttgtgtacagataaacacacacacacacacacacacacacacacacacacacacacaatcaaatgtacaccaggcttcaggcacatgtgcacactcatgtccaaaagcctatctaaagggagctctataaaactctctgttcattacctgctcatatgttttcttagaccacagattttcttcttgctaccgtgagaatgaatagccactcgaggcaatcacaggtacagaaggaactaagtcacaaacatcaaggctttgttccagagcctcgaacaggcagcacctccatcagcttagatatgggtccatcgcagggccatggttaagccacctgtgcacaaatgaagcaagtgaccattgctaccaggcactcttgctgcaaagcagactatgaaacagaaccactcaggtaaagctttgctgttgggacaaatgtgatgatctgggtcatttcccattcttctctttagttattggttaagagaaagataattagttaagggtaattgttgccttttctatacctgtttgcatttgtgtggctactagctactcatcttcgaataaaattagctctgggcctgccttcaggatgcacataagagaataaggagaaaaaaacatccaagagatatttctgcaaatgactacagtctcaggactatacaaaaaacacaaagaaggaagagcttagagctgcggttctcaacctgtgagttgagatccctcgggtgggggtaaacaaccctttcacagaggttgcatatcaaatatcctacatagaagatatttacattacaattcataactgtagcaaaattgcagctataaagtaaattgaaattattttacagttggagtcagaacatcatagggaactgtattaaagggtcacagcatgaggaaggttgaggactgctgaacagtaagtcggtggcctcttactagtctcccttttaaaaaggcaggagctggtaacaaacctgtgatcttgggaggcttgcattggaggagctcaagttcaagactggcctggacaacttaatgagaacctgtctcaaaattaaaagtgaaaagaaggctttgatatagagcacttgcccagccattggtccaacccctactatcaatcctgaaaaatatagaaatagataaataaataggaagacggaagacggagggctggggttgggggggggggaccgaccagggatggtaaggcactaaacaatttgtttggctctcatttcctctagaatacctgaagcccttcagacctctctactttcctaaagaaagcttatctttaagaacacgggatgtacatgtagacagtaatttctattgaccattgtttgaaatagtatgctgtccctttgggaaagacgacatctccccaagaatcctaagagcagaattccagggaccctggctccggactgttagccccctcccttcctctgaggtcttgttttcctaagctacagtcaggaatgtgtagggaggggcaacgtggttgtgggcaaagatcccgggctgctccagtcaccagtcccagcctggcctttcaccttctagctcttgggtctgctcttattaaggagcaaaatgtttcaatatgtggcgctttgggggagggacgggagagaaaatcgggatattgttgagaaggaaataatgaataacgccctccagtcttgagcagagccccccacgcgggcagatctgggcagataaagtatgctttctcctgatatggaattctgtcccatgccttttggttagaaatgtccagagtctgtagggaaagcagggagttcaggggaatgatgctaaactagctttgtaaagattccagaaccaaagcacccaggaatctgggcactccagaaggaagggaaggaacagcacaaaagtgtgcgcctgctgctatttttacaaattactatgcctccatctccactttctgttgcccctgcctttgcccagatacctaactaaaaatctaagactcactactgtggtccctaagagagagatccaggcaggccaggtgagcagtttcccctggagactcttgaaggggagtgtaaaaatgtgaaatctgcccagcccattatacaaaaggcaactggaccacattgccaggcatccttggggaatagcctgttgggggcaggggaaggcatctgatcagaccaaggtctctgaaacctgagccctgtccaaggcccttctacaaggggaaagagaagaaacgagtaacattttaaatcccaagaaaacagaagttgaggccaaaacaacttgttagtgagtgcttttcaatgcctgagctcctgagaaaagactcaacatagagatatctccctggtggctgtattttgcccagctctgaaagagaaggtagccggagaatgtattcctgagaggatcagataaggggaaagtgggaaaacaggagcctgaatgggcatgagtgtgtgtgctactagaaggccaagtctggagagccattatttacatagcaatacattcaaactttcccagaagtgttcagcctgggctctttagtctgtgtgtctgtgtgtgatgctgtgtggtttctaagtattcctagagatttcctggtaacaacaggaggtttctggaaaggcagctggggacagatgggtggctgtctttttagaacaattctgtcagacagcagttgaaatattgataagaaaccggaaatcaaattaccagaggggaaagccaaaggaggaagaggtaggggggatgcacagagctgactggaccacggaccaccacggcaagctaggaaggctgctgtgaaaattctggcggctgcagcagaggttccggtgtgcctgagcagaggctgcatctgagctttgagcaaagaagaaccatcaggtttaattcttcattgtcaaagttccacagagctgggtcatagaatactgttgcatccacagccaggacatcctagagctctctcggctttgttggtaagggtgtcttttaaggtgagtgtcctctggcatctactggctcctgcccttctgagagtccctccctccctccctccctccctccctccctccctccctccctccctccctccctcccttgactgccctggtgccctggttggggatctcttcctcctgttcatttcttttaccctccctgcactggtgttcagagaaaatggggagagtgaagaaagaggtctgaatcagcaagggaaacgcatgtgccagagaacaagtacctagtccctgaagtagtgagtgcctgtgttgtggcttcaggagtcaaaaaagctggaatttgttagtagggagaaaagtactttatcagaaacacattggctgctggagaagctgtgggattgccttgttaaaggtggtttcggagaagggaggaaaggagggagatggaggcagccccccagtcttaaagcagaggacagacctgcacaggcagaggcacctgacaccgtaggtggtggtgagtggcgttgcttctccagcccatggactctgacctaataaaccaccttctctgcccctgaaaacaagtgcccggcgcccaccatcctgggctgtgctgcagatgtgttttctttcaaaagagggagatgttagatcatcggaaaggggcctccacaaacgtcagaacctagtctttctccctgaggtaaccataccctggaaggaaagagtgtctgccaccagcctgacttagtggtagggaggtgggagagccaagaagatctctgccccagggcctatggttactctcttatgatctgttctctggtgactgtcagcttgaaaaggatagctctccacttcccaaggactaccaatcctttctgtcctctaaccagggtgcactcttcaaaaccccaggagtgaaacctcttgagcccttgtgaagcctgcaatgtctggtttgtacaaagagaaagctggttcaggcctcagggtctcctggcctgaaattctataggcagaggcagagagtccctagaggcttctcaagggaccagcccagcccccattgccttctctatatggagcttgtctcacctttactacacttttgagatacttatatttttcctacttaggttgcttctggagccttgaggcgcttcctctttagcacaagatgtttcagacagtccctgacatgtcctcttacatcaaggtaagagtagacagcatctttaaacaggcagtgatctctgcataactcccacctctcctgaagacctttgatctggtctttctttatccaggaaaaagaaaaaaaaagaaaagaaagagtgaagtcttggcttttctgtcatcagggcagcactttggggagacagggtgtgtattgcatgctcaatgtgactggtgtgtgcacatggacatgtgtgtgactatgtgcaagtacagtggacccaatggtttcttttactggatggacctgctcagccttcaaactcacctagagggcccatccctcaaaagctcagattgctgtatttgacagctcatctaaggggttgttttcccctttccacaaccgttcccaagaatgtaaacaaacccagactgggacatctgggttacacgttcagtgaaaaatccctggcgggtggggtggggaatgtacactgaatggccttgcccagagtagaaactgggcctcactctgcacagccaagaaccgggtggagggcaaaggtgtttcctttagaactgggctccttcctaagacccaccccaagtgccctgcccacacaccctggcccagcatcctcctgcttccagaaaaagggatggcagggcatgggcccatctgccaaaacatcttcggtataggtttcttaggtctaagaagggagcacttgtttaacacctcaggaacttgttggcagtggaaagcatctccctccttctgcttgctgtctgaagcaatggtgttctcttcaggaggagtccaggaggattgctctgggaggagtagtcactaaacaaggatgggaggggtgggggaggaactggagtaaaaccgtgtcaataattagcccttgcagagatggatggatggctcccaagaggtgctaccacagtaaacgatgagatcagactgggccaggcagggctctgggttccagttttacagaggtatagctcctacccttcacctctccctgcaaagaagccaagcccaggggctcttccagccttacatgcaatgttctaaatggccttcatcctgggctgcagcctctttccagctcagacaccaggtcccagaatctcagggataataactctccaaagggcaagggggaaacccagggtctgacccagggttaagggtcatggagaaaacaagctggtccaggacagagtagcaaaccagcctggggtgggcaaagaggccctgggagagctgtgggctgccgcaggagccgcttgccacaggagctcttttcaagggggaaaatggatttttcagcagccacaaagtttgtattgttgcacaaaggagctcattgatgttggtcaaagttctgcgtggcaggacaatcttcggtctattctgcaggcttccatcaccgaccatttgccagaggggcacaaactgccaagcccttgctgttctctgtctgcaccagctcagagttgttgataaacaaggggagcccaggtgacctggccccgggaatcaggagctgagagccctgccctaaggaacaaggagacctctccacccagtctctggatgcagcttactacagactgagggctcagacctggtcctgcaggagagcccttttcagggtggggattgaaggaattagagaaaaagacagaggaacctcggtgacagttaaagatgctgatatgcagtcctagatgcctagctattgacagctgcctccctttgccaggccctgttctgatcattgtgcgtgtttgtaagagagcaagttcaagacacagacactaaggagagtatactgactgccaaagaagttctaacattcatgtccatcatagcccttttagatgcatcccagtctgtggccattgcgcagagagggacactaattcagagaggttaagagtccagaggaatccagtggtccagcctaaactttcacacacgcggaatctgagttaggaggtggatggagaagaccagagacccagtgcaataatgcggtccaataatagcacagtacttacattcctattccatcaaatggggcgtttccttgaaatctgatacacacacatacacctgcacaaacctgatagggttctcttctttctgtcctccactctatcagcctgaggattttgcccatgctgcttttgggggtgacatcctccttctcccttgactcactcaaagggaggctgctaggtcctgaacctgcacagtgatactgcccataagtttctggcatgtaggtcctgaagctgcgcttcaaggatactggtccgtatttggagagaatattgtatggggctactgggaggtcgggttggctgagattccagaagctgaacccacccgcgacctccatagtccccattatggcgccgccactggatgagggtcgcgacaccgggctggtctccacctcctgtcatcctgtgctctctggtcagtctccgactcccttggggttttctcgacgacgcctagtggtctgggggttcgccttccaattgtctggggctcgggtctctgagaccctcctggcctggccccctgcgcggctctgcaggcgctgcggcctcccacgtagagttttgaacagggtcggtgctaaggcaagaactagcgtggggagcgggcagggcgtacagaggctctaaatcttccttcaatctgtgagtggatgaagtctgagaaacaaattcaaagcaggcgctcctgcagagccttcctgcagaaatattccccagcattcaagcgcatccaggggcggctcaagctgccttgtttggctaaggtcagacgagactcgagttctccaataaaaataaatctcaaattaattatggcctcgagcgagaggccagacacttgaagctgcagttgtgcagtctggagttttggcgttcgcctgccaaccccttccccttcccccaccccctcctccacctcttcccctcctgctttgccagttagataccctctgaatcggtgggagaagagaacgcaagggggaaagctctgccacagactctttgccagacctggcatctttaggaacttcaaatgacccagatgtcatctggtccgaaggcaccccagggattgggctccgattgtcctgtcctcccactcccgtcccagtctaggaccaaaggagcccgggaagcttgcgtctggaaagtcttgacccggtcaaaagggctgacattgagcgagccaagacacgttttgtcggccgtttccctccctggggaagcagaacttccgcatctttgaaattgtcaagtgtatataaagcaagtcgtctcctcagtgctttaatgaaaacgctaaattcaaatgtttcttaactagtcacctaagtgtatacaacttagaaacgtgtgtcaggatgctttgttgttggaattttcttttccagattgtacctttaaaaaaaatatatttagcctggcttcttgagctatgagcttcccctgatttgaaaatcaagaatgggctggtggaacagcagcaaaggtactggtaccatctcccaacctccagcccccagccctgcccagtctgggaaagagtgaagcccacagtccttagagcgccaggaaagagggtgtgcaccactgtgtgggcaggggctgccattcctgagctggacgggtacacagggaagggaagagccagtgagagccaaaagggggggggggtaggaaagggaaggggagtgagaagcgagagaaggggagggacctgccctctccagcacaagacagttttcatttgcagcaggcctcaccgcaggctctctatcaatttgtctcaatgcaaacattcaaaatattctctttggctgctcatgaaaacaatgtgagctgccaggatcaaaccatctttccagatgtctggtggtaaccacattaaacagggcagacttgtttactgttgtgtttggttagggcttttccccccttcgggatttaaaagagagtcaggaggatccagtggagcaccatccccagagttacataagcgggcaaactcgcccaccagagcaacagcaagggatgggaggaacccgacattctatcccagatctgttcaaaactgggggacagtgccttcttctgtgtggagaaccctgtgaatgagaggaggttccgatggaggggtcggtggtaaaatgtcaatagattgcaatgatgcctaagcctgtcatgcccgggggagcctatgccagcgcccctacgccccaaaattgtgaaattgcttcagtgtccggtttgcaggcagagacaaacaaaaaaatactccctagctgaggtgggggttcaagtcttcatttttatccggattcttgttgaacaagaattcttgttgagaaggaattgggctcaatgaagttcggggatattccaagtgaattattccagtgagtgttattcagcaatggacgtgactgtcgtttgccagatcagcagaagccgaaaggaaaacctggtgattgtctgccacttggcccttggggcagggcggggcggggcggggggcgtggtgattaaatgtggattggctattttgtggcctttgtaactgtccagtgcctggaaggagaccctctgcggggagacgtaaacactcctttcggacagaaagaggctcagtatagcctgggtgcaccctcctgaaagctacgttgtcgtttgaatgtctgggctgaaaaggaaacaatttggggtttgaaaggatgtaattcattcttctttccctttaacctctttcctctctggaaagcatgtggaaacgctgaagggaagagcaagagggcgggcagcccggccgcaggcaggaaagggttaagcctgatttcttttaattgaactccagaactggtggccccaggcaaaggggggggactgaccccgctagcggtaaccagatgtggcggtcccaggggagccccggagcagacccctggattgagaagcagacaggaggagggggagtgggcccggcccccaccccaccccccacagtaaaccgagtctcaattgctggcaggctgcaccgccactccaggtctggtcacgttcagacccgtgtctgtattcgaaccccaaattggagctgaattgatgagactaatttggagagggggaaggggggagggagggaggcgagcgagcgagcgcaattgctcctgaagaaataaagaattaataagtcaccttcttgccgccgtggacaccctcttgatttttttttcctttccaatttattcggatctgctctggaatttttcccctcttttcccgggaggactcttaaataatagtgagaaagtccacagcgtggtctgaagagcgtggaaaaaggtaacctgttttcaaagtctgggagatgggagtcaggccgccagcgccgataccccagagaagccttaacaagagagctcctgggtccagcaggggaggcgcgggggatagcagaaagaaccgagccggtaaagcgggccacgccgctggttgggaatgacagtccctagcttggacccttagactgcccgttctcatccaaggtggggtctctgctgagccgcggctcgccgcgctcctgggtcctgctgcgtagtgtggagggcaagctcgccctggtgtcagttccttgggggctgcgatggtattgaagaacttgggccgtcgggtcctgataggtgagagaatttaactcaaaaagcctaggttgtggctggtctacctccttagcgggctgtggagcccggagtcgaggcgcgccaaagcatgggcatctctctgctaacaaagcttgaggtattgagcccttgacaggtcaggtccgcgggacccagaattcgctttgagcctatccggagaccagcgcttagatgcaaaaactctcttcggctcctctctttctttctttctttctttctttctttctttctttctttctttctttctttctttcttccttccttccttccttccttccttccttccttccttccttccttcctttttaaaaatagtaggtttgccttgatctgcatccgaatctcccctggcggtcagcatcgccaggttatcccctgttctaacaaactcttccgccgtcttcctcccatccccaaaaaagtttgactccggctggaaaaagcattaatgaatgtatctgtgggaagaaacggaaagtgaatgagtcaggagggccaccttcggccaaaggcccaagggaaaggaaagaggccagaggcgtttggctttggatttggggggaaggtgatgggggagttgcagacttcaggaatcagggagcggatactgggcgtggaccccgtcattgttcctggccagctcttatctcccaggagcaagtatcctgtgtgcgcagtgcatgaatgtaactgggcatcccgcgtatatttatatagcgagtgatgcgaaaagcagggcgaggagaggacgagggggtgtgggggagggaagacaagagagagcagagagtggagagggcgagatgagagagagagagagagagagagagagagagagagagagagagagagagagagagataggacttcctccccgatcgcaaagtgaagtcacttcccaaaattagctgaaaaaaagtttcatccggttaactgtctctttttcgatccgctacaacaacaaacgtgcacaggggagcgagggcagggcgctcgcagggggcactcagagagggcccagggcgccaaagaggccgcgccgggctaatctgaaggggctacgaggtcaggctgtaaccgggtcaatgtgtggaatattggggggctcggctgcagacttggccaaatggacgggactattaaggtaagcggctgggcagtgggcgcggggagagggccgaccggggcggcgggagggctgggcgccggggtcccggaagacgtggccgctctcccttccttccgcgccccggcttcgcgcggtctcctccgggtggcgagtcccccattccgaggaggccggccagccttcccgcccagggcgatctacccctcactccttgcgccactgtggaatcccgcaggctcccactgtgccgcccgaaggggctgcgagacccggcagctgaaacctggggacccggggcgcggagcagagtctcgggcgggagatcgccgggtcggttcccacccggcacccagacgacctggccccggcgccaggcactagtctggcggccagcttcctcacgccagaggccgagatctgcgcgggcaggagcagcgttcgcctctggctggggtcccccgaccctccgagcgagttggaggagtagttgcgggagggcaaggggtgcaagggagggtgtctgaggatccggctgagccggcgggtccagatggaagaccctgtttacttgtcagccagaccggtttctcttccccccttctcactgctgctgcccggcagttgcggacgccggctgcctggagctaacgggcccgcctcgcagttcctcgggttaggaatctccttgctctccggctcctcagtgcctcagatcccgcacactgtgcgtgcgcctgctttagagcaagggatccaggagctgtcctctcagtaagaattaaactccttcaacagctgtccccctgcggtggctggttcagagtctatggcctggggcttgccgattgcacccccacccccacccgccacccgcgccggcccagcttgggtctaggttgcaaagtgcagaccagcagacctgtgagtctgggttccctgtcacgcttcagaaaggccgagtgctccctccgaaagggggaagtagggccaggagcagagacgagggacaccccctaacgtgactagcctaagaggacttaggagaatgaatgagagcagacgttagcttcaaggctgcatatcaagcaggaattgctctggaaaaactatcaggctggtgaggtggggactggcagagccgccattctccagaacccagaggaatccacttccctctcatggcttgatgaagaggaggtgaaggtgttgttggctttagagaatttaacagatttttatcttctgggtggggtcagagtgtttttattttctaagagtctcttctctctctctctctctctctctctctctctctctctctctctctctccctccctccctccctccctccctccctccttctctctccctccctccttctctgaaacatgctgacttaggtaaaaggcaccaactgaaggaactcaaagacagatgagatagccgattgtaatggggttttaacacaaccacctagccacaggtttttcaaacctgacttgagagtgttcctaaggggtgtgctctggagacctgacagtgcaggtccctgggccctgcttctctgcttcctgttggtatgttcctgcaagtgcctacatccctcaggttcagtaaccagatggtccttcgaaaatcttcacacccccattcagaacactatctactcacaacccccccccccaaactcccctaggtcctaaagggtggtaatgtggctccagaggcttaatgtggacactctgagaagaagtgaagcaatatctgcgcagtgttcagacctctaagcacaggccctgagctctggaggaagctgtggtctgtgtacccaggatgtgttaaccccacactgtgcacaatgggatgggcatgacaggcctcaagggcaaccttagaccaggaggctgccactccataccaaagatgggggtcagggctcttttagggtcaataactaacaggagctcatgagccccccccccagacctcccaaggaataccttgtttctcacctgggagacttaactccaaggctacctatagatcaatcgcttttcaagccatcttctggataccaaaggttctggaagattgagtctttcgtgtatcctttagccttttagctatgtagaagccataggttcttgtttatatgtgaccttctgatttggggggtcctagaccccacttacatgatggtttaatgccatgcttggtgtagatactgaaaggcactgaattggaaggaatgtcaaccaacttgtgatcttattatatgaatttacagctataggacatctttgaccttcataatcttcataaaaatcccatgggactactttacactggtgtcccagttgcttgtgtactaaaccactatcctgccctacatggacaaaggtcagaggatactatcaatcaaatgtaaatctgtagatacagacctagagcacttagctcgccagtttgaacagcctgggacaatcagcactgagtgattctgggatgtgatcttatgcacctgcctgcatcttcctcaatctcaatctgaaaatacctgtgggtcttgatgcccagggtgtacatggttcagggtgccagggaactctggctttctttacagtagcctcctgttttgtttagcatctatctttgggagttgtaaatgtccagtcatgctgcctttccaagttagggcccctgcttttccaagaatgtctgatgggagaactcatatggaaagcctcagtttgtttgctcttctttagctatagacaagttaacctgacatattaaacaacaccctaccccacccctgctcgccacagcgatattatcagtgttagaaggcacgtgatactgcttgctgcttgaagaaatgacctggtttcaaactgcatctgagttctaggcaggttttctttgatcagattgatgccatctgtagaactacgaaggtaaagtgcaccatcaaagattggaaatcaaccagagaagagttttagaacctgtgtgcatgaacctggggaatacggaaagagaggaaggcctgggagaaaacctagcttcattttcatttgtactacttgtgtgtgtgtgtgtgtgtgtgtgtgtgtgtgtgtgtgtgtgtgtgtgtgtgtgtgtgtgttaaggcaaggctcttaactcctgggtctcagttttctcatctgtaaagtaggtctaaagcagcttctttagataagccgaagagagggtgagataagatctgctgctttaggtggatgctcactcgttgaacttagtgcattcttgccttcgtactgatgaagatctgttgctcacagttaacaggacataggtctgagtttaacattctgcgaatttcatgactttggtatgtatttgtggtgtacctctcatgttctaaggctctgttttgtgtatgtgggataatcagcagttgaaagtcatctagtgatggatgtgcatagagacgaacgtgattagtgctcacccatgacactggaccaggtagggagggcactgctaataaggtgcaaaggggcttgagtagagagagcacttctaaacaagcactaaaggatggtagaggagagagagaagctcccctgtgaaccagagaggagcaatatgccagatagaggggaggctgctactctctctgggcagagaaattgggaaggaggggaagtcacctaaattcacaaggacaccaggcaaactagatggttactttgtctgtccctatgaccacgcgattgatctctgaagtgacttccaaatgaactgttgccacttaaaagctttctcttcatactattcacattcatgggtgtgcagtttttaaagctgtagaaactatttattagctctcacctatgggaaaatcaaggtccggcatgctgaatacaaagttcatgatcacagacgaaaaaacatgagaattcaggggacctaggagatagaatagtgctcttactactctaacatgaagatgtcacttgtcacatcatgtaaaattatagaatactgcagaaagagacctttaaaaaagaaaccatgaaatatctggcaccttctgaaatttagtgacaaacatattcccactatcttgaattacatctgtacacacacacacacacacacacacacacacacacacacacacacacggtgggctggggaggagggacagtcaaaattttcagacaggtttggaaaacacaactcttttccagaataaatctgctttgattctatgcatcataaacaaagttgccattaccaaaaaattctatccaaaatattctattacttaaataatcagtgggcccttttattgatggtgggcaggtgtaaaaaaaatgaggttttgcctctttaaataaaacactctcggatgtattaggagaaacctagtggatctattttctgaacagtgaagcaagaaggtctttggtaacagccccgttaaataagatttaaaatttcaatgtcttctttagtttgaggttgagcactaagttggcattggttttaaaaattgtttggctgaaataaaacccttttccctctagaaatgtagcattagtctaattcccagcaaaaagaatacataaataagtaaataaataaagacaaaaatcttggcaatgtgtttttgccgttaataaacttccctttattcttcctaaacctcacaaaatatccccaaactaaagtctcattcaacctaaagcttgatatataggctttcagattaagccatctacatttattggcttagaatgggaaatcctctgctctatttcatctagatgattggctgtataatgttggcatagaatattttttgttgtgaataacatgaaattttgaagactggatttaaaaacctgtctatcttttgttcagtatgtgtgtgtgtgtgtgtgtgtgtgtgtgtgtgtgtgtctgtctccctctgtctctctgtctgtctctgtctctctgtgtgtgtgtgtgtgtgtgtgtgtctgtctcgctctgtctctctgtctgtctatgtctctgtgtgtgtgtgtgtgtgagtgtgtgtgtgtgtgtgtgtgtgtgtgtgtgagtgtgtgtgtgtgtgagtgtgagtgtgtgtgagtgtgtgtaagcatgaccagcacatgaagctaacaggatgacctgaggaattggcattcatcttccaccttgttttcgatagtgcctctttgctgtcagctgctgtgtgccagggtctagctggcccaggatcttctgaagaatctcctgtttagacctcttatctcacagcagaaaccctgggggtagtggcctgtgttacttctgtctgttttcatgtgactctgggcattcaaactcaggcccccaatcttgtgtggcaagccctttacccactgagccatctccccagcatccttttgcttgtttgagaaaaacagtctgagtttcattggcttgtcttaaactcacaatgtgcttaaggacgatcacaaacttctgagcctcctgtttcacctcctgggagctgggaccacaggaagatgctccatgctggcctataatactttttctttttttggttgtctcaaggttctgcaggtgtttttctctgcagaaggctacaccctgtttcattttctgttgtttttatttctgccacgttacaaagtgatacactcagattgtttctccagaggtaacaaaaagaatcaccatcccctcaccatgctgctacccctgggcctagcatctttaaaatgaggcaggctagaataacagtcttctgtatgaagtggagactgtatgttgaccagccatattaatacaactgtctggctgctcttgagagccagacctggtgacctggcttatattctcaactagaagatgagctgtttattctaatggggtttaccaagtgccatgacagccctgtgcaaggaaagaaaaatctgaatggcaccaaggagtagctaatgaaaaggtacatgggtagtttcttagtccttgttcccttggcattcatccttgctgcagacctatggaagtttatactgccatagctccgattcacacaaaagaagtggaagttcacattggtgagattgcttgcccaagattacagctaataggtggcagagttgggtttttcaagcttagtctttctgattgcaggatgcctgatgcttctgcacacacctttcatgctactttctgacataagtgaacctggaagttgagccttgaggtatggatagacttatatgtggtactaaggtcaaaggatttggaaaggaaatgcattggagaaggaacggaaagattagatagaagtagattatagaattccttaaatattgtgataaaagattgagtcttataaaatatataatcagaaataatcaatgtttaaatttatggtagtctacatagccgtacaaatcccttagtgactgtcctaccactgtcttcttgctgcctagtcaataggaatgacagtggcttattagaaactttactagaaacttctggtgagccgtaaggacaagacagtagagatgagtttgggaaaacagaaaggtccacccgacagtgcttactaagtaggcactaagcaagggagggaaaattccatctcttctgctgttataaaaatgtggttacacaagagcgaggcgcatgcctgcattcccagcacttaaaatatagagacaggagaatcccaagcccaaggacagtctgggacacttagtgatttcaaagtcaggctgcgccacatgccaaaacccggtttccaagagccaagggctgtcaattcagtttagtggtcaagcatgcgcctcgtctgcacaaggctggatctgatccccagaacgatgagaaatgttttagaatgttgattgttccgtttgctccttcacatgtgactctttgcccagtgttctgagcaagctcaccgtgaggtgtgtctgtgattgggagggtctctcctcggtgacaacttcagctctttttaagaatgagtcagcaggtggtaagaaaccatgcagaagggaaggttgtttccctgaaactcaaacccaatttctatggaaattcagagaagtgtgacattctctcatgtgtaggttgggccaggtgtctccattactagcactcacatttcatctgatcaaaccaagacacacattcttttgtgcctcgttcctgttggatcagagacagaaggtatagctcactttcagtagttcagaccaactttacggcagcttcaaaatttctcacacctgaagtctataaggcatttcctatctctagaaaacaacaccctgccatttattttatgttcagaatctcagagtccaaaaggtttcaaactctccaggaagacacagactctagtcccgtggaatgattttcccaaaagcaggcccagttattcagccagagcttagcatccaaggtcatgaaagacttatgtcacatttcagtgcacacatgcaagaagcccgaattacaggtggcaagagagctttaacccggtgtttctagacatgtgtggctttcacatatctactggaatctaacagaccagaagcgaatttgttcattctgagtaggcgtgcgttcattgattttatgtggaaaggcatctagtctgaaagcaactaattgtacactactatttatgcagctaaaggatgaaaaaaatctttgatattgtagataattcagcttttaagtcatctttatactgactctgttggaatcctcctctcaatatcctggaatttatatgtctatgaagtcattctgtatttagacatttattctttaattcataatcatttattcattcactcatattgaataggcacagtaggcacagtgtaccagagatggtccacatccttgaatgagaaaaagatgtctccactctctttccttctttctttctttctttctttctttctttctttctttctttctttctttctttctttccttcttccttccttccttccttccttcctttctttttttctttctttctttctttctttctttctttctttctttctttttctctctctttcttccccccccccctctctctctctttcagatttctaaagagtagaagtttctcagcttccttattttgagctctgataatccatgattccaaagaaggcaaaatctgtttgggggcactatttatgcataagccaacgttatggacacattaggcatagtgccccaagagctccatgcccccttcatcttaggtgacagtggccctttatgtcacagtttcagaagcccagagcccaggaaactcctccaccttctctcttcctccaggtcttcaatgtgtatattaacatggagacaaacaaaacacatgaagtaaataagatggcactgccctggagctcagtgacagagcagcatggccaaggtgctgggtttgcctgccagcaccacaaaaaagaaacaagccgactgaaaagataatcaagaaagcttggagactttctccttctgtcaggtacaaggactatttacagatcaataagaaaaggactactcgatgggaaatggacaaagataccagaaggagaaatacaaatggacaatcaacttaagaatctcaagcctatgcgcacataaagagattcaaatgaaaagagtagaattctaccattatgacctaagaggacaacaaaagtgaaaagattcattaatgtgccatgttagaaagggtgattgcctgccttgtcctcatctgtatttattcagatactaaggacatgagcaagatgcttattgtagcatctttataatggcaaagatgaaaaattgtttaatttaatcatcagtaaaacactagataaacagttggggaaaatatatatgtaagaggttgccatgctaatgttacgtggaataaaataatttctatagacactaatgtaggaagttctcagtggaatattatcacataaaaaaattccaaactgcctagtccatttacagaagagatttaagcaaatgtatgtgtatgattatttatgtccaaataatttctagaagtacatgcattacgtggttaaaactaggtgcctctgaataggaaaagcagacatctacctttcatattataaattcagggaatatcttattctttaaacattactacctactactttcaaaatttaaaaagaagcaaaaataaaaatggtctgttagagatttattgaagccattctaatcaaactgcatggatccgagagacttgagatctcattttgataaattgtgtggccaaggagtcacacaccagtctaactcagactctatctcaaccgttggatcctaggcaagtcacctgactcctgttgctcacatgacatttcgctctttaatcatttcatgtgcaaactgagttacagtagcaacattctcttctaatcctaaattcattctgaccaggctgtgtactcctgggtctgattttggagcgtgggtgactgaactctttgacattctttctatctggtgtggctgctctaagatcttgtgtgattgggtgactcttaagaccagccatcggctgagctctgagggtgtgcattctgagcttttggaagcccaattgtctccactggcaactcatggtgcagtggtgttgatccctgtgtgttgacaccatctaagaatagggtccaactgtacaccagggtcttaggctcttttctaaaagtcaagtcgcatttaaaaaccaaaacacagttggctccaagagcctttaccctggacttttaaaaaaatcctatttaattgaagggaaattgaatttgtctggtttttattcatttacacttaactcttaagaaaacaatattttgaggacttatttgatgtctaaaaagaatgttgagcctcttaatgagttttctggaaggctttttatttctttctgcttcttaaaacaggaagtggtgcagtgctatgggcaaacatggtctgccccagaaggccccaattcggtgtgaaatagtatcatgagccatgtgtgtggacccagtggtccaactaagacttcttttcatctagtccttacctaagactggctgcattattcaccattcatctaaggggtattaaaacttggatgatcagagtcataagaaaaaactttaaaacctagttattaatcttgttttcagaaaaaactttaaaacctagttattaatcttgttttcggcactgatgtctggctcttaagatatatttaccttggtccttatatcgatcctaagatagatgtcttggttccattttgaagcaattaagtaatttcttcaagaaaggggaggcaattatccagacccaatcctatcacctccaaagttaatggagcctcatcacgattaaaaatcaccaaattgatacacatgtctccatgtagtttgagagtcaaagcataactcttcctcacttttttagcctactggtattggaagttgaaccctgggctgtgcataagttctaaacaagtgctttcctacgtagcaatagtcaaaagaaggttggtgaggtttttatttttgtttttgttttgttttgtttttaatttactgtatgtttttagccaggctcttgtgaagttgtccaggttgaacctcaacttgatgtctagcctaggcagtcatagattttgcagtcctcctgcctgcatcacaaggctcagctctaacccagcttgtgagaaatacatagattttgctgtttctagttgccatgactcctgagcacagcatgtgctggtcgcattcattaaattgttcatactccaccactaattacgcacgaagacctaagccttccctgtgtatccaggaaaaagacagcccggctttgttagcaagtggactgagaggtgggcaagaggtagactgggaaattgacaggctctgtttcactatcacgatctacagaggtcattcaaaatatgttccacaactcaatagagaacaagaggatactgtgactggacaatgctttctcttctgcctccctcattgttgcctttgtcccctcttcctttaactcctgctcctctgtccctcctcttacactcatctgcttacagaactacacataaactttaaataagagaaaggattcggacagttatgagaaccacaaagaagggcatgttctgccacaggtaaaggaaagacccgagcaaggctgacttcaggctacagtttctcctgaacagcatttcttgtaatttcaaggcagattgacttataactgcatcccaagccactgcacatcagttccttttatcagcccaagtgagacttcctgtggactggcccagcttcctgatatgtttccttttccctttggtagaacaaagaaaaccatagctctcaggatcgttgggagcaaacataacttagcactgaagagttcattatttgaaggttttcattctctctacataaggctaggtgctcacccttgcgttttcttcccaccgtattctcttagcgtgcaaggagacccctgtgagatcctgaggacccacttgcacatatcctgcctgtagtttagtttcattcagaaatggagaatgaaggcaactgtttgtatgactgtttaggatgcctcttaaagcaattgtcacacagagtcaacttaatatgtcattcttccacatttttacagagtaagagggcattggacaggaaaaaaaaaaacagattaggtttcatgatccagtgaattaggaggagagaagtgggcaaggataccaccagcactgatgaaggatccatgtgccccaaaagacattcccatagtaaatgtgtttctcaggtcaaaggcaccaaggcttactcaactcacaaggactttgagccttcatcctctttcctgaccattgtcatcgtccacctaaggaaccgaagaggcatgttctgtacgtgccacttgaggagctaagcaataatattactgaggctttttgtttgtaatcatcactgatttggaatagaaaaataataacattggaatctactctttggcatggtcatcgctaaaagagcaattcattgcggttaagtgatagatagcgtgttcttttagtccagttctctaaggtcaacagctctagaatgaaatagtcaaaagaggtgttcttcaaagaacaaaataattcaaatatatactatctggaatgagaagcgtggatgagggtgtgcatctggttttctcgggtaaccaacgttggtgacaccaagtggaagtgacagaatcatcaatgtgtatcattagctttctgacaccgtagtctaccaccagctttgcacccaggcgtgttactatcaggtattctggaaaaaagaccccagaaatttcttacaaaattcccttttgccctgacactctgtaaagaagtaactgctcagacatgaccatgtcttcctccataatagaacccacagatcccataataaagtgtcactcaactaggatcattagtagaacacaagacagttctacagggtgcaaggcctctgggacacctgcacttccttcattttccagaagagaatgagccagctggctcctttgttgcaggaaacgggcatgcagaccattttcccagagtgctctggggaatggaccctgtggtttgggtttgctgctcttggttgctaagctgttccttctggagattcacagatctgtgtagatcgtggtagtcagggaatcaccagggcatccctccttgcattccctgctcttgtccccaaaacgtcttatggatcagccatcatgggcagtgaggccctgcttgacttcactgcaattaattttttttcttcctttcagtgtggactgggtttgacccagagtcttctctgcccagagcaccctctaaaatttttgaaaactctgtgtgtatttcatgggaaatttcacacgcctgtttctgattcattttcaattaaaggctcaaaatactggttttgtaagagtcctttgatgattctgatttttgttggttcattctttctttcctcctaaatgtccatagaagtttattaaatgttgctcccacatttgcatgcttaattgttacaaaataattgaaaacagtggagttttttcttcttctgtgcacaatacaagagcatttatggagtggggagagagaaaacatctcagagatgaactggaaaaaataagggcagaggtggattcccaacaataagatctagtgggggctcagggctcatattttctggaagagagacagaggtattgtaagacacatgagtgtctcctgctccattcatctggagcccacaattatttatttgggtagaagtcctcatctgagagggaataggtagcctggatgttttgagaaatgaacagcgttttttaatttcttctgatcagagggagttaggggactgttatcaccataagccccattctctgcctccttgttggtcattggacactttgatggcaagcctgtctagatatacctctatcctagctctgtacaaagggctctcgtagacctttccatagtctttgcgttaccgctctaaagaacggaagtgacccccaggttgggtcatccaagttctgtgcctgctcttgcttaggccagctgggtggcattggacatcctattccgtctttcttaacctcagcttttctatccacacaaaagaattgagacttagcaatatgtacttcttaccccatagatttgctaacagcctggactacggagatgtttgggcttcttgaacaaaagcatttattaataactatagtcagaataaccactggatggcagatttaggggataattcaggcagcatttcagattcagaatcccagttgaactcttcagagagagaacctgcccaggtctctttactgtgaggaagtcactattattattctgtcggttaaagtgtgaaaatgtaattttatgtgcacacaatgcaatgtggagtacttcttgcctaagaaaggtgatgaaaattctctgtgaagttggtagtgttttgccagataccatggtggtggcaaaatgactttgtgaaagtttgaaggtggaggcagggagacaaagtgtttgccatccaagtgcgagggtctgaactcagagcctcagattccacataaagctgcatgggggagtatctcggtcacctccacattcccagtgatagggaagactgagacatgaatggccccaagcttgtgggcctggtagcctgtcatacagaggagcaaataagaggacgccctgtgtaaaacagggtcctgaacactctctctctctctctctctctctctctctctctctctctctctctctcacacacacacacacacacacacacacacatatacagagagagatttgtaagttttaaacttgaatacctaattcgataccactcattttcaactgtgtgatcataggccagatactaacttttctctcctaactgcaaaataaaagtgattatgataataattgctatcataatgtttccatttgccttattaagtaccagaaacacaaaaaatatatgtttccttacaaaaaaggtatttggtaactgtatactgggcattgcagtatgcaccagtaatcccagcactggggaaactgaggcaggagaactatgttccagaccaggatgagctgcatagcaaggtcttgtctcaaaaaaaaagaaaggaagaaagatagatagataaatagataggtagatagacagatagaccgatagaacaaaacaaacaaaaagcacattataagtgtaatgggccatgcaaattattactattttttcgcctcctggccagtgcttaaatgtaacagataacaaatggtgctttttcccccaggcactaagatttccaaaaatggttgaagttagttacatcagtcaattagcccatttatttgtatctctttgcccacccaggcttcatttctagcaatgcaccccacagatcaaatgtcccatactcctctcttccttcccttgtatccggctattgttttagttgtaaaactcccaactcaatcaatgggattttacgtaaaaagcataaagagatggcaggatgtgactgtggactcaggaattccaggcttgtgctgttgataaagagattcatgtcaaacaaacaagagtaaagaccatcagagaaatattccgtccaacctgcaccacttagacccattgtgttcaggtttatgtcgcctttataaagtgtatccttgctataaaacccatgacctttccacagcattcccgtgtgaatagctttgaaattcccgtgtgtctggccagatactttctaggtgccttatctcattcaccaggggcatctcttcggctgtttcttcagagtctccacaaccctaattccttttggtcttttatcatgtcttaggcaagatgttggccaattcacagggaacctaacatgacggcccatctgctccgggctttacctttctttctcttctggagagatgagtgtctgcagcagagttgattctcttgttcccatgcaaggttgtcattgtctgtcttcaactctggttctatcactaagcacagagaatgaaggaagtacctatcgagcagaaggagcagtctgccttgaagatgggtgttggggatggttaatgtcagaaaaacggtggccctcacctaatgagcccagggagagctttttttactctcactgccttctggaacattaaggagattatgtctcgccaggcagtggtggcacacgccttttatcccagcacttgggaggcagaggcaggtagatttctgacttcaagaccagccagaactcagagtgagttccaggacagccagggctacatagagaaaccctttctcaaaaatcaaaaaagaagaagaagaagaagaagaagaagaagaagaagaagaagaagaagaagaagaagaagaagaagaagaagaagaagaagaagaagaagaagaaggtggttgtgcctcagccctggggttgcactaagcaaccaaatatgccaatgtgatagaactggtgtgaagaaggacttttgcctctattcttttgaactggattaatggaatgaagacacagaaaatggagctcgctgtttccatttcaagggctgtgtgtgtatttaggactgagatgaaaaactccttcagttctttttctaggtaggttgaactacatactttggttttattcctaaccacctgaaatgagacttcaaaaaaaattcctggagctggagattgagttgttcagacaacatgccctgtaattgttagagactacaactatagaatgatataggtctgctgtatctttctctaagaaaacaaaacgaagctattctccaaatctatatgcttcactgaacgagcattctgcattttctcccgaagcctgagagcaaaggtaaagacattagtgaatacccccccaacactgtcccccctcacaacttgtaaaaaccacatcacaaaatggaagcaaaggcagcctttcagagttcacctatttgttgctatcaacaggtttttttttttttaagtcttgcttgtggacagtttccggacaatcacaacaccctagatctttaccgtagcccacgttgtgtacagacaattagaaatattcaaataactaatacataatgctttctggtgttttcagataaccctatattcctgggttttatttaggtaaagagcgtatgtttgttagttctgtgtggtagtggcccagttcttgagagaacagacttgtaagggcaaagaattctttgtatttgtagcttcagagagttcctgtcattagaaatgtgtggtgattcctccttacttcacaatggactaagaaaccgaaaacgttccataggcagaaataggacgttagcttttgaagacctgtccctggggacctacttcctagacccattgtctacctcctaaagtttccctgttgtctacaaatatcaccatcagctggggaaatgcgcattcaaaacacaagttcatgggactggtggcacatatagtagttgacttgaaacagggcacaatactactttttgggctacagaaaggtcaaacacatctctttaagttattcatggttaagaaattttcctagagccgtggctgatgcctttaccccttatgagagggaggtgaattgagatgaagtctctctctgtagccctggctggtctgaacttgctatatagatcaggctgacctcaaactcagatatccacctacttcctgagctcttggattaaaggcatgaaccatacatttttttttaaaagaaagaagagagttgagaaactttattagttcttctaaaccttcttgcctctgtgtcagaggtcaaggctagggaagattaagacaattgtctttatcataactatgtccaaatgaaccttgtgcaaaaaaaagaaaatgtcctgttgtcattgttcaatatgatggccacagccaagatgttgagatgtgagatgtcaccagtacaaagaaggattatttttgagacagaagtagtttttgccatagagcccaagatatagccttaaagtgttggctatttcttgcctcggcgtgttcagtgatgaaattgaaatgaaaggaagcaccttttaatccaattaaatttaattttaaataataccaataaaattatggtcaaagccatcaccttaaagtctcgactgaggcggaaggatgaactcacatgcattcttttcacaagtcagcagtgggtttgttgtatgcatggagaccagggcttccattcatcctttcattgtcaccttggttttctttctgagacaaagtctcctgttgctcagacaggcctcagccacactatgtaatgatgtggaccttgaagtccttgttcttttatcaacatctcctgttacagtcatgaaccaccacacccaactacctccattactctgtggagaattccaaagtaaagtaactgtgctcagtgttgctaggttaccatgctggtctggggtcggagctttggattagcatagcaatgtcccccttcaacaaccaaatctgtgctgaccactaagaatataatacttatttttccccttctctactagtggaggcaataaaaattgaacaaatggatatttacatatcatgattgaatgcttactagatttgttgaagaacaatatgggcctttgatacataccctcttgttgggaaaataaagttgaccaaagagtagtccttatccaacacagtgactttggtttcctctttggaaaatactggcacagacccaaattcttctgaaggttgttttcagctctaatgctttctgctttatgccaccatgaaaatatgatttcctattgcgtagggctccatactcttaacagatggtttgtttctttagtttccagatctctgtaactctttgtgagatggtttctccttagctatgaatgtgaacaaagcaacttaattgggcaagtaactagctggatggtccaggaaagccaatctccctctggagtatgctttctctacttatattggtttgttgtacctcagttcaaaaggtgtatattcttagtatctcaaaacataaagcaacttaactattgcttcatgccctgtcctgtggatatcagtgtatatgacatactgtacctactacagctatggaatcattggaataagtactaaatccttctcctgggaacatctgccttcattagtaaattctctcatgatgagacatacggtggtttttctgctgcatatcattgtggaattcaattctgtatctaccactgaatctctaacacggacttgtgagttgggttatttgaaactgagatggatagcctcttccaagaaaatgaggtcaagttcacctgaggtctaaactctacctaacagtttttagggtggcagactattgtggttctgattcatacgaaaacaagcctgcaggaagaataaaatatacacctacccacaggccaccatgagtgtccagtgcccaaccgtctcatcctggttaactgtagaatgtactgtagttctgtagctgtgaaccttcacaacttctcccacctcaaaatactttccctcggttccttcagatcgcatgctgcatggggtgaaggggctgcctggctttcaggatccgaatgctgttttgcaaggcttgccctgagctctgagggctcggacttctccagtttttctttgtacagtcagcacatggcatatgttcatggatggactgatcagttccagaggccagggaccaaggtgcaggagtaagaaagatagctgcggctcctgctttggcagaagtgaagctgtagctgagcaagcaggtattcagtccaaagagttctgtgtgaaacgggaactggggagtgccttttgagagtctgccatggggacctaacctagtctcagaggtcaaaggcttccctaaggaagtaacattcaggctgaaccctgagtgataagtgagagaatgtatgaaagagaacagacttgtgataagtctctgctagtgagtggatagctgatatgtctgcttcactccatggtaagtcactccagggccttgctaaattaggtgtcagaagcttagtcattctaaccatggtccttgaaggcacgatctgtgtggctgcaaagtcatcctctctgccactttcttatttgataaaggcaagtagagtgtaatgaagaataatatgaaaagacaattatccttgcatgtgttatcagactagcattcactgagtacatgaagagggtgtttaggctatcaatcatacccctctaacatgtagtgcatccagagaccccacgggtaagatgcctcctgaaagctgacttctttctgtcttggaaggcgccagccttgtttcagcttgctgtaacttcccactggtaaagccaggcctttcctggacagccagaggtctcgaacttcactcgcagactttgatatgaaacactctctgacggggcctggatctcccctgccttaggttttctcaactgcagatcatggagattctaccaatgatatttttacctcaaagtggtgtcgtaatgaagatggcagtaaaagtattttgcaagatcaaaaaaaaaaaaaaaaaaaaaaaacccttcttaacaagcatgaagcatgctatctctgtgtctgttagaatttcagaggaaactctctgatctaagactctaaagaaacacaggcacaggactgacgctggctttttctttctggaatttctgtgccctttacctcagtattacctaaaacaacattggtaggaagactcagccatgctgctggtgatgatggtggtgtttggatggtgccgatgttttggatgatgctggtgttggtctgtactgtgctggtgttcgttaggatggtgctgagaagcctcttagcaccgtgttctcgtcaaggctgcatggcttgctttaggatgcccgctttcctgatgacaggagctgaggtataaaaaactgaagaaactgacgcaacagtttgcagctagtagggtctgtcggatcccaacgtctttgctcacggcatgtatgaaaccgtttgagcttctcagaataagagcttggacttgctccgtgatgaaatgtctaccattaatttcccagccttggaatatatgagtgttaacactcacaggagtttaattttgcaatctctccggccttctgctgtttccacatcccttctccactttcctaatagtatcgctctcctggtgtttaaagttgggaggaaaaaaccatattcatacctgtccaagtagaaaatgatttgcactaaaagtagtgaaatccaccgtgaagggccagagctgagttgtgccgtttgctgaaaagctgctatggcggggaggggtggggggtggttgtaagtgtgacaggcccctgactatgttttatcaacagcatcttacacaatcacgggggtctttttacctcccctatcaccgtcccacctcgttctgctgtatgatctagggagaaaatagcatctctaccggtatccttgctgtgggaacaataggcttggcgggtgccacttccctcggattcccactagggaatctaagagatgacctgattgaattccacccgcaaaggtcatgctttgaattcaaggcaggaggcaaaagtgaagaaaacattttgcgctgatatcccgtacgtcctgagcacactgggacctcccctcgctgcactgtggtctgctgataaggataacatggagggcaagtggcacatttccaggacaaaggacattctctggtttattgcttagaagaacccactgtccacacaggagagcacggttgggtaataagctgtggatgagagcaaaggcaaggttggctgggggtagactggggcaggaaaggaccgccaggctgctccgagtgccatctggggagcatttgcatggttgggaggtaggaagaggtcactggggctgatggtgtgcggagggcttgagagtcagcctgttagaaagaggctcacacttgataggatagaaaatgcaggctgttcgggagtcatagcaaaagctccaggagactttgagaagttgatctggttttgactttaaattcaggaccttttcttgccccgcccccctccaagccaaaatgacagaaagggcctggtttccctttatggagtgcaaaataaacagatcttcaacagcgggagaggggcccactacttccccagtccatcgtgccagagctgggggtgggcggccgtagggagccgcagttactcttctgtctggttaggatttggcattgattttcattttctccaacctctgttttctagaagcccgcctgtgcagaagcccaggaataagggagaagcaaatcttgggctttcttgccagacttcaaaggttgtggagttttcactcttgagagtttggggtagcaattccaagactaaaagctgtagggtgggggttgaacccaccatctgggccaggatggtaaactccggcctctcagctccgctcacccagcccaggagaatgtccagccctgggcatctccgggtcagctgcggttagcctggccacagggccctgcattccttctggtcttagctgggtttggggtgggtgtgaccatgggtttactctggagaaaacggagacaaagcgtctaaattgggcaggatcttgaatctaatgacttgtttaccattgcgtgtgctttttccaggacagggaggagaaagaggacagggtgagtgctccctgtgggcaggggctcgctgtgggctccagcacgctgttgcttttcatcctgaagggataggacagacagctccagtcgggtagcctgagcagccattcctccgctaggcaaagaggtgcgctgtgtgattttccaaggtgggaggaagcagtggtggggcttctgcctctgcccagagtttggcttccgggaaacaaacagctcctcaaagaaggcccagttccaccacatgaaaggccctgtttcctcccacttcaacttcaagtcacctaagagattaccttcttcacccctgctgtgactgtacccccccccccaaaggcaagagcccagtcaggaatggacacctgtgatatggctaaggagctggtcccggacctgggcatggccagcagaaaggtccagaagaattttctgatatgaaagcaaatcaacagtgccccccttttatttagtgtttgctaactaaaaaccagccgccgccactaccaccaccaccacccctaccaccaccccacccccatcacagaaagtgtacctcacagttgaaggacttgcttttcctaattcaggaagttctcttatagctcaggtatgaaacttccaggacacttagattagaaccacaagagtttacccccaagagaagagtgaggctgaggagagcaatgggcactgcccgggcagctgaggaggatccctaccgcttcagttgcctgccttagagggacttgttacaatgtttgctttctggtgatgaagctggggattggaaaggttaaatggttgactcgaggccattcggcctctacatgtggcatgttccgtccccttgtgggcctcatctcttcaagctgacaagagggtaccctgggatacggtctgatgcctctgggggggggggtgcggggggggggtgcgggggggggggttcaactgggtgtggctgattagaagttgagcttcaaagaaaaaactgaggtctagctcatgaggagctcaggtgcacctgcttattgtctaaaagatgtccctaaaagatgtccctatggagatgtgtgaaagagtgctggggattccagagcagtgtgcatgggagccttggggccatcctgcatgtagagtagggatcccagaaaactgtattttcagtggagaaagcttcagttaaacataggaccagccgctcagaaatacttaaatctacagcagctaacatgtactttgaacgttctatcatgttgagatgctgtgactggacagtctgaagggatgggttagcatctctattctagcgcctaccatatgcccaaggattgtgtggcccaagcaaagccttcaatttccacagttcctcaagccgtggacgtgtacttgcggaaattactctctagaatgttcggaggtgcccacaaaagctggcatccccagcccactggagtaccatgtccttccctttccctctattgccagaatatgcctagtgggaagaccaggtctgtggggggatggaggggggggggaaggaaggggtggcaagattcccattcatttcctgcacctggaggcaagaacagaggccattcttctgatggcctattgtttagtgcttttgtttgttttgttttgccctctgaaaagaaacttccatatttgaattgttcctctcctttgccagtaaggctcactaccttgcaactggccactagctgggttgatgtcagatcgcatttatttatccggtacccagcaccacaacagtggagactcatcaagctcggagcagctgagggcgggtgggtcgactcagtggaaaatccagaagtgcagatgtggatccaaattgggctgaaaaacctcctgagttcaggctttcttgaacttcctgcttttagcttaaccagtgtgttcgacataaacgaactttcggtattttgaaacttccgtttctgatctcagaacctggaagtagagagctgttgtgaacatttccacaaattctgtcatgggtattctggagaccaagttgaacccggtaattatggagttttagaattcactactaccacagcagcctgcctgcttgcattgcgggcgggatggagaacagcattttgctttttaaaaggctgggcttggagaccttcggggcaatgtagagatgctggccatgtcatttctagcatgtgacttaatagctcagagccttcgttctccatcagtccagtagaggaaatgtagtggcttctggctgtgcgcagtccacgtgttgtatgtactttgttttcttgtatgtgtgtgtatgtgtgtgttgaagcatgcacacatatctgtatataggaactagatagacatatcctaaatatttttcagcttatttatagcttggatatgtccccttggtaatctctagttgccagtttctgatactgggacatttagaagttgctgaaatctaaccgatggtgtggcctccttctggactgagagctcaagggttggggacataggggtagtatctagtgacaagcgagtcttacaataaattttgataggggaaccacatctgcactggcccttgttcctgggaaataacgccaggcaaataggagagttggaaagccaggtgctagagcagagtgcccaacagtcaccaactgaaatgggcggggctgggaggagcaaggaggaggggcagaggcagagaggcagaggcagaggcagaggcagaggcagagaggcagagaggcagagaggcagagaggcagaggcagagaggcagagaggcagagaggcagaggcagaggcagagaggcagagaggcagagaggcagaggcagaggcagagaggcagagaggcagagaggcagagaggcagagaggcagagaggcagagaggcagagaggcagagaggcagagaggcagagaggcagagaggcagagaggcagagaggcagagaggcagagaggcagaggcagagaggcagagaggcagaggcagaggcagacataaggaaggtgaagtacctagatgtgaccccggctgctgagaacactcttaaataaattgattttggatatgctggacccagagtgtcttggctgtcctcgcttacttaaaaacatgcaaacaagctccgaattgtgttttttattttaaagaacttttaaaagatatttatctccaaaatacaatttcattgattccataaaattctgtatacacttttaaaaataaacaaaaccacaatggaaaaaaaaaccctaaaaccataaaaaccatgttcttagaacccggttagcaatctattaatgttttgatgtatttacctgcaatctccctattgcaaaaatacaacatacatgtctaattttaatatattcagaaccaattactttgaagtctcatttttcttattattaaattatggattttttccccgtattactgaataatattccatgttactttgtctgatggctgatcactgaaactattaagtgagtgggtaaaagccctgaggttttattttgtttttcttttgtattaccggggagacaccgggcaagcactccatcccgagttacatccttgtggacttttgagtggcatgtgttgtcttagctactctggcttctggacttaggatagtttttttttttttttttgcaacggagctagactttttcttgtattaatattccatgtaggctttaaaaagcagtcccgtgaactgtagaaaaggtgatgttatagaagtcactaagttccccttgagtcataaaaccatttctgggagaggcagaggcagacggggccttcactcacctccttgtgcttttttaatgcagcccagatggaagctgggctgagggcagattgcaggccagcttgctggaccagatctgatagcacaacagtagaaagcatctcggaattgcctgtgaccaggaggcctctctgtataggctgttggattaacacacgcaactcctaattacagaagacttgctcttaagctcgtccttgtcagactcacactccctacacagtgactcctgcagaactctcatctcagggcagctgtctgccactctcctgcccctcccaggaaccaggtcagcaggccctgtcagaaagaggccaggcctctctgccttctctgtgtgtggcagagcttggaaggtagctttctgagggctctttgtctagtgaaccagccagcaagacctctgtgtagcagaagccccctcaggttcccctgctcttccccctctaccaaggaaggcaaccctgaaatctcttccaacctcatctaagcagctcgctactgctggagaggctggaactcctgtggcccctgcagaatctgaattcctgagaaacctgccctgtgcgtggaattcactgtgagcaccttaagactgacagtgttgcttgcttaccctgcaagaaggccaacagcccggacaggaaagcttccgttcatgctgtcctccctctctatggtggctctccagtaggtatccattcattccaaggattcataagtaaggcttcctgttctttcccgtactagaatttgaggatgggacagagggataagatagacactgtttacagtctctgctcttatgggagacaaaaaaaaaattaaaaagaaaaagaaagaaaagcatctcagaaatggaagcatctgtaacggggatcatagaggaaatgcctgccgagttatcaaagacgcttgacaccctttgttttacgtctcaaattactaccagcctccataaaggttcaggtccgtgattcagctgccaagctgtagtgagagcaagatcagttatgggcagcagggtatgcccagccccagcactcagccccctagactcttgtggtcagggagttcctaaagggactcaaaccttttggggctgggatccgtttactctcagcccactgggatttgctgtttctaagaaaatggggttagatgctcaactgcattaacaagacacattgatggagatttatctgaaactggctggctcctggctctttggaagcttgggtttgggaagaaggacatttggataactttcttttcaagtaatattctctctcccttccccctctctctgagggtgtgtgcatgcacacacgtgtgcctgtgccatgtgtgtatgagtgccaccagtgccagttgattcaagctaggtattaccaattgaaggacccattgcctttgccttcctgtcttaggaacagggcccccaaagtgaccaaagcccctctaaggaggtttagagtcacaggtataataagaatgccccgaaacacccattgcccagagtctgtcgccagctcctatctgctccaaactccaccatggcttcctacctttgaacatccaggaaactcaaattacctctgacaagactgtaatatctgaaaaacattaaatatttcatctttgtttagcaaggctctatagcaaatgttgacatggtatggaagagagaagaagaaaaagcagagaaagattctgacctggaccaacgagcactcctctgagacatttgaaccagaaaagggagagggcaggaggaagatgcttagatgggaagccagacagtctggtgaccttacaccaaagattcctcaatcacacagcaaggtttatacagccatggcaccagcaaaatccaaggggagatgtctgcttagattccagggaacatagctctgtcttccataaagaagttggcaaattttttttaacagtttttgagccaaaagatttgcatggcttccacggggaagtataactctgtggtcaaaactacgtaaattatcaaaggtttacttcctaacaaggattgtaggagccagaggaacatcttagcagataactgtacctgttgctctctcagcggacttgatttcagctcacagcaccgtcctgatgacgtgcatccatctgtagctccagtttcagggaatctaacacactctcctaacctccagggccaccaagcacccatgtggcacacatgcacgcatgcaagtgaaaatactcattctcataaaactaaggaaacaaaatctttaaaatatttcttaaaggattgtaatgtttgagatgttaattggtattgttatcataagcgctacatgtcagctaaagtacagaaattcccacagcaggagcacgagggatgaatgcccacacacagacaggctgtgacgtaggaatggctaacacaatcgcagactttgtagtcttctttcataccaagttctggggaccacagagaggggaaatttctaaagaatcagggagcatgtcttagttcaggttgctacaacaaagtgtcatagactgggtggcaaatagacaacaaacaccatttctcacagttatggaagccgagagtctacagttagggtaccagcgatgccaggttccggtgagccccaccctccttgtgtttaaagaccactgggtccccctgtatcttccataatggaagcgagtcatatttcctgagatacgttttagcagtcattctgttaatgattgtcttctgcccatccaataaccctctcaaagtctctcaaagtctcccctcctaacaccaaagcactgagggttaggcgttaacataaattcagaggggaacacaaaatttagtctagaccaccaacacaacagtgggactttggagaataacacaataaatgaggctctggaagcaaaatcaggaccattgaagatgattcagaagaaaaagaaacttccatagacttagattcgcttagttgttttggaggaggggacgggcgctatatctgtaggtcatgaaccagggcctttgccaacatggctgcccaagaacagggatataatgagcaaggatagagatgttccatcattctcgagattacagaataggcagcagaaaccctgcactattcaacactttcatcatcaaatgtcagttgaacactcgttatgcctaccatgtgggcagcaccagagactccaactgagtataatgctttcttctggttttgatggattcattgctcatagaaaatggacggtcaccgtgctcaaagccacaagtgtgttcataacagtgatgtgtgaagcatcacatgagcctatcaccggaatgaatgtccatctagggaagagtcaggggatgcctgtctagggatggtctctagaagaggcaccatggaactggtattgtgaatgacctagggtttgtgggacagtcagccctaaagaggggaagcaggaatgtgagaagagcatgccatgccagcaagagtgacttaagtacagaacactgggtgggaaggtggagcagtaggttatgaccttaccccagagacctttgaccccagaaagtttttgacataggctgtagagggtttgcatctctgaagtggcaggggaattggtccatgttttgataaaaggataagcaacatcacattcgcttcagtcaggtgatcacttaaaggtaccttctgcataagagcactcactgggttaagtagaagtttggcttatgcaaagaaaaacctatctcaagccctcagaggcctccagtgaacctgggagagatggagagtgagaaagggggagagaaacccttatctgtaaaagccacaggagattggaatgggaggggggtgattctaggagacgcacaaaggaagtggagatggctctgcctcaccctctctggcctgattggaggccccaccttttctgttctcctttcctttccctggaaacatcgccaggattcttcctcttactgatggcaaaagcactcctaccgggtacagacaactatggatttgagtcagaaagcggtgtacacccttcatagactcttcagtggtctgctggcagtgctcgatgccatgcctggggtgtgacactaggctccagctctaggtgttctcatagaaaaaaactttaactaatggccacaaatgtgggcaacatggcaggagcaggcaggggagacctgaatgtgaattttggttttttgtttttctggattcagtttgtttctggtttctgttcttacctcaagtctactagtggttgaatatgcaaatgactcattagacaggctccaatgggattgatatgtcatgcataatatcaatcagggtcttcctgggcatccacagccttcccttctgctgccccgtgaatgcacatgtggattatgttctccctcccctctacacacacacacacacacacgcacacgcacacgcacacgcacacgcacacgcacacgcacacacacacacacacacacacacacacacacacacacaacaggaccaggaggctatgggacactcacttgagatcagaaatataaggcctggcttttcacatatcacttgttaccttcagacagtcacatggacaagttaaacttatttcccctaagtcgctctgacccacagaccttaagtgtgttcgaagccttttaccatctgagacctggcagaggtagagcagggtcgtccaaggtggtgagaatcagagtaaatgagataaattctgcttagaaagacagcttatcatcccttcgatttgctcactcttactctctccccctccctccttctctctctttgactgagttgcctcagggacggtggtttcaaaactagcagctgcaaacttatgaaggaaaaaaactgaaaccacaaccctgtcttgtgaaaaccgtgtgccagtctaaaagtggcagtccatgtggggggatgggggcctgctaacgttcagggcatagcagtaggcagcatgggatgtctaagtcaggtctttagggtaaagaggaattgttccctgctctaggcaagggcgagcagggtactaaggacaaggttggggggagatggaggaggaggaggtctggccaggagtttagcctcgtggtggtggcggctctggcacagcctgagacctctgaaacagtcaggttctcgaatgcaaagcagcccagctgtaactgccacattgctgctgtcttcatccagaagaccagaggggtctatccttcctgcctaaatcacctgtcgcttctgaggcatgcctggtagagatacctaccattccactcctgggtcagacctatcctcttccatctccccacagatgctcactatactcacctacgtatttacccttctaaaacatatacagtaagacagaaagatgcctcctgaaaccccacctcaaattgccaccccatcatccctttctatgcacaaatcattccaagcatttaaggagggaaatgcaatgagaaagaccctcttagaaagaacagatcctatgtgtccccaggctggaccaaggcagtccttaaaggcttcttctgatatgaatatcataagctggataggtctggcttgaactatttctccttctgcttatagttcttgagaggagcctctttggcaagaacaagacagatatttgagtcatctgaccaggtcaagagcttctccactctgaataggaagcctacagacagacatagccctagccaggtgactcaggtacagatcttgcaggactttaataggagggacaggttaaggaagaaaatcccaatgcaccccagtggtaaaaacaggaaaaagcattctggggtgaatttaaatactacctattagaataaaagcaaagtggatgaattgaccaacactgggtggggttaatgagagaaagctccaagggaggaagtaagttttcagtagaggttgaagcaggggcagggccatggctggggcagagggaagaggaactatatactgtgggggaggtggcatgtctttgggaagggtgctgtggctacacagtggccctggaagctgtgtctcacttgacagtcatgttcagagttagtatcaatggactgaggtaaattttcaaggaagagtcatgttcgatattgacatcagaagtgtggtctgggcacacccactttggaacgagcacaccctggatccagtcaagtctgagttcacctctgagcgaggccacttataatctggtcaacctcacaggtctcacctccctgaactgtaaaatgaggaaattatttcataaggctctggtgaggatgaaatacagggagataacggacacaaagtgtttagttccttacctgataaagaagggctcctgagtgttcgagtggttgggaaaacaaggtctactgctcacaggccagaatgacagctaggggaaacggcttcaagttctcaaaagggaaagtgtagcttgggggtgcctagatcctgagctcagccaatcggtctccgtctccatgtgttcctgtgatgaagtcagcccagatctgcacacagctcaaaggctggatctaattgatgcttgtctgtagagctaaatatcagcctctgaggctagtctgctgcagactgagccctcactaccaagatttagtgaatggctcaacgctgaatggagttaatgagaagcagaaatttccagccacacgtgtgctgataaacgtggaacaacctaccgtctggatttgtgtagtgttcacctatttccatggtgcaaatggttgctctgaggctgatgccaggctaccaggatgatgtttctgactgtggagctaggaagagatgctttctcagctctcgcacacccctgcatccatacccccatccctgaagctggctgaagctcctctcacagcagggtgggctcctgttcttcaggccaggctttcttgccttattcctgtccggaggagttgaaggggaagggaggggaggcattcctactttctcctctgtcctgtgctcggcagaagtatagcttcccacccaggagccacttcctctctgtccagttccagactgatgagcaagtccattttccccatgagctgaaacaaaacaagacaaaacagaaaagtggtcctcccatgagccttcgtcagagctcagctttaagatgaatcagggcaggcccaagtgcatactctggcgtcttggggtttaccaacacacttcctccacagaaatactgttgctgctctttctcttgcccctgcgaatgaggcagcgacaactcagccacacctgcacctggaggtgaggtggccaaggcttcacactcccagcttccccttaccgctacagcagggagagtatgacttcatcagttcaatgacaattctaattcagggggcgggatgctggagacagaggtctcagcagtcctctgtgtgttcccttgtaaagatgaaggtactgaggccagagggcaaggtctcaggcaggtcacttctagagacggtgttctctctcccctctctctcccctccctctcctctctctcctttctctccccatcctcctccccaccccaccccacctctgctgctgctgggcagttttctgagagttaacactgatattttgctcacgtcatttcttctataaccgcagtgcttctgtgggagtaagcacctgcccccagcaagttctacaccttcttcttcttgctcatagccctgggcatcctggcagatttgcagatgatccagatccactccagctctgcagtgaaaggagcgataggaaaagcagagttgggggtagacacccaggcagttctgtcttaggatatcttccttcaagtccgggaaagagcgtgtgtcctcagtgtcctcctgtagcaacaggcatctccaactaccaagcacgcctgcattgcctacgttagccaggaatatgacaagccatacatacaaaatagggaccttctactagtcccctaattgtcacccggagcttgtctgtgagagtagctgcccactaagccctagggataaagggaaagagaagagcctacagcttcccacaacctcatctctgaccaccagagaacccgccctttagcacggagtcttctcctagtgcttgagagccacactgggtccatgcagtgaggatatggctgcctgtgaacctcctggttcacggagagtggaaaagctctttcctaaatcttactagacagtagttcgcatttcctccgtggggaccttatctgctagtacattaagaccccaacccagctctgccaagagactgttatgctctgcggctcaaagaaaaaaatgtaggagaggagttgattaactgagaccggaaaagagctttttctatgtataaacaatgagcccatgttcctggcaggtcaggtgtcctgatctctctcccaggtgggagggaagaactgctggccgcgctcctctcacggccctgagtttaggaacaggatttcctctgcacattgtcagagagcagataaaaatcttaatctcaggcacacacagccgcaggccttggggcctgccactgtgtgcttagctttcagaagtgagaacgaacaatggctttgggactcagtatataagtggggaaggcaaagaaagagaccagggtggaagctagcgggatatacaaacttgctgtggaagatgcagggccatccagagggtccaacctgcacacaaggctcagaaaatcctgggtcctcttttactgtttttggctttcttgtaccaggtacaaagcacactggatagaggtctttaccattttgtttgttttctttgtgtgtgtgtgtctgtgtatctgtgtagtggatgcacacttgtgcagatgcactcgtgtgtgtgtgtgtgtgtgtgtgtttgtgtgtgtgtgtgtgtgtgtgtgtgtgtgtgtgtgtgtgtgttggaggttagctttgggaatcttacctttatcatgctccaccttgtgagccaaggtctcacactgaacttgaagcttgcctgctatccagccccacacaggtagtcaccaccactgctggcttttatgtgggcactggggttctaaatgcatgtccccatgctttcacagcaagcactttacccactgagccatctgcttctcacgactgccccacactttttcttaaagtgctcaaatagaggcactcgcctctgcgctgcaaatcgggctcttaggaagagcttggcatctcagcagaactcagaagctgggaaaagtttcagtcttatcctcccaaatgtttgtgctaagagctcgctcgctcacttattttcccaacatgcatcctgtgccttttcagagtaggaggagatgagaattttagaagtctcatttattatgtggtgctgtatcagaaagtgctctgcacacaattttgccattgccacacttaactgcaaaatattccttatgggaacatacagcttatccctattgaaggagttggccaaccaagttagcatgagaaattttagggtgtatacatgttgaaatgcagacccattctccacaggatccctccatccctaactccattttgatgagcgtgcactaagcactcgctgtgtggcactgtgctatctaaatggtctctacttatagcatctccttttatcctcaatatcccacagtccttgggaaaaaattcttaagttcttcaggtgagcagtatgcatatgcagactaaagctccgatgcccacctacatgagtcagtccctcctcaatctcaccatccctaagccttgttcctgagctcattgagtagagaggaggcctgagtaaagagccaacaagagaagctgaagccctctgccaatacagaggacctgcagcagattccaggctcccggctgattcactggctttcacagcagcaaagaagggctctgtacacagcgtaggccgaactcagaggactcagattttccttctgatggtgccttaggaaacaaaggaagtctagggtttggggtcactgaaatctcattctatggactttctgctgccgatgcctatggtaggatctcaaagccgccaaaccaagggacatatagcggctacaccaggaagaggtgcatgaattatttgccagtgcaatgcatcaagaagaaacaaagaatctaattagtgtttttggggggaggacccagttcagagaatgaatgttttttccagaggtactgtgtaaagaggctcatcctcaattgtcctattgtcatttcccacctactatgaacctccgatgaatgtatccagaaaccctttcgagaggaaagtggacaagccctgtcacatgaaagtgaagatgccaagaaggtccaatgtccctcttccttcccaaggggaggaactcattccacacgtgctgctcagggaaagaggcccttgggggaaaggaggatgctgtgtcctttccaacctaagaagttcatcatcggtgcaaaacagcacctttggataaacacaatgtggctatatataccccttgccatttcctgttgctcttgtagctcacgcaggctcgaaagtagggttagcctgtgaccagaagccacatggtgacatgcatattagcccgtgccctctgcttcctgcactgctcgacactggagccagactaatgcttgtgcttccctggaggggagggaatcctgggagtcaggaggcttgcaagtctgcccatccgttccttgtgcgcaaactgcctggctacagatagatccaggagagggccagcacgcatgcctgaagagtcgtgagagtgtaaagtttccaccgcaaagcaaaggtcaagtcggaaggggtagctagcaaagtgagcagccttctcgattttgtattaaagggggcagcctcaagagacatctcacatagtgaagttatgtgaaaaactgcctggtaaaattgaagttcgtggctgtgtgctagaaatccaccattcgacaaatagcaactgtgtgtgtgtgtgtgtttacttcagtatctcttctcatcttaggatttcagaatgtttcagtagacatctcacagtgtagttttggagtagagaagagtgggtggcaggtgggacttccacttactgaggagtgagaaggagacatgaacacagaagcttgtccagaaacctgttgcaagccaggaaacgggcaaagataaacatctccaggccctcccgtctccttcttctcagccagccactaacactttattcccgacctcccttcctctcactcgggaggactgaaatcttgggtagaacaacacaggtgcttggttttcccagaactgagggtggaatccaggaccttgagcatcccaggcaagcactctccccctgagctttgtgcacaaccagaaccatgcattctgaacaagtttttcaggaaatcctcatgaccatatagaatcattgtctgaatcacaccggcacctttttcggtcagtcaagtgcttgccttgcaaacataaggatatggggtccgtattcagagccaccacaaggacgtcaggtatggtggcatgtaagtgtgacaccagtgtcagtggtgctgagacagacaaatgcctgggacccacaaggtgagagatcctgtctcaaaaaaaaatgtggacagcatctgagaactgaccatacagacactgtgtagttcatttatagggtaagtggctatggagggctgcctgttgcctaggcatgattccagggtaggatctgcctttacagagttacatgtaatgggagagagacacatatatcacacacacacacacacacacacacacacacacacacacacacacacacacgcacacacacactcatttctaagtgtgatacgtattgtgcactccaagaaggagaagcaggctgagtgtaatttaggtcggaggttttagaaaagtccccctgaagacaagatgttcacacccagatccgtaagatgaagggacgcgtatgcttcattgcttccagcacataaccaaagcaaattgtgattctaagaactggctagctagcaaaaaggaaaatccagtgatctcttgagtttgtggtgccccttttggcagatcacgcttcctatttctaatagagatttatgacaggaaaagcgacttaaaaataagacctgggaaggtagaatccctcaatgacttgtcacgagggttctgagaaactgtggttttgcttccaaatgtgactgggggtatttgaaggagctttataaaaacgggatgctgtgagaaagttgaatgaagagctctctgtggcttaggctttatcagactcctgtctctgctcaggcatgtgctcttgttgctcaagagaagatgggtagccacacagtctccagcattttcttaatcagtttgattgtgaaagagtttttccaccgagcacctaccactaaccacaggagctctgaaattcctacctggacaagtcatttgggagcaaaaagaccatttattcttctttccctggacccaagtgtctaccacttactctggcatgttccagaattttgcatttgaaatcgataccttaggtgacttagtggcagtcaacctggggaacaggcttacagaggcggctgggcagtgcatccacactacatctcaggagctatgcatagctctatcacttgaggggttttgttgttgcttgctggtttgggcctgccctagttcctctgaatttttttaccctgagtgaacatggccaaattattgattcagactagatgaaataataataataataataataataataataataataataataataataatatgcaaagtgattcagatctaaatttactgggtgtcccaagtcaagctacaaagataacttttggacatagctggccagaacatcatggtggtaaatccaatatccagtagacattctgtctgatgcctgtacctacatttgtgtaattaaccaaatctctttagctgcctccttttctttcaaagcaaagagtgttgtccaggaaaaaaaaataccttgatgcattcaatcttctcccccctcctgtttccctcccctgtgtccttctctctctctcccccctttctcatcatggtctatcatcagaacttcaaaaaggttaaaaatgaagtggccatttccagagactagtcagctcccacatgcttctcctatctgctctttcatcagcacactgagaagggtgacagagcacatgacagtgactgggctttgctgcccaagatgcaagaagctttctgaagcaccccgaaaatacctcagcagtcacacttggagaaaactcttgaaatcattgccagagatttaacaaagacttggttcaaagacttagagtcagggttgggtgttgtggaagaaaaaacgaacatgaaaaatgagagaagacctgtaaggaaattgacagaattgtgttctgctgcacagtaaagagtaccaccacataggcagacgtttagctcaagtgattggggttgctgaggtttgtgtagatacaaggaccacagagtaaaaggcgtgacttagcttgagtattatacacaattaaacctgcttaagatgcaggaaggttggaccgagccaggatgaggagcaggagtggaccatttcttcaaagattgctgcaaatgagatgcgttcctccttgtgacctaggctgccgacagcgtgttttgcttggtttgcaccaatgccctggctcgtggtcacttgctcttagtggccagtttcatttcctggttttgagaagatggcagtgaggcccatggctttggcacgctgtcgctgtaggaagtgtgcagtttgaaaatgtcaaagccagcaggctcatgcccagtgcatgctatccatcagcaaaagtctctggacacctaatgagccccctgcaagttcaaacagccaagagctggatgattaagatcttgccttaaaactgcctaccctaaccaagagggcaagatcaaaagggaaattgaagtaacaactatgtggatgaataacgtattcttgaccactgtgcttgtggaccaagaatgcaccggacaacattggcctccttggaaaggacctggtatctagagtccagaatgatgtgttatctctattccactaccagctcttgatcttgaatgagactcttagcctgtcaggaccttagtttcttcaccagcaaagtagaggggaggaatgaacctctctttatctctgattgattagagtttgtgtgtgtgtgtgtgtgtgtgtgtgtgtgtgtgtgtgtgtgtgtgtgtgtgtgtgaatgatagcataggtgtaggtacagggagactcctgttcagtcatgaggtatggagtggtcctcaaatttcacttattcttgctattgtagcagggtagaaagaagtaaatttagaaaaggcatcttctgccattgtcattaaacagagagagaagcagagaccacaagcaggagtcacacaggccagacgcattctgcttcctccctgggtagctaacttcctcttcagtgacacacaggtaatggtggctagcctttgcgttgacagagtcgaggtgaacccatcgctttgaaaatgggaggcatctgagcaagcagtgcacttcttgggctagcattctttagaaagttgatcctcaactctgaaggttgcaactgtgtcgtttggaattcattaaaggttcagctcaatgagagagaaatagacatcacaggtaactgagttactgggcatcttgacaagaagggaaacacataaggtaactttaatgctatttgtgaccgatgctcctggtgtccaaataactaggggtgggcatttagaaaggaggtttggggtttttgtttgttttgttttgttctgtttttatgactcctcaagataatcaacttcatctcattttgaagggagaatagggcaaaggaaaactgagacacacatctggaatttggggtgctgagcctgtggtttactgatgggaaacttcctgtggggttcagagacaagactcgggctgaggttccccgaacatccctgatgctggccgtccagggcagtgttgagtctttcccctttcaacttttcacctaaccccagtaaacaggaaatgcaagctactagagctgaacgcacagccactccctgggtcctctggctccctgcccccacatagtcaaagcacattatagtttgttttcctttctgacaggttgtacagctcattgaaaatacacacagcaatccgaactcgttacaaattacagcaggcagtaatccttactctggaactctagaaaacctccccttggaagggaaatgtgtgcttgtgagctagtgggagcactgtccgtttggaatgcctggaagtcatgaagtgtgctgatagtgggatgtcatacctgaagtttcacctggtgacttgatatcaagtttgtcacttgagggacttcggttgagaacataggaactcagaaagacttttagactcatgcccaatgcaaacatgcaggacgcatttcaagtagagattaaaaatgtccacagtggctaaaacatttcaaaacagacacagctatgccacctgatgccatggtgtttattggcttcgcaagacaagtattctgtattttgtttatgcttattatgttctgttatgtttattatggtttttgtgtttgttttgtttgtttattaatgttgcctatgggatcagtgtgaaactgactctcaggtattagaagataagagtagttaggtattgtatcacctgtgtgaatatttcgtttataagaatatttgcatgagttgaatatttatagcacaggttttaggaactttgaaaatgcactgttatttgtaacagtgtgtatgcaggtgggagagcataaacaagaggactccccccccccaccccccattcctctacactccccagttcatgccccaaagaaagcatacctaccaaccacaggacaaggctgtctccctggccagacattctccaagagtatgggtttatataagtagaggagtctggttaccctctgaaactcaagagacatattttcatactagctttaattcttaagtggacatgattttctgaaatccttttccaggctcagttgattaaattcacaaagctactctgagataattgcatgtggcctgggtgagagtctgatgaaaggcagctaatatagaaatagagagagacagagggcctggagctgtgttcatatagcttgaaggaagcctttagttccaccccagcattgcataaagccagttgtggtgtttcatggtcataatcccaacacttaggaagtagaggcagaaagcaggaagatccaaaattcaagatcattcctgactgtgttgttcctgactgtgttgtgagccggaggccagtctggtctccgtaagaccatattgaaagtcagggaagcttgagagattgagagaggaggcctccgtgccagcagggccactggctttggctctcctgaaaacataatcacaatcacctacactggcttctgataaagtatgaagcacaaagtaggattttacaaaagaacttgttgtgcctctttccactgatggcctcccccaggctggagcacaaagtttttgctgcatgatgcgtttcttttctgtcagaattgtagaagttcagtgagccagatgtggtagcacacacccagccagttgggggcattaactgggaggatggtgaacatatgagttgagttagcctgggctaagttgggagagacccagtctcaagaaaacggaaacaatcaaacaaaaactacctaattgacagcaaatacaaaggagtgaggatgtcgttcaattgtagagtatgcgtgaagttctagatttggttccaaatatcactggaaagaaggaaagggtttaaataagtcatcagtgagaatctaatccttctttccaaaccacaaacataacttgtgagcattcctgttttatatcttttatatgttttttggtttttgtttgctttgtgttcacgtatgcatgtagaacatgggggacacatctcacacatatgtgtgcgtgggaaggctacaggtcagcatccaatgtcttcttcacttgattgctctccacctgagtttctcgagagagtgtcctttacggaatgttggactcagtgattggccattaacccctgggaactgatctgcttctgcaccactgtccaggtgtcttaatggcttctgtgggtttgaactcagatttccttgcttcactgactgaagcatctcttcacccataaaattaatgtttcagaaaataattaacacataaatatacttctgtagaagattcagagagagagaaagccttgttaacgcatcgtgactcccagtcctaattgaactactgcaggtctctatcaaggcattctgaggagcttaagataactccttgagctgtaaatcactttcttgcctccaaaaactttctttcaggccagccccaggccttttgggcaccatgcttgtaaagctgacaatctactcacattcaaatggactaaactcctgaagcttatattataaacaactgaggactcagccatcaggaccattctgcttaatcaaaacttgcctgcaagtcacctatcatctttatgtatacatgtatgaccatctaccatctatatgtgtatatataaaaccatctaccatctatggatatgtgtgtgaccgtctaccatgtttatggatatatatgtgactgtaagatgtttcttgggttaggttctcacagcagcacattgaacacgaactgggagggatgagtgagaatagccaaggtctaccattgtgcgtctcatcgtagccttccattgtgacaccctttacctgtagtttgctgctattgtagcataattttcagagaacttatttagaagctggctcacatgggaccaggcactctctttgtctcctttgcgttccattctcctgctttgggtgacattgcagaaacgatgcttgttcaagagcccataattgatcagaaatcagagcttcagactgcccagtgctctttccatgtacacttatcttcagcatctgcatcttgtcaatattctcccccaagaaataacatgaaaccagtgcattgaaatatggggcagccaaagttcgtactcaaggtcgtaaagttcagaaaatcctccgtctgactacattcacgggtgctaaggctttagaagtgcttccaggtggcccactgaagttcaaggccattctcactgctaattagctaattgccaagcccttgcatggggtagaatgaatagaaaccatcttgatagctacaaagaactggtttgtactcctggcatgccactttaagttgtatggtgttaaggatgccatacatcctaaaccaggcgctgacttaggcactgtctgtcctgtatgcattagaactatcatgatagccagacaatgccaagactgtaaaagcactttggacacgatagcaataaaatgctggctatatagttgttgtcaatgtttggctctttcatatttttttaagtcagaactgaaaagatttcatccactgatgttcatatagaagaccaaaaaaatgagaaaacactatgaaagaaacataaacagaaaacaacagtaaccaaagcaaagcttttacagtatcatgctctagagtcctgactgacatgatctgtgctgggctttccagtgtgcaaactgaaacaaaagaaaagaaagaggcagcagccagtgcgacttggtttcacattttccctttggttttctgattatagtctcccctgcttgcaagtgcagcgagaacctcaaaagatcttgtttgctgcggataagcaccaactcaatgcttatcagcctttatctgctgcaaactcactctctggaggcttcaaaggcaggggagagcgcatcgcctagctctgagagatgtacccgcttctgctgggtttcagctacaggtgtagcccatgcaaaccttatcctacttctccccaactagagccatttgctcccatccagggagaaggacgatgtggcagcttggctttaagtgtggggatgggtggaggagagaagcacgcaggaaggttgagatagtatgtaaagtaggggagggaaaggcaggctgcctacccactgttacttctcacatgcgcacaccacaccacacacacacacacacacacacacacacacacacacacacacactcctgctcactgctcaccttcccctctctctttggctcacccaccccctctctagtccactgttttctggtagagagggacaggagatgggagggggaaggaggggatgggggaaggggagccagcattttattaggctgttgaatttgatttattggggtggggggtgatccttcgttttcttgccacacaggttactctcaaagtgaaaactctattttactttgaaaaaaaaatgagaaagtgcctccagttatgaatggagctctttgtttccttccagatcgacaagacagactgtttggttcctgtctgttcgctcgcaaaggagtgcaggggcctgggagacagatgtggccttaattgcatgggaatattagaagatcgttaagccattttgacaggattttcctcttgctgaaggaactgagggccttggctgagccacagccagctccttccctctggctgggcctctcacccctacctgtgagggaacaggactgttgactcataaaggagcagatgactccttgtctccaactccagctttgtgtctgcatctcatacatgcaccgaccaacctcctaagaaaactgggacctgtctgtagtgggggtgggaagaaaagctggcttttgaaattgtggcacacagatgttctctgatttgaaatggaatcgcgtccctgcgaacccattggaagtctgcagtgctctgtaatgcctctaaactatagggtcgtgcagcactgtcccctacagagagtccattagttccctactgctcatggggcttactagcagctctggttccttgctcctgctagcatcttgagagaggattgcaccaactactcctagccctgaagtaaatcaaaattgcaagtgttttttttttcccccacaaaatgtgtgtggacttctcattacggaaaagtagcccactctgattgaggagcttctgcttaggaatgtaccacgtgagagaggaggcagagagtgcccatgctgtctggctagacagcaagagagctctataaagcctgagggcaccacaagaggggctgggagtaactcccctgccacggcaaacagtggtacccagagatgctccggagtagcgctttgagtcttcctttggttggcacatgtatttggtgatttttttttaagtcccatggaagttcacaaattagagcagagaagttcttgaacactgttgggtcatcaaagagcataaacatgttcagtctcatgtcttagaacattctggtcatgtttctctcacagcttatattctcttctctcacttaacccacacagttttgtccatgcacttcaaagcagatatttaaatattcacttaagctaatctgccactagagggagggggaagccccctctgcccttattaccactggattctggtccagtcatccctgtgggttccagaagaagatgtttggatggtttccccattaaatcagtggtgatgggtgggtcttggaagttacttttacatagtctttcttccagagggtcagaggagcctggagcatcctgcaggttgaggacacttgttagagttgagctagtggggtggttgcctaagtgatgtttgggtcacatcccaggagggaagcagatggagtcactagaaggaaaggcagaagatgtgcaccagcacagatcctgttttctagcaagcattgttaacccaacaggagaaagggaagtactatcagacatggcctgccagtccctgagctgcacaagtcaaagatgctgctctcctcaccatgactccttgaagaagtatcagtgatgtgttaagctacctacagtgccaagccacaatctctagtttaaactatatttactcagaacaccaaagcgccaccttcaaagcttgagtcacaagcctatcacagtctagtgccatatcgccatggggtcttaccttctaaaggacttcagtgtagagccagagcacttaatctaacagaggcagtgccttagagatgagcccttgacggtggcaagcctcggcccctggatcagtccattttctgttgcttcaacgaaatgccacagatgaagtcatttatgaagaagaaacacttgggttttattgttgttggtggtattattattattttattattattgttatttctggggattggtgtatctaagagcctttcactgacatctggagagagctaccttgctgcatcatgatatggaagagggtatgtcatggggacagcaagtgagcaaagcccctcttccctttcagtcactggtgtagtcatgtgtgctttgttctcctaagcctatctcaccctatttatttcccaaaacccttacctcacagatcatacattgtcaatatataaacacttgggagaaatagtcaatccatagtgatccaagtcttccctccatgtatattgtagagtgagagaggtcatgttcaccgaggcccttgttagctatttgtgtccaggaaagtcccctggtcagtgaagtgtttacattcctgctcagctcactgctttcttgtcctctgaaatccccctccttggcagtccctttaactcacaccttgacaccttcttttgaggccaggagttagctacttaactgtgctctgagatgtagtgtttacttggatggctggagaaaccatgatagcatctaaaacacgatacagattctggggaagacagcaaatatagtctacagaaaaaccagaattaagagacagaagttcttacaacctttcttggctcagtattagacggaacaaggagagcccacagcgttcttccacggggcgttcttccacgggatgcttgctctcatctctccaagaaagacaatgttgaagaagttgcgatcattgactgtcttctctgaaaaaaatcagccagaacatcctgcacatgggagatcttgagcatgcagacaactaagtagcattagcaatatgagaatatgacagcctttgacattgagtcccaaagtaatgaaattcagagtggggaaaagagctaagactccatagctaacccttaagctcttacctctcttattctcatctctagctcgccttctccccctcccttctcccctctctccacatggccaaggctggcttctccttctctaccttcactctctctgtctgtctctgtctctctctctgtgtctctgtctttgtctctctctctctctctctctctctccctctctctcactctctctctctctctgtctttctgccattctacaataaaacattaaaaccatgggggtgggtgggtgggaacaattcataagtaagaaactaagacgcttggtagcctcatcaccattgtatagactggtctcctgttccccataaaactttggaatgcaaagggttgaaccttactgctggcacgacacatgtccttgaggccgacagttactgcttctgctgggcaaggctgctatctctagaagtttccaagagtagaatactaagtgctttttgtgaagtaactaaacgagctcttagttcctaggaaccatcagtgggtttcaactgtggcatctgctcaaacagctttattgaggctgacaaaaaatggtctctccagacaattcccacttctgtgtttgcattggcaagccatggcaggacctgttcacaaaatatctgcttttcctatagatggatgctgagagacaggaggtcctggagccagagtgagtaggtttggcacttgagtaaaacaaggatagaggccaactcagtgggtgacagctttgagggtggctgccagctgagaggccagctgtgtgccggagatgatgtctaagcttcatgatgagaagacacttggcttctcctggatacagcaggctgtcctcagttccccttaccttccctctggagtacagagcagggatggctgctactgtgcccacagagccaatattcacagaaatatccatgctcgcaagtaggctagatggccatataatgcatcatctcgatcgatgtaactctgagagtcaaaggaggctgtgctactaggcactttcaggactagcaagagtaaagcagaatgtcccaggcaaatgggagtctaggatctctgcactaacggacttcaggttcaaaaccatgggagggaggccacaaatcatccaagttgatcctttgatgttgtaggtcaagaaatgaacccatacagatgaggtgccttttaactatagcagggtttataaatcacagcaagattatgtttatgggatacctacagtgtgacagacaagagttaggatgccattattagatattactctatggtaacatactaaacaaattttacaaaaaaaaaaaaaagaaagaaaactgaggcacagaacgatgaaagaacttgcataaggtcatagaatttgcatcttctaggtgcagaattcagattctgacattcgggccttgcaggcaacatcagagatggtagctcagtgcttctctctagcagccagcatggagagggcactttatacacagccactcaaggcagccctttggagcaacttctgtcgttttgtatattttggataagggggtaaagcagtaataatgtctacaaaaaaaaagcaggagcaaaatctagatagtgaggcacaatggaagtgtatgccaaactgcaatgaaaaccaaagttggagattcaaacagaaaagcccatgtgacactgagggatgaagcaccaaactgttggtagagggctagagtggggcagacctcaggccacaggagaggttactatggtggcacgaatcgaagggaagcttccaagaggagacaaccagattgtgactgggtggggcttggcgaggcagagggatgggagaaggcaactggatgaggggaaaagctgggtccagctcgaggaagaaaagcactacttgttaattaccaatgcaggaagagcaaacagcgggtcacacattcacctaaaggtgacaagtgatggcaaagagggtgggagagttgatatatgagaagagaactctcgcactggacattagaatgcagaagaagcaagcgagatggaatgggagcagaagcaaagatgggtgggagaaggcacaaaggatgctgatgagaaggaccaggatggagcagcaggagagtcagcagcacagaaggcagagcctcaagctgctgagcccatccagaaaatggccctcctcaggcaccgcctccctctgttcctcccatcagcaaagcatttgccacatgttgccgtaacaatatggtaaccatatgccccggggccacagcaaaactaaacaccttggatagaatggttcatccagatgtgctagctagaaatattgcaccctcaggactcaaggctgagctgcctccccacttgatgggcatgaggtcaccaagcctgcctcccagccgtgaatcatacaaaggaaagagccagaaagacctgggaagtggattcagggatctctcctctacacacctcaggaggaaaggagtaacactggtgttatgcctgctcagcccatccagttgaactggcaatctcccagaagagtaccaactaagcccattggctcagcccttggtatcagttgctatgagcaaggggatttgcttcatggggctggctctcccttcttctttggaagtggttctcaacttcctaatactgtgtgaccctttaatacagtgcctcatgttgtggtaacattcaactataagattattcacttgctaccccaagactgtaatttttcgactgttataaattgtaatgtaaatatctgatatgcaaccactgtgggggtcgtgacccacaagttgagaattactgttctaggtggttccaccagggttagtgaaggggtggaagcagagggcccccttgtgtgcttgtttccttcagggcttctggtgagtctgagaagtctggttgccgtggtaactgtcacaggagaaaattgtgggttcaggttgtagtttctaagaaaaagacctccagtgattgtttgacaagagtgctcagtggcaaaaaaaaaaaaaaagagtgctcagtggctttgcattagaaatagccaacggatgtggcttgttttaaaagaggaccaggctgggatggagagcaaaggtcaaagcttctccaaaaatgctgcagtgcggaaagaagatgtcagttagtggtagaggtgttggtgaagaggagggaaagagggagaaggagagggaggcaaggatttctgcctttcccatcatgctctggggtttttattcctcagaataacagattgtatacctactagatcctgagaagtgttcaagcaaaggaaggaggaaaggatctggaaggctgacattgcttttctcttgattagatcagaatcagtatatgaggaaataaaaagaaagtttttgtggccctaggagtcaaagcaataccccagagttccagccacctatcctatctcctctcctcaatgtttaagcaaactggcagcaagcatgttatcccctgatgaacaagcctctgcccctgaggagagagcaggctggcaggtctacactgcctccttctctcctcccatcttcagagtcttctgttatctcttcaggtcttgattgggctttgggggagacaaacaaccagttctctggtatttcatatgactgctactgccatctggagaaaacaggcaggacaaagcccaacagcaagacagaaatcacatcttctactgtgtgtcagcaacctcccaagtacaactcacctgagccaaacttgcctgtgggacccaattctgccctcttaactgagaattctcttttattatttcctcctgtagcactcaggcttttaatcctgcccggtatcaggcctggcagaacagggaagaacagttcaaagttcctaaccccagtcagtcaacagcctgccttcatcctgcccagtcccacggcaccatggaggtccaccttagatcacctccagttttgttatctggagagattgtcgcctggtggtcagatgggaggacatagccagtggatctcaacctatgagttcatgactccttttgaggttgtctaagatcattgggaaattcagatatttacattataactcagaagagtagtaaaattacagtaatgaagtagcaacaaaagtcattttatggttggggggtctccacaaaatgagggattatattaaagggttgcagcattgggaaggctgaagaccactgatttaagtgcaacagagctctatcaaccccagtgtctccactgccttcttaaaaaggcagacttctgcgaggtcagattcatcgaggtgaaacagaaagcagggactaaggagattgcttagtcaatacctgaattactgtgcaggcatgaggacccgagttcaggtccgcaacgcccacataaaaaccagatgaggaggcctttgtctatagccctaactctagaaacacagagacaggaggattcctggaactcaccagccaaccagtcttgccaaagtgatgagtgccagatcaaaaagagagggaagggcaagtaatatgatcaaaacatacttcatgaaaaaatttcaataaaaaaatgagagtgatcaagaaggatatctagcatcaacctccgtgtgtgtgtgtgtgtgtgtgtgtgtgtgtgtgagagagagagagagagagagagagagagagagagagagagagagagagagagagagagaaacagaaagtaaaaccgtagcgcaaaacattctcttcttgggacacagacaggtctagaatcccccatcctgtgagtttccacattcagcagtatgatcatgctctgtgggaggagagtttaactttgatctttagcaatgccctttaaatgtggttgcagtcaaaaagtaatggcgaggactcaaagtcaacaggcaaagacacacacaagcccagagagagatggagaagcagctgactggaggcacagttagaagaggcctgggctctggatcctggtgtgtagcatcccctgagaggtcacagagatcctgtcctttgaacccacttaggcccatcatcctaatttgttaatcccaatgaaatcctttcatatgcaaggaatcccactgtcactgcaatcaggggagcacccctctctggaccatccactgcagaagctgcctccccagcaagtggcaatttgagacagggatggtgtctttggatgttttgtgctgctctagcacaatgccacaggctggctgtgctaaaaaaaaaaaaaaagttggccttatgggttctgcagactggaagatgccaaagggcatgaactggagagggggccttgtgctgatattatgtcctaagtggcagaagagagaaacagaagaaagaaggagagtagagaagaaaagagagggtgagccagagagataagtacttgggaggaagagggcctgaactgggtgcccctgtgactaatccacttctacaagagtgactgtgaaccattcctacaggcagatcatcaggggacacatcctcttagcagagagagcagtctcaaaagggagtttggtgaccaaggaaatgactagggcaagccaggcttcccagggctctgagaagggtctgcctgtgtgtgtgcagcctgagattagaggggacaaactgaaaatggctgcagagcgtatgatccctgcagtcagtcaactggagttgtcattctggagctgaggaaccccaggcaagtcctgggtctctttaaggtttggtttccgtcttggtagcatgaggacccaacttacattttaaagggttatggttacaaaattgtcttgggaacatcaaacaatagttattctagctttactttttgacacagatcttgctaagtaacctagactgggtcctcaaactctggatctgtctagccttaagcatccccaagcgttaggctacaggtgtgagccaccaggcctggctatttaacctgtctagtttaaaagtgtgagttgggggagtcgggggtgggggagtacacacctttaatcccaacacttgggaatcagaagtcgaaggatctctgtgagtttaaggccagactgctctacaagttccaggacagccagggctacagagagagtctctgtcttgaaaaaccaaaccaaccaacccaccaaccaaccaaccaaccaaccaaccaaccagccaaccaaccaaccaaccaaccaaacaaacaaacaaacaaacaaacaaaaaatggtccttgtctgtttggtgcttggctttatggcaccggagatgaacatagggttttactaacctaggtgaggactgtgtttctgagctacaacagctgttgtcacctgatgtccattgtgttgtcctttccagagagtaattctacaatatagtggttagaggagtttatcccaacattgattccctttcactgtgtgaacctggaatagttattctctgtgcctcagtttctccatctggtccatcctggtaaaaaccacagtcaagggattttcaatcaccctttgagtatggattttctagcacacacacacacacacacacacacacacacacacacacacacacacacacacaaatgagtcccaaactcacagaggtccttcagcttctggtttccaagtgttggggttaaaggtgtgcatcaccactacctggctcacacttttaagttagaaaggttaaatagccatgtgtggtggctcacacctatagcctaggcttgaacgaactacagtggcccccatccactctatttaatggtttgctgttataatctggaggtcagttctggctggtggctggtggctgatgaccgtaggtcctctctgtgtgtgcatgtggtcctttccatgcagatttagtaacttctttggacttcctcataacatgatgctgatttgtaaggactaatatgaagtgggtggaggcattagtactttttatcatctagcctctgaggtcaagcaagagaacttctatgaccctgaatttgttgacgcaaccatgaaattccatcgggcttcaggggtataatggttaacttgcattgtaatttggatgatttatagtcaccatgggcgtgtgtctcggggtgagtctgtggagatatttctgaaaaggtctgactgatgaaaaatgctttaacttgaatatgaatagcaccatctcacgggccgggatccgactggagaaagcgacctggatgctagcatttgtctttcttggcaacgtgaccatgaatgcagtgtgaccagccacctcatttctactgccaccataccctgcccaggatgatggatgggatcaccttaaactacaaatcaacacaaacacttccctctttaatttgcctcctgccaggtattttggtaacagaaatgagaaaagttgctgagaaaagggaagagaaatagaatctggctcttaatggaggagataagactgtacatatggagatagccgttaaggggaactggaattaagtttagtaactggtgactgacaggtgtttcacatgatcctccttatcctactttccattaaattatcttctcattccttcttcgggaatcagaaggctcgccctagagcacagcggggtccctctccgaagttcatcgcgccctggagactcccactctaggctgatgtttctccctgtgcagaatggttcccaaagcaatgaaggcagcaagctctgctcccaagaaagctgtcagcattttgtatgccctcaggttgacaagagaaggaagttcatgtcgttatgaaaagaatgcagcaaaatgccaaagctccggtgttgcccacggtgaccctgaggagcggatatgccagagattagctttgcagagcactagtctgggagccgctctgtggtccccctgaacatgagaagtgacgggaaacttgacattccttttccccatcacctccagcaacattcatcagctactgaaattgtcctttcaaggtccagggcaggacaaaagcaaaagagggatgggtctttgggaaattactgcctctttgccccacatcttgtgcccttctctcagaaaagaaaacacagcttaatagggctgagaatgagcaggaaatccaggacttctcttctgtcttgtttcaatctcccagctcatagaaggatgtgtgaggaaaatttctttggaatattcctgaatagagtgtagagatagatcgccaggcactctggatgtctgtctttgcctctctggatgtttttccgtgtctgttttagctaagctgtttaagagatggacttggtggctcttccttcatcctatgacagtgtttattattcttcatctgacatggaaagcacctactaacctaactaaggacaacaaaaggtagaagatatatttgtgaatttaaaaggaataaatgggtatatgtatatatgtatgaacacacacacactcatatgtgacaaattcaaaataagtgaattttagctaatgaatcagatccctgcatggctttttctgtcacttgccaaatccgtattatgtaaacagagtatatgcaagcaggcactaccactactgtatccattactttggccatggatgcctcctacgttggttgtggagccactgaaagagccttgtctctgccacctagaagcccaaaatcaagctagaaaggggaagaagtcagggcctacggggaacagcatccatcacttgaaatgaagattggaaatgcggaatagtaaagcactctgcttagaagaccagcatattcttgtttcagaatctaacagttatcaccaactgctagatctctaacctttgaaaaatgatctcttattttatgtcagtttttttaaaagaataccagtcttatttccaatggctcctggccatgtaagactcactgagcatccggcaagtaggatttattgggtggagcgtacttcttccctgcttcagacaaagccaaggcaaagagtttgccaagggcttctggtcagcattgggagaggtaaggcatgaaaatggaaggcccaagccagtcagaaggaggggtggaaaggagggagataggaagatagggagggaggagggagaggaggagggagggagggagggagggagagagagagagacagagagaaagagagagagagaactattcataagggaaggtgctgtcagagaaacagcatcgaccatgggaaaagaggggaaaagataaaatagtagactttaagatgatgcagtagacttacagatgaccatgtcctttgctcaggagagtagcgattgggtgagaggaggacaagtcatcccaggagctacttgattccctcttgcaatgtttctctacaaggactataaatgatatcataagtattgtggggagtcctgaaaaatggccacccatggtcagagagctacatcagattcggatttagctgcttgcttcccaagcaggtctactgagctttcttcgaacacctgctacctaatccatgcatacagcagacactcatcgagcaaacgagtgtctaacacgctgggccctcgacagcactcagaggccaccctggtaatgaggcaaaggatgcctgctcccaggtacttccatcctaatcctacataatagtcaaaggagttctcattcacatgtctctttgtctccgtctccccccagcccccgactcattcattcggagacatgtgttcattacctactaggtgccagatgctattctaggcaaaggacttgcatggaatgatgccatgtcccctaagggtttaaatgtcatactcaggagattaacaagctcatgactccatgggcagtgatggttcatgattgggagtctggtttgacgtcactatgggaatgcaagatgactgcagctgtgtgtgtgtgtggggggggggggctgttgtgatgcaggaatcctagaaaggaatcggcttgttctaactgaacatttcagagcgtgcttctccatgcagggacaccgtgcccagtactgagggattgtggttaaagtaaaatagaagggacactgaggatacatagggattctcctagaattgccaacagagtctctaaggcctgacgtattcctcattctcaggggaggaatctagccaggttctctggagctagctgcccatctgaattagggattccagaacagcaggactgttaggagccagaggttgatgactagattatagataggctctttaggagaattatctaacatgcttatggcggcttggaactttccaaatgcccatttgcagactgtaggaccaaggaagttagtactgtggctgagaaagatggtcgagtgctgctattgtaagcctgcggctactgccagcccagcagtcccaaggccacatcctgggccctgatgtctaagggcagcaagggaaggctgtcccagatatgacaatgatggtgatggtggtggtggtggtggtggtggtgatggggaagaggaggaggaacagcagaagcagcagcagccaatcaaagtggcctcttttcttgaacatttagggaaaaggcacagggaagaaagaagcattgctcaggttccatccggtccgtccctgtctcatcatctccaccccaaacattttcaggctatctcttggtactggctttaaaactaaagatgtaattatttactctgtcccaagaacactgaatagacaattaggcagtttacccagatgatgtcattttatcttcatttacgccccaccaggttagggcttgttggcatccccaagctacagatgagaaaacggagctcctacagtataaagtcattgcactgggaactaaaggaacagaggatgaagtttgggttggcacttagagcctccctggctccaaagattgtgcttgaagttctaaaacccacaaaaatcactttcaaagggccaattgtctaactggcaaaacaaaccttctcagtgagtggtagtgggtctgtgcccaagcagagggcatggatggaaaccccacatcatcttcattttctgtgtgcatgaacaagttacttcgcttctccgaatatctgttttcttgcctaaaaaaaaaagaggtgaaaacacctctcatatcacttggatggatgaattagatgtttcgtgtaaacataatttcactactagtaagtgctttgctaaattgtctactgtttctatttatttctataatttaagacccagtttatttgaagtgatatgggaacgttaccttatctgtactaggaaagcaagctagttttcatcggagcctatgtatcagtcattgatagtatacatctcctagctccagcagaggatggggggaagtgttgccctaggccttagcagtccactgctttgtctcagagctcagcccgctaactcaagcagtccctctgaaaggactctaaggaaaggggtcgccacagagtaccactgtgctagaatatttgacaacttggggtagggaacattgtaccaccttctaggtctgcagctcaggggtgaggcaccaaggcatcctgactaggggatgcaaaggtgcttctagtgaaccaactgttgagcttgttctgggctcccttgtagtgatccctactgaggtgctaagaaatcttataggtgggcattgtacagaggtaaagaacctagttttaagcagcatggaaccaacaggtctttccaagaatagcctgtgttttctgaatgaaatcatcattgccccacgttcatgggaaatgcaaactcattagagaccaagaacagtggtgaaggtgaatcccccattggtgttccttttatatttggtctgccgtgccaaagacgggtacttctcaatatctcgccactagagctgctttgacagcagcataatgctcattcctataaagagtttgaagtacccgttaatagctttgagtttaagcattaggaattttaaggttcaagtatagagctttgaggagcacacattaagtagcaacatcagctcataaagctacaagagagaggcagtgctccctggcacactcactctcacctgtctgccgcagctgcaccttggtactggcttctgcatctcattgtccatggtcttctcagtccacagaagtgacacaaaggcctgccaccactgcccagcacccatcccctcctctgcactctcccactctcctgtttccatcctggatgtctgttatctccaaagcagttttgaaagggtcctcactctcgcccggaagcagcagggcacccagggcatggtctcaggcttgaatgacaaaggggtcctatttcctggcaggtgtggcaagaatgtcctccccaactgtaattttcacatggggaaaattaaatcagcttctttggcacctcagcccccaaatattttactgcattgctgttggcaacttatcctaactaggttgattttcagattcagtccaaaagccaaacaggaaacaaacctttttcttcggttctttctttccagcctcactcatctacagagtctgctttccacactactatgtgggcagaaagccctttgctatcaatgattgtaaatacaataaatcccccaactgtgtgtgtgcacataaaggatgcatgcatgctgtatggagtgtgtgtgtgtgtgtgtgtgtgtgtgtgtgtgtgtgtgtgtgtgtgtgtgtgtatgtgtgtgtgttttaaaagatccagaaattcaggacatttttcaggaaggttttcattgagttaaaaagcaccccagtgaaccagttagaactgtacagaggttgtagtggcaactcgcaaatggtttgacagatagggcaaggctgggtaattgaaaaccaagtgactgagtgtaggtttttccatggtagaaatacagcaagttcttgggggaagaattgacgggtacaagctgtattcacagcctttggaggaatgggatctgtctgagattaggcacaggagattggggaagggtaagagcagtgtgaggagagatctatcagtgtacgtgcacctggccgggtcaggggtcagaggtgtggggcatttggggatgaatcgggatactctcttcctgtgatgctgccacttgactaaatgacctttgattggctctttgttttaaataaagtgtttatcctaaaatgggttctaaggggatccatcccttctgctcttgtgccagccccatgctgtgctgctgtttcttctgcctgcaaatctcacttccttaacaagcctccaagtcttagctctcccatttgttccctggtgcaacctctttgctctgcgtgctgtgcatgctgcaccatctgtatgtcctccttgggctcagcattcctgccttttgctgcttttgacctcctggttggatggcagtgatgacaagggccttcccttcccccacagcatccccatgtccatctctgcctcccagatcgcctcaactctgccattgtatgattttgctggaactctcaagactgactcatgactaactagaggcatagtctgttctctgccgcagaaatctgcttagatgacatctctttcaacaacagatctggggcttgttctgcattttttttttttttgtcaaagagactctgatgaatctttggtgacacccatataatgtcaaagatttatgctcagccttctgaacagccataacttcacagttttcaacttggagttaaacactaagtgtctatgtaaaagtttaagtttgtttgagacacaaagccagagcagaaccttaaccgaaatgaagagtggatctaagaaccaaaatacaagtagaccagagccacagccttcccctgaccctgcccaggggcagcaggtgaagccagaagggctccagcagcctttaggtctgaatgaaggacgtccagacatagcgagggtatttgctttagagaaggcattccaggcagagatatgaattatgtagggagagtaggcaaacctcaagatttaaaagggtctcatcatctatcattctgttcttaagtaaaggcagggttgccatagcaacacaccacaggctgagtggcttaaacaacataaatttatttgctcacagttctgaaaactggaaacccaaggtcagagtgccagcagggctggcttcctctgaggctttctgctctggcttacagataatctgtctccctacatgccttacatggtcagtccttggcacacagccacccttagggtctttgtgtgtccaaatctcttattataatgagtcagttgagtttagagcccatcttcacattctaatttcaaattaatcatatccttaaaggtcttattgccaagtggaatcacattctaagttacaggtggttagggatttgatatatagatttcagaggaagcggaattcagcatagaacaagaacccaacagaacccttgtttgaacacaaatggtcatcactgctagtctttctggagttttgtgctgtgcctagtgttgctatagctatttcccattgattagtccatctttccttcacagtcgggttacatggaatagattatgtagatgatgaggcgattatagatggctgccatttcttctgaaacatggtcagcttgcttttgtgtactgcgtggccctggggaatactgtcctccagccttgaatccctgctgctaaatgtgatttggaatagtggggggggggggggatcttatctccatgctttgatcaacagacagtctctggaaggagtaaggctatgtttctcaacccattaccaaaagcctcccctgagtcaggagatggtacagtatgaattggtaaaccatggtctcttacagagaccttacactaactgccttttctatatatcagagcttcctcctgaattatttggctgaatcatcaacactaagatctacaggacatactcattcccgctagccagtcctcagcacaccactgttcactcttaccaaacacttgaactacagttgctaatttaattcacctagtaagccagaaggaaaaaaacaaacaaacaaacaaacaaacaaacaaaaaaactattcatcctcactgactgggatactgaaatcgacctagctgaagttctggattccctgattcccttacatagcttaggtctagacaagctctccggtggctctccatgacctcacctgtgggataaattctcattttcatctctcctagcaatgtggctatggcacacagttagtaaaatgtgctgctgtctgtgtctggaagctagaaccaacactggtatcacctcttgcaactctgtgtttagccaccctgtctccattctcctttgtggggcttctagctcgaacactcaacaagtacacctgttctagtgttcttccattccaatgttcagactcctttctccccacgcaggggtaagcctgtgctgacactgtgaatctattaccttgaacagttacagcttcatgagaggactgccctgtgccactgtgatatctgagagttggggtgtcgctggctcgggtgacaattgatactgaatgtcctatctcttctcccctcttgcaggaggctctgtctgtggtgagtgacgatcagtccctttttgattcagcatacggagcggcagcccatctccccaaggcagatatgactgcttcggggagtcctgactacgggcagccccacaaaatcaaccccctgccaccgcagcaggagtggatcaaccagccagtgagagtcaatgtcaagcgggagtatgaccacatgaatggatccaggtgagcctgccagagttggccagtcctcatgaagcagggaagcctgggcgcaattcctcctaggaccaccctgtcaagccgatctgcacaaagcagcagatgggtcaggccccaaggccctactgcagtactcagtgcgtttgctgtcaagcttaggccaggtccagtcctgcaaggaaaacgcatagcagtaagatgctcttcctgtgctcttgaggatgttttaaggtcctctgggtggcactaaccagagcaaaggtgacccaaaaattcttcaagtaaaagtggaaaagtggtgagaaagacagactgtgtgccaggaagccagcctcacacatgggaagtgtgggggtggagtggggcggggtcattaggaaaggccaggtacagccttgtttatggaactgggaaggggaactcagggataaagagcacacgaaccaacccattgtcaggcagccccagcgacaggcactacctcaacattttggctaaattatctaaacccatctgaataccagctttctcttgtctaagccagagtcagaacaccaaacatgtttatcaagtgtgttgtagggaaaggacccaggacattgtctagttccaaagtgctcaatgagttagtgaccacagacacacaagagggaaaactttagcctagtttattacctgataattcccagtggattcccaggtaatccacttagcctgaagcaaacagacatgaaagtaaaagcaagtgagtaaatacaagacaagaccttggttgataagctaggaatccagtttattccaccaacagaggctgaccctcaggactgccaggacactaagcatcatcggacccatgagacaaagctgatgaggtgacaatcattgtcctgcagggattgtggacaggagtgcaaaaagataagaagttactgaaatagcccagataaggaatcgaagttctgggctagggtgacagtaatgatgacagaagcccaggggaggtgcataaagagcatatcaaagggatggctacaagagctcggacttaataaacattgagaggtggggactggatgctgctgagtctggacctttgaaaggggatgcagttagtggcgacaagcaggtgggaaggggtgatgccttgaggaggggacgtcctttagcaccctttgtgagcaagtggtacagtctctagattaaaatgtctactggatttaggaagccaaagcccgtaggattgggactggaattgaggcttaggcatcctctctgggaggcttaactgaaagtgagtcatgagggaaactagtccagagaggcaagaggaagcagggagggggctgctgccgctgctgtaagggagttcctccttgcagctgtctcagagctgccctctagaaccctcagccctgccacgcttccatcccatgaactaaaaccaggaagtgggaccttggccatccctgcagggttctagggttaggggagctcagagaacctgagccttgagccctccatgcagaatgatgcttataccatgattccggtcagtccattctcagcagagtgtagtttatcaaacacttgtatctagtcttgtatcactgctccctactaatctagaaggccaatattctcaacctgttaccgtatagaaaggaagtcgagagaggctaagctggcgccagcccagcctttccgattgcttgggcatcttgctgcctctccctctctgcctgtgcgtcatggttctgtaccacgatcccattctgccagcaccctctggtgatgaggccagttcagaaaggactcccaagctgcctgcaccatcacaaggtgttcctgatccctactgaaaaatctagatgctaatattggagagtctatagtcttgatgtaccctgtatctagttatcattgcctgccaagcccacagtgtctctcccagctgccacagagacatctgtgctccactcttccccttccctgcctgagacctattctctcaacaggcaacagtgaaagtcatccatcctttcacaacagtaaccttcttgctcaaaaacctttagcatctcatgtcagaatctaaagtcttagctaagtcccagattctccctggctcctgccttcctctatgccatcacacaagactctagctgctcctggaaaccatagcacaccactaccttggtttatcttccccaagtcccttctttctaaaacatttcttctccatttattcatacaactctctcgggtttttgcccatataccacctcttcagaatccctgacactccccgaatctgaaagagcaccctatcgctcgctctccctggtgggttattcaagttgtcttctccctcactagaatatgggcagggcttttgctcactgggcagggttcatgtgtttcttcaggaaaaagctaaatgggggcacagcagagcaggccaaagtcaagttgcttcttcaaggacatgccatgtaggtatgagttgagtctcccttacctgaaacatttgacatgtgtttcaggctctttcagattttagcatgtttgtttgcacacagtgtaacagatatctcagtatgataatggctgttttgtatgcacgtgtgctcagtgcccaacagtaagactatagcctggtgcatttgcattgggactgtgggctctcttgtgcatcaggtatggaattttccttctgtggcctcatgctagtacccaaaccatatttcagatggagaatccgaggaacagatgtccatatgggtgatccccaaggtcacaatgcccaggcaggacagcccaagctctgctgagttcaccctgtacttttgaagcatgggttcccttctaacatatctgtatcactgagctacctgttcccatccctgccacctgggtactgctgggccctccaggatgctgtttaagagctaagagaatccttcaaggaaaaagactctggatccatttccaggtcatgcctagcattagtcacccagacactagctggaagaagcccgtgtaagtattcccataagctggctgaatatttacctggctttgggtgtacagtctcacctactgtgctgaagtaaagatctagtggagtctagagccacccaggtaggcatagccatggttttcacctaatcaataccctcaaagcacgcacaataaagagccaggatcaaagactttcagaaagatgcttttatttgggatgaaaccatacctagcattaacttagcattatttaactatgtgagagaaataacatgtaaaaacaccaggcatggtggcatgctctggtgatcccagctgctgaggaggcacacagctggatctcctaggctcactggacagacagcctgctaggcaagctgcagatcttatgccacaaaaaggtaaatggtttctgagaaacaaaactcaaagttgtcctttggtctccagaggtatgtacaccagcatagaactgcatgcatatatttatacacaaaatacagagacaggcatagagacagacaggcagacagacagacagacagacagatttagagagacagagaaaaaaacaggggcagagacagagaagcgggtaaagagacaaagaggcagaagcagagggctaaagaggcagagagagagagagagaagacaaatgaaatgaatacatagatgtcagtctgtttaaattactcatcctgaacagtgcaactttcttattttctgagtaacacgggactttgttagttttgttagttgcatgattttaagatacatatatacaatgtattgggattcatagatatatgcagtgtattgtgattctattcgcccattactctcccttgctttcactccaagacccttcttttaccagctcatcccccaggcaggaaacaacactcccctctgcagcaactaacagttaatatctccttcagatggggcagtgtctcatgagcacttcctctatcagtgaaggaagttgacgggttcagtcttccaccagtatccattgcttctgtgtctctgtggttggaatggccatgttttatctgtgggtcagcattttatgacacccctccccactcccagctcttacatcacttcatctcttcttctgcagggttctataggcttagggtgtatataatatagatttcccagttagggctgagagcttatcggtcacttagcctcagcatctgatgaggtatgagtctcgacactatctgtcactctctgaaagaagctttcatgttctagactgaaagggatactagcctatggatataaatataaatattctggagacttagcagcatgtccatttagggaaacaacagcattatgttctcattgggtccaagactccaccagccacaggctttttaccaggtttatggtaccagatgtgtatctcctctcatgcagtaggcttccaatcacagagtggctggctacccaccatatggtcaagccaccgttgtaccagtggatttataatgcctgtcaagttgtattgtgcagcaagcatgagcactggtacacttcctcctctaggagcctgcatagagcctctggcaccacaaatgccagccagcagggagaggattcccaactcaatcccaactatttctttgtgtcttgtgaccaaaatgtgtgtcatcttcatcaatagggtcataccttctatatctggtgggtatcaagagttgcatagcatttgataattttcagaaagtccagttatcataacacaaaatgtagaggagggccaatggagacggttcagcagaaggtgcctgacagacaccatgcctgacaccatgcctgacgacctcagttctacccccacagagcctacatgaaagaatgaaagaaccaacttcttctagttgtcacctgatttcaatgcccatgccatggcatgtacccacgcatgtagtttgctcaagcacagatgcacacaatactatttaaaatgtagaggagggtgtgtcaatgctccaaagaagaaaacagagcagggcagacaacttggaagttcttggcttatggaccaggtctgtggcacccagcactctgatgcagtggccactaactagccccatgttgctgagcactgggactggagctactctatgagttagatgtgctataatgtaatatgcacattggacctaaaagtcttagtatgataaaatgtaagatatcttggtgactgttgattctgctgaaataataatcttgtggctgtattaaaatattaatgcatttatcatattatcatatataatatttaatatatttaatatgtatttcttatcaaaatatatttaatataataatcaataacataatatattgatatgttatgttaatgaatttattcaaattcatttcatcttcttagatttatttatttacttatttatttattgtgcgccggaggagttcggtgtgcaaatgtgtatgcgcttcacgtgcatgcctgatgcctatagaggccagaaaaaggcatcagatagatcccctggaatggaagttatgcatggttgagagtcaccatatggccctctgcaagaacaagaagtgcttttaactgctgggtaataatatctctggcttctcactttttcaattttaaaaatacacctactagtaaggtgaaagtgacccttgtgtctcaaatatgtaactcacaatctacttggagtggaccgtgatgtagcagaacatttccgattgctcagtgattcacagcacatccctacaaagttctttcagaagcatgggtctctgggttccttcttcacgcttatttacactccatagatgtccgtgtctctggcaggaaggaagtactccttgtctctgaagctgcaatacgctcttcccttttaccctagcagcaagccctctagaccagggtcaaagggtcattcagaggggctgagatctgaggcaagagagattgtctgggttgcctgggtcgtaggaggtttactctgtctcccttccactcctgttgtggttgaatccggtgctctgggttgccctccaaacagcacagcccataggttctgtgttggatataaacttcagaaacttgatccaagctgtggtttgcaaataactctcagctgcatcctgtctcgaccatgggaattggagaaaacagtgcatgagggaaacactaacagtttgtgagggagaaaacagaactagttttaatacctggcattcaggagctaaactcagcatcactgccctgagacaggctggactggccagcgttatcaggaggcatcgaacatgcagagaaccctgttccactctcaggaagatgagcctcccaggtaccttcctaaatttctaattctaaaccttgcatggggagtaagacacatatcatctgtgttgaaagcccaggtagtggggtttttgtatgggttttgttttgttttatttcttgaaattatacttctatatcaaaagcaacatgccacttctacacatggaagtttctcacagaaaccctaaaggcggcctagattcctcaggtgtgcagtgtgcatgctacatgaatgacacacagacagattctgtgaccgtgatgctcagtggtcccttgctggctgcgtgggcatcgggtggtccttggctctcaacagacctgtgatctctccaggcactgtgatcaaaacgggaaggtaactttgggagaagtttgagatcccagttaacccctctcagggtttcacatctccctttatattgccttggagtctgaagacacttctatggacccctagcagtcttaaagcagtgctcaataaacacacagaatagatgcttatgtctaagacggttacgctgtactgctgaggcctgctgcctgtagcctcccgggggcctgaggtggagatgctctgagttatacccatcacttcctcctgctctattgtggcagccttaggccctcctgtcacctgccccagtacagtcagctgtctgtgggcccaaacctcttgctctctgtaagtgcgggtctcaatacaaattagctgcagccgtatgggcaaaatgaatggccaaacctcttaccccgccagggctcccgcctcccctccctcttgttctccttaagccctcttcacaggcaccagctgcctcattaaagagcagcttttatgctgggcttcacctgggtaggcagtggtcaccaagcccatggctgggctggctcgctgaggcaaaggatagagacaaacctggcaggcaagtgtgcaagccagtgagacatggctttctcctttatcaccctgagctagactaggagggtgagctctgtaagggtaaaggataagggtatcaggtccttgtcctaaggaagtccctttgaagaccttgatggaaactgtttgggaccaagaaaggggcctcattccaaagaaggccaggagggacgctcaggcaggtaatcaaccaccaggggtcatacagctgaaggatagatggaggaggctaggacttctgtgggctagtgatgctacttactggtcagccaggcactgccagcgatggagcccagggggccccagctcctctgcacctgcttcttggccatgcctagggcacccttgttgccattcatccccaccaagcacgcttggttttatgtctcatcttttctttgttatcaatttttttttttttactccagggagtggaagcaacctttccacccatggccaccgtacacagctccaagtcagggagatccactagtttgggtgcttctgaggttctaatctctgcctggaaagaggccaattttaaatgcagaaattccaaggccagacacctatgaaaaagaacatttaaaaaacccttctctccagtatccgtaaatgggagactttgaagtaggcacctcctcttttgctaccattgatcctggctggctggctctgggcaccctgcatggaaagtgtgtgtgctgtccactctccccacccccaccagccaatgaaaattccagtatcttggtttcaggccaacttaattctccaagcttctctggtatttggatggtttctcatctgacaagaatctggggaagacaaccagtgtgtgtgtgtgagtgtgtgtgtgtgagagtgtgtgtgtgtgtgagtgtgtgtgtgagtgtgtgtgtgtgagtgtgtgggggttttacacacactagcatataggtgcacatctgtgctggagggtgtgtatttctctaactatatgtgtgtgatagcctatggatgtgtgcatgcatccctgcatacattatatgcatacattatatacatgtaagtggtagagtatatatgcatgtgtgttttatgggatgattgtatgtatgtacatattgtatgtagaactatgtgaatgtgtgtgtggaacatgtgaacatatttgtattgtgtgtgtagacctatgtatataagtgtgtgtgtgtgtgtgtgcgcatgtactgtgtgaagtagtgtgtgtgtgtgtttgtgtgtgcatgcacacatgtgcatatctgtgaatatgtcttttgatggccgagtacatacatatatgtgtacatgttatcactgtgtatatgatgcctgtggtaaagtgtgtagagcatagtgaattgtgtgtgtgtgtatgtgcatatgtactaaagttagaagctgaatgttttcattatgtatgtgtgctgtgtgtagtgaaatgtgtgcgtgtgaatgtgtatgcgtgcgcacacagtttcctgggggacagcagtatgctctggccagctcagcttagacacaggcaccagggtctgactggggctgcttcatctccagccaagtccttcaacagcagaagccaaagggctgagcgctggtgaaaagccccgatgtgctactgcctctcctccgactgccatggggacattaaaccttcaacaatctgggactctgacggctgggtcttggttctttgcctggaaaaacagtaggcaaatagtaaaaccttaaattctaacatgtgtaagttatacatcttattttcattttcagcccatgttctcctcggtaagacatcaggaaaaaattaccgtctgacttctaatatctcagtggagcatttatctcccagccatgataagtgatctgcaatatttttttcctttcagattaagaaacaaattcatttaattttctttattgaatgtgttcaggccctccctgctctgcctgactctcaggagccctgtactcttccccttcttcctgggctggtgactgtctccttgctgtgggatgggtgactccctagtaggcaaggcctgttccttaagggctctcaatctgtccctgcccactgcggaatgacggagagcagactgaccgagggcagcagccaggcggggcacgtagggagatgttagcgtgcagagctggcagactgtaatcaaaacctcgtctcatccccttggcctgaaggccggtttggcactctcaggagaactggccacttcccaggctgttaggatgatgcttgctgtctggcactaccatagtgcagtatccactgcacctttaggaggctgctgtggttctgcttcttggggtgactgagtgaaagctaggaagggtgggatggcaacttccccagcttgctgagagctctgtggtgctacactgaaggtcactgtggaatactctgtgtgtacttgctgcatcagtggaccactgggtggggatggggtcagcttagctttccagaccattgctcagtgccagatgctgtgaatatccactgctaactgtgcttagtcttagtccaggatgggtaatgtgccttcttcctcttgcacgtccatattgcttcctatgtgcacttccatatgtgcacttcctcttgcacttccatagtgcttcctatgtgtgtttactactcagagctgtaaaaatgctacaagagtcatacataacaggtcacaatgcattccaggggttactcttctttgcagcacccagctcctctgtatgtggcctttagttgagaagtttaacactgggaccttgggtcctgcatccatctttactagccatgtgaaaccagtaagcacacctttcctttggtaaccacaaaagggacgtagtaacctttgctccacacatctgaaagggttatcaggaaactcagataaagcaaacagcttatgaagatgtattaaaatggtacacatgcagtagaaatagctgggctagcaagtactgataccatctcaagaaacagaagagacagggtaataggctgcacagagcatctcatgctggactcactcagtcctgtaaccaaggtagacatcagcgtctataggtttgtggagaaggcctatctattacaaggactagtgaaggtgggtaagtgttgaccactggcaatcaggttgaaactggacacagcagacagtggaggagggctgcaggcccctgaaacaggaacacctaggacacacagggtatttatgacaggatcaggataggttccacgaggaaggtggcactaagagttcattgtcattgttgtcatcatcccagggatgtctaagtgactggccaattctgttgaggctggagtgacatgtccccataatgatggcttcttttgacctgtttcctctcactccagggagtctccggtggactgcagtgtcagcaaatgtaacaagctggtgggcggaggcgaagccaaccccatgaactataatagctacatggatgagaagaacggcccccctcctcccaacatgaccaccaacgaacggagagtcattgtgcctgcaggtaccttgggagtcagctgcctggccaacgcccacacttccattattcaggggctgtaatggaaggttggcccatctcttagaacatgaaaacccagcaccctagtctttagtggcagactcaaaccagggaaagttgcacatcatacgtagctaccctccaaggcaggatttcaaatgtcacccgagccctggcatgctgattccagaagccccactgtcaaacataacacaaggcagattttcagtgagcagcctggtacccccaggatgaatcttgggcagaggcaaggctgctcaccccgccattccttcttgtgagaagtgcagctcccgatgtccacccttccctcaggcatgtacttcctgccttctgctagattccaccttcccaaaattacagccaactctttcagttttaaaatagaaataactatatttaacaaacagaacgcctccacgtgtgtgccacaagttatgtcattatgtagaaatagccttttttcctaggtattggtgctgttggttacggagtggggggccggggggatctattgttaaatcctctagcctattggctggatgctgcctgggccaggcccagtatgctcagctgcctaggtatggagggaattcaaaaactgccactttagagtgggtgccaggtggaaggggcagaatgtcaggagtttgaataaagtgaattacagggcgggagctaaaactaaccttaaccaaaataacttcaccagagaggctggatccttccatttgtaaatgtgtaaatgcagttgtgtcttagaacgatagtttgtcttgttgatctgaaggatgatttttgtgatgagcaagtctgtcctgtccctagtgtttgtttccatgggaagttgtatctgctatcctagtgtgacagtcacatttctgagctctgggctaaattccacatgggaaagagtgcagaaggtatcagaaatgaaggcagaagaggaagggctcttgcagctcacaggactaaaatctgcctgggctcaatcttcttcaagcataaggggctgatcgcaaggaaggcgtcacctggtttatttgtttgtttgcttgtttgggctgtttgagaaggggcttcactgtgtagcacatgccgtcctagaattcactgtgtaagccaggcagcaccttgcggcaatcctcctgcttctgccccctgagtttgggaactaactataggtgtgcaccacccactcctggccagaaggtctttattcagccagatttcacaggagccaagtgctttctcttctgtcacatcatctaattggtttgtcaccaccctcaggagagcagctggtggtggttagctcaggtgcgtcttctctattttgaggccgtgattctttttaagcagacgtggtgagagactctctccaccccactaggccaggagaggcctttgctatccaaatcgcctgctctagcctaagaaggaactcttaggggatgaaccattagaggaatggagattacctcaggaccaggtgattgtcaccaccttgctttggtcgtcataaggcagactgttcggttgtctctctacccttcaggtagttaaaatgttcttacggggattggcaaaaggtggctcttccatgaaccgacttaatcatagcagtaaaaaacaaaactggcatgtttatatcatgctgtttcaaagcatttggcataaggaagtcatgagctttagatccgcttggttattctcctactggttagatctgtatgcattactcctagacgctctggcttcctccaggtcagcctcctggacgcacgggaaagtctcacttgggcaagtccacaaatcaaggcaataaaacattagtggaacaaccgattgaatttatgacgggattttaagacaagtataaatgagggttctagttaatcaccatttccacatcgagatgggaaggaacaagggctaaatcgtccaggaaatacatttggaagagtttagcatgatccagagtggaagatttataattccttttactggagagggagagaattaacattgtgacagagcccaaagcgaagagcggaaataataaaataaataaaatatagggcataaaattgaatgtacagtctaagactctagtaagttcctacaagtaaggaactaggggaagctatggatgaaatgatacaccacataatccaagcccctgtgggacatctccttttgaattctcagatttccattcatctataacccttgcttgatggtttctgaaaagtagagggttggaaacagaaccaggagtttatctgatagacacaaaccccaacatgagcaagagggctagctcggggagatcttccgggtcctggaacaaggccttgcagttccaaatgagttaaggcgggatcctgacaagacaaagctggggcgggggggtgttcaaggggcctgcttctccaactatgtgacatctttgaaggcttctgtaaaaaccctagcagtagtcacgaaggcagaacttccacggttccttagccatctacaaaatgggtataacaagacccatttcatagattctcatgagagaaaaaaatgggtcagatagagagctggcttgtggtaggatctcacagatggactattactcagtaggtacatcttggagtcttagtatgacatacagaagctgtgacatatgacagatttttttctgtgctccctctcaacctctcaagggtttcttttataacccctagagatcacagcacctcactccctccccaccaccattgctggccatttagaactgagttctcttagcctagatcttttgcagcctctagaatgagaggaatatgagttggtttaagaggagtacacgtttttcctgctaaataagcatgctaaatgaaacaatcaagcagaaaagcagaagcaggagcaaccagacaccctgtaatataaaataccatcccttctccaggaagccttccaggactctccaaattcaccctagacccttcaacccaaggttcattgaactaccagcacaacccattgcttaggtattgctctgatggctgcatatttatgcagatgggtgtgtgtgtgtgtgtgtgtgtgtgtgtgtgtgtgtgtgagggagagagagagagagagagagagagagagagagagagagagagagagagagagagagagtctcaaatactcaaccctcctgcctccgcttcccgagtcctgggattgcttgaatgtatcagcatgcctatggaagtctgtcatttatagcatctcccaccttagactgagcaggttgagaagatgcttcagggaatgatgaaacagagggggctgggagaaggcaggtttggagcagaggcctcagtcctgtcctgtttccgctcattcacagttaaagaggtttctgtctctagagccatttctcatctttaagtatttaaatatcctaaaaatgtttaggggtggtctggtagaaatcttaacacagctgtccccccccccaaaaggaggaaacccagattggatttatgtcaaacagtaacgccattgggttttccagctgccaggacagaatcacaggaaaagcaggcttgtgtatatttcccttccggagagtccggagggataagtgtgccctcctgaattcactgctagtcttaagatgcaaatgggtccccttcccagaaacgttagttactggggattattttcattttgatgtcaccatttcttgggccaagctatcacttgacctccagaaactttaaacaccatcctgtcagggtatgtgttgaggcagctaagaacctttctcagccctaagtggttcaggcagtgtcagaagccatggaaccagacggagagttctgaggggacgatctggaagggaagagagaggaggtagaaagaaaagagaagagggaagagaggggcataggaaggaaagatgggtgggggtgggggggttaaagataccatgaatcaggagtgagagaaaaagaagaggaaaaaggagaagacggaagaaagaggagagagcaaaaaaagaggagaagaaaagagggggctgtggggaaagaggacagaggtggaagaagcaaagaggagaagatagagaagagagggtggaggggagcctaggctgctgggcaggcatgcatgctgaccgttgttatctctccactgcagaccccacactgtggacacaggagcacgttcgacagtggctggagtgggctataaaggaatacggattgatggagattgacacttccttcttccagaacatggatggcaaggaattgtgtaaaatgaacaaggaggacttcctccgagccacctccgcctacaacacagaagtgctgttgtcgcacctcagttacctcagggaaagtaagtaccatgtacaccccagggcttgggagcaggtcctgccaggtccccaagagccagcccaagggaaggataccctaataccagtcatggaagacctatgccaaggaacagtttccttaggacaggaaccccatcaaggtcacatgtgttcctacaaagcctgcaagggaaagatttcatccaggagtggagtgtccaaaggaaacagataaaaaatggaaaactcacagagacctgggacatagggaggatgacaccagctactaggtaggctctgggaagatctctctttcagaagcttctgctaaccaaaattgtacagagatagaatctctggttggaggctttctaaggaaatgttaagagttcttaccggaagttctgaacatagatatgagatctaagattgtgggagctgacagactactcctcctattctggattcacattgatgcccaaccctaacctatggggctgcttctgcccactgccacgaaacaacaagagcatctagtggcccaggtttgttaggaggcactgaaaactttcccagacagaaacccagggaaagcttagtaaagaaagatctacccaataggaggctccctagtaccacgccccgcccaccagttccatgtgaattttgatagatatgaaagggaatacctatggacctgctagtgactcagccttaactctccatcagaaatccagactatccccaagcctggaagtgagctcagtggtctgcaaagatgaactgaagccacaggaaggcaggcatgggctcattctgcatgagagcatccctacagccagccacgtcaatgattagcggggcagaacaagatgcactgtcctctatgagcggcctagtttgccagaggtatcgtaagagtttgagaagatttgattgttttaaggcacctttgaattctcagacctcggccaacactgtggggctgccttttgtgggttcacgggctctggaatggttcactttgtataggatctccattgtgctttcagttgttatcagtaaaatacatcgtctcagtgcaagggagttctgtagagagcagggcaacactctactcacatgggctagaaaatgaaaagttaaaatattaaaaaatgcatttggaagtttccatgggtgcctctgggctggctatcttgccacctctctaaggcatctggtcgtgctgggagaggacacattagctccactgcaatgacctcatgtctgagttgctgcaccatgaggtcagtccaagaaataacactctaagaaggggccattttctacttagtctctcctgactttcagatgcttagcatttaataatgatttgtatttctcagcctttaattgcttggtggaaggaaagaacaaaaggatcttttaacggagttctgccatgatctgcacaagcaggagaggcagtaggcacagagcatgagtgtagaaagcagaggccaggagcatagcgccatcaagcctgacttctaggctcctcccgcatcatctatgcaagaggttgagtgatccctaaggaaggagaaatgtcagaagctccagtgagctctacacaaagggtccaataatcttggctttcacagtaaatgctttgtgaggaccatgtccaagaacgtttggacttcataaaagagaagcccattaagaccatgtgactttcaggcctggatttctgaccaacccgtaaacagcgcaagtttctatttcttccttctgtcaccaaagaatctgagccacagatactgacatgaggcatatatctgctgctcagaaggtctaggaatactgttaatcagtcactgcttcctatcaagccttggcaagcctgctagtagacaagggcagataacaaggcatgatgaaggtatgagcagctatagagggagcagggaatagagtttggtgtttggaggctagtgagaaaaaccatgtagtctctccttttaagaacacatgtaatcactatgaaaaatgtcatacaacacacgaagtttccagaagggggatttgctatgaaggaatttccagagttgagaagaggtagtacatgtgtatgtttggaaagcctttgaaagggcagtaagcatgtggtgataacagttgggagttctacacagggagagttttcctgccaccaaaatggaggtaaaacataagtgttgcatgtacttttatgctctaccagcctttgctccaggaagtgaccatgctaccagccccctcccagcttcccatgaatctgcagataagagacacagacactgggctggagagatggctcaatgattaagagcaactactgctcttccagaggtcctgagttcaattcccaggaaccacatggtggctcacaaccatctgtaatgggatctgagtccctcttctgatgtgtctgaagacagcaacagtgtactcatatgcatggaaggaaggaaggaaggaaggaaggaaggaaggaaggaaggaaaggaaaggaaaggaaaggaaaggaaaggaaaggaaaggaaaggaaaggaaaggaaaggaaaggaaaggaaaggaaaggaaaggaaaggaaaggaaaggaagaaagaaagaaagaaagaaagaaagaaagaaagaaagaaagaaagaaagaagtaagtcttaaaaaacaaaagacacagacacacagttgttcaatttcaacttgccttcttgacataattgctggggattactatctcctgcctggaaaatgcacacttctctatactcttagctctgtacctcccacctgccctgaacttcagtggctagttccatctagcccctgccaaacatccctgaccaaccacctgtagttgtggccacaggccccagcttctcccaagacctcatatggctgctccattcttctccctccaaggcttggcaaaaactccccctctccttcctttcctctcccttttaatccagcgacccggaagtcctacctgtaccttctgtctagcgattggcccatggctttctttactgacagatcaagaaccaattggggaataggacctcagtatcagacctacccttacacataagatgtgcttatgacacaaagttgagtctgtgggccaaaacaaatatgataatggttgcattaaatttaaattttcttgaaatgtaatacagattgtaataaccttctgaggcacctggatttaaaatgatcttcatgaaattttttctgactttttttttcaaattatggtttcttttttaggattctaacctctaagaccctggttattgggtactacttggctgtatcaaccctagaggaggccatttgtcagacattgtctgctctgtgatggctgaaaacttttgcctgctaacagacatgccttcaagccttctctgtttttgtttttccagactgaattacatgagctatttcatgataaagagagagaccagggtttggctgcaaggttggggccagaggaacaagtgtagattcttagcatcattgtgttgggcttttgttggggagcagctggggctaaatgattccccttttggcaagacatagagggaaaagagctgagactcacaacatagatgtagggcacagcgtagagtaaagggagatcaatacagaaaaactggggactagccaaagcatggattgatggaagtcaaaattggctcagcaagatgggtcagtgggagaagatacttcctgctaagactggcaatcatagttcaatccttgggacccatatgatggaaagacagaaccaactcccattagatggcctctgacatccacatatacactaaagcatacaagtacacacacacacacacacacacacaatgtaaaatttgattgcacttttctaatctcttatttctgagttttgttttttgttttgttttgttttgtttttgttttttgttttttgtttttttgttttagattccttgtagggcgctgcattcttgcatcaaatttactttcacaagagacagttggctattcttgttgtctgggaagaaaggtctactttaagttctcaaagattaatcataagttaaagaggaatggccaatgataaggaagaaataacaatgtcctcatggatgagccctgcctagagggtctggctcttcacatctgggcctttcttttggctgttccagatggggtacctgtgtagcattaggaaagagatgaagggactagaactgactagggtacctgcagttattggagttcagctgaaatatctgagacacaagcagacaccagcccaggtgtcattcacttcctgtggacagaacacccccttgtggacaccatgaacaaaactttgattcccatttcttgaccgaagcaactgaggctggctagtttcaggagcccatccaacggtatctggcatgtacaaagcacctgtccttacctttagtcctcggaccactgaagctttcagtctgagctaaggtcactgctgcagaggacttgatgactctcatgcaggatgcttgaatatgcctgaattaagatgctgacacaggcagaccacacctcatttgtctcccttctcatctccagggccaatctcttctccagcctccaacttgagggcaaaaccaatgtccccatatggctttccatttgtgttgcaccaatagatgcaggctttgcaaaactcctctgcagcctccaggagtgaagccaatcaaaccaaatccctcctctcacgcaccctgacctcctcgattcccccagactctgggtgtgattggcagctctgccaggatctcccagatatgcccactggacagagacactgttggcagctgagaatgggcaagtgagatcagtcccttctcaggccaaggccaatgaggcaacgctatctgtctccaactaacagttcagtcacagagccactggggggagtttggggatgtctgggagcccaaaagctcctgggatgagtggcccaaagcagaagaaaaggggttttgttgttgctcctgttcgttttcaaaggaagtgagtggaatgtccatctgggcctgagctgggaaaccttctaagaaggcacactttcagacagtggcaaccccagaggatgaaatacatcaagtatcagggacaccacagaaaaggactccagcttgattcccatttttaatttaaacgtaatggaaaacacattttacactctgtgctatccccatctgcaacctcagatggccatgcaaaggtgatggcccagtcattaagccaaggaagtgttaaactttccatctggatcaggccaagaaaagaaggcaggcttccaataagataaagtgcccagttgcctgaaactcagtagtcagctggcctgttgtttagcgtgtagagccttaattccctccccagtgtgcatttagggctggggctggctgtagcacaaagaaagtgagctaggaattgactggctggctggggttgggttggggtagatgctgctgggttctatggtaacatgaatggagccagagacaaaggctctggcaccaggtcccctgtccacactgctccaggtgtccagtttgaaaagcaagttagagagtccgcagagctaaaggaagctaaggacttcccatctgcaagtcccatcctatgttcactttactaactcctttcagatcccaaaacggaaaacgaccttgctgggctagggatgtcactcagttggtagagcacttggctagcatgcaggacactctggttttgatcgtgtgcaccctagaaactggtgtggtggtgcctgcctgtcatctgcagcacttgggtggtgggaacaggagtatcagacatttacgatggtcctggggctgtgtaatggctgctaagccaacctggtatacatgagaatctgacttaacaaagaaaaaagaagaggagaggggggaaaggaagagggggaggaaagaagaagaagaaaaaagagagcagaggaaagaaaaagagaaaacaaagtaatcttgtcctcgagctcttaatcttgaaggaccgggtcactaccaacattttagagcaaaatgtgtctcaaatcaacagacacatatatgtgcacatgaatgtatcctgtctcacacacacacacacacacacacataacagagtgaacaacactttaaattaggtataacatgcagggagttatgaaaatcacaaggtacaactagcccccaagacacctgccctcaccttccagcaccttttctttcccttcttccttccctccccctccctcctttcccccctccccctccctcccttcatcccttctgcctttactaccccccttactatttgtttgtttgtttataatttctgggacagcctcactgtgaacctcagcctattggaactttcggtggtgctcttgccttagtctctggagtgctggaataaacgtgcatccgttcttgcccatcttgcctgtattgatttaacctaaaggatgctcctgcttctgaactgaggacaggtcttatagagcagcctgtcagttgatcttgtctcttggctctggttcctctggctgtgtgatcgtaagccttgacttccctaaaggttgatctcagctgtgggaggaggctagcatacgcatgctttgggtggccccttcaaggactaagtaagagagatagtgtctgggaagaaggggggatggtttagtcaagaaagagccaggcatgctagtgtgaagacttgactttgatccccagaacccacgtggaaaaagccagttgtgacagcatacacttgtctcagttgtccctgcactgcggaagtgaagacaggtggattcctgaagcttactggacagccagccttacctatcagctggctcaggtcatagcaatagactctgtaccccaaaaaaccaaggtggatagatagatcttgaacaagggcacatactccttcgtgtataggagtatacacaggtgtgtgtgtgtgtgtgtgtgtgtgtgtgtgtgtgtgtgtgtgtgtgtgtcctatatagccattgattgtggcccttgctttcaggaaattcctcaggactcagcagcaatagaactgcttaggtcagatcctcagagcaggaggaagaaactcaaaacctccaatgggagaccagactccaggaaggacttccctgtaacagggcaagttaacgtaatttaaaaaaaaaaaaaaagacacaaggggcacccttggcatcctgagaacctggtgaaagaaaacccagtgaaaagaaaatgtgtctccctggggagaaaccagccccacccccatgtaggttgcccctcccctgtgaaacttgaactaagacagtcttggggcaaaatctctcccctaggttaccatgaaatatgtatttcatgcaggctttcaggaggtcaagcgaccctttctcttggcattctgggagtttcctgtggcttcacgtgtgcccagagaggaactctgaccatggggggaaatttaataaatgtggtttatctgagctccgtctctgtctaactttgtactaatgactggagtggtttgctgcttggagaccattatttttctttatttgctctagcagcaaggttctgcctgagggagaaaatgcctgggactgaggcacagacattcttgctcttacccctgagaggtttggggtattctcttggaacgtttgattccatttctgaagctctgtccagtcacggagaattatccctcactgcggcagaatccatccctagctggaattccagccggccagcaaggccagtgcccgcaagctctgtgtaaagggtttccattctgtgtaactgaaagcagtcatgataagtgctagcctctgctgaatgtttaaaacaagctaggatctctgcagcacaccttctgagcttagttttattgaagccacattctgtagatgtcatttttcgcccagtatagacgagggacatgtgaccaggggagctatacccaaataaacttgttactttgaagtaggagagcttagactaagatgaatttgtcactaatattcttggaagatggaatgttgccttcgggtggctgtgtcccttatgtaatctacatatctgcactttggcatatagcagtccctaaatggtacccaccacctcctggttttcacctaggaactgctgagacctagaagtgataggtacctaagccaaaggtcttatgtcccataagaggtgactttggctgccctgcttagacccatattttctgagtattcaaccagagcatccgtagctaaaggggacacccctctacttcccagcccctccttgactggaggctaagcagagacatggctgacaagccattcccagcctgaccgtcagtcagttcccttggccacatgtcgcagggagaagagttgtgcttagaaaggctttggtagcctcaaacacatgtgttgagctcatggcgtcctttgtaaaagcagatcccagcccttattttgaaggcttaaaaaaaaaatccccaggagaatcatgagaggaatcctaaaaatgcctccaatttataaaataaactcttgggatcactttaaacaaaaggacagatctagtctgaggaaagagaggaacatatgttttacatgcaatcacaacagaaaaacaatcgtctatcccaagtagctccactggacctggtgcagagacgtttccatcaaagcttccgtttagaagaccacacaccagcgggttgagatctgctgttctagacactgagaaaattgtctgttatagtatcgacatcccagaggtggggtcccacaatccacggcccacgcaagggtcagcagcctcctactctggccccatttctaaagtttcctctacatcttaattctaacatgctgggaaccttggctttaacacacaggccttttggagaacgttctagattcagaccgaggaagcttgatgtttctgtttttactttcatttcaggttcactgctggcctataacacaacctcccatacagaccagtcctcacgactgaatgtcaaggaaggtgagtctgtcctctcatgcgcccaggttccctccactctcaccaccgcacaggtccatacttctcagacaggtgggggatgctatgtctggacaccaattccttcctcgggaaactatttttctaggacacaagataaaacaaaaaacaaaacaaaacaaaacaacaacaacaaaacaataacaaaaaaagcaaactttttttttctttctaaagaccatgtttttcttcctctgccaccatttcagaactacaagggaggctttgaaagatctcataaaaacatcacaagaatataaattaaagtcacccccacccaaagaaaggggactgtccttagagaacaatgaatcggctgactttccaagctgacacttgggggctctcctggtgaagataatggaatgtatgtctaccttataaagttttgtttgtttgtttgtttgtttctttgtttcctaaaagaaaaattagcatttcagttcatgtttaaagtggtgatctgaagatttggtctaggataagttggcctgttctggttggggttggtttagtcaaacagttcatttgatataatttggttttgatcagcgagaaagaaaactttcttgaaaaaatggttttagtgagcaccacaaggatgcttctcagagtcttcattggcagggactgacgctccggctcgctggtggagtgcatgcacagcatgtgtgaggcccggggtttgatccagcaacacacacatacacacataaaaatacacatacgtacaaatacacacacatacacacatatactcacaaacacgcatatacacatacaaacactcgcatatatacacatacactcacatatacacacatacactcacatatacacacatatgatcacacacacatacacacacatatattacacccaaacacacaaataaacacacatacacacacaaattcacatacacacacatgcatactcacatatacacatacacttacacactcacacacacacacaaactatcacccaacctagtcttgttttggccaccgagtccccaaatcagatgaatgatatttttgtgtgtgagaattgaagctctgcccactcattctacagtctgatgatctcctgccccatcatgttacacatgcctatagcagagaatacctatttgcatgatgaatacactgaggtctggttccctggttttgtcacatctctgtcctcagactcacgtcaggttcagggttcttccagggagggtcaagtcttgactgtaaagcaatcagcttctgaggatggctgacaatggggccatggcttgcaggtttagaaagaaacaaataagccactaaacagagggagaaaggagaggaaggatgggaaggaaaagaaagaagaaagatggacgtgaagggaagagcaggaagggaaggcgagttttgaactattgaattaggatttactgtacagcgtgctggtaccatcagaattaaccaatgagacttttgggtagacagaactaatggtctatctgctctgttcgtactggtttaaatactgatttaggttgagaaactggtctgcagacaatgcagtcactaaccaagtcctccttcctgctgaggagttcagtgcagccctggccctgggctctacctgccaggctgagcccctcctctgctggcccttttgtgttgagagtgcatttgtctccctgccgcctcattcaggctgctcagagccgccagctcctactgggtagcaaccctcttctgaaatgaattgactgtagcatccaggcaaacgcagcaccggctgcccccattcaggtggtgatgggcatttatctcccagcctcggccctggcctctagagacgattaagccagtgctttgcaggtgcatcttttgttcccagtaaagctctccacttaggcgactgccttcccccttttgaggtagtctggctgaaggagccagcctgccacaaaataaagtacattagcaatacaaagctaacaaactcctcccccctttcaccctcttcccacctctctgcctctcttcttccctaatagctatctttatttttttaatattaaatggaaaaagaaatagaagacatcaatgccaccttgactatgtctctctttgaataagaggcacacacggcactcaatcagagctgggtgtgtgcccacgggtgcctttgctccctgctttgcaaagggcaggtgctagctggcatcaggcgcaaatgggagaagctgaggagatgaagtctattaatgtatcttcatggtacttatcaactagagtgctgctttagttcagaatggcatgatcgtcctttctagcctgcctacctcctaaaacactgactgaagctatctcagggttatttgtatgtagaacgtaagacaacatttcaaaactcaatttccacagacctgtaaatgtgttgtgagtctcagttatacccaattggaaccattgaacattttctaccttatttgtcaagtttaatgtacttaaagcaggaagacagcggttattgtcaaccatttccatagcagcctcggctgtcacttaaacaggattttggagtgtgcctggtgcgggtacatactttgttttggagctttgcaccattctgtgagtcagtccgctgtttttgtttcctttctgtgcagagaggtgggacaacatgaaagtgacccctgaatggtttgtagcccctcagagtatggtaaggaaagttcccctttcacttaagccactgtcataagagagaaatggttgttaccagagtctgggaaggccatgaatggaaaggttatagagggtgaggggccagtggggacctcatgcagctgaaggaacagcttctaaggcagagtaggaaaagaatgattgacagcagtcaattcaatattttcaaaacagctaataggattgtgtgtgtgtgtgtgtgtgtgtgtatacatgtttgagggcgtgtgcatgtttgcatgcgcacacatatctgtgtacatgcatgtggagactataagctggcgtcaggtgtttccctgggttgctctccactgaacctggaagccatccattcagctatgctggctgtccagtgagctccagaatccttcctacctctccctccttagctttgggatttgagagccacactgtggcaggcatatggcttctagaggctgccagggatcccagtctggactctcatgcctggtccacaggcacttcaccagctgagctgtctccccggccccagtgattacttttgtgacgtgatggatgtgtctgtgtctttcacctgattgttacacattgcagataagcttagtaacatcactctgagttctcaaagtacttacagtcactatatatttgaaatattttaaaatatgtatgatttaatggcccttattgccaaggttcctcctcaaaaacacagtcttttccctctagctatcttttcctaagtgtaatttggtgcagaaatttgaatttctgcaacatttttctctgcctctgtagtttttcactgctgcctccagctacatctctgttcccttttcagaaacaaatgtatacccagcctctactagaccttagccttccgtcttaagggcacagagagccccttgtagactttgtaaaacaatgacatccaaggacaagtcctctgtaacttccttctctggagcaacctggagccctggagctcactggatggaaatgggggctggctgccagaggctgcaggtagagagaagtgctttgcgttgactgctgacagagagagagtactgaagctggaagctggtgacgatttcactgtctttgaatgtgcagagtgtggctaagttatacacttgaaagtggttaaaacggtaaattttatttttaaaaaattaaatgcataaataacaacaaatactgaggctaaggcccagacataatgtgttaattctaaatctctactgggtacctacgggggccttggggatttttttcttaagttctagctggacaagccctgcttcgttgtactgaaggaacgtaaccggcacatccagggccactccaggtctttctggatccttctgaccttctctgtccccaggtcatcctagacaaagacctgtggatatactgattgtaagcacgggtgggtgaaacatctcacagttgatgatgtcattattactgttattgacaactaggtatgagtttagcatcttacatcttagaaactccctgctcccatgccttcatttggctctctaaaaacagatcatgtgttgctaacttgggtatatgggggagcactgaggctcaagagactaagtggcctttccacataagccttctagagccaagcttgaccctactcccttcttccctgtcctgcacactgaaatccagtgtgactgctgatcctgggtggtagatccaaggtcccagctttctctttggttttctgggcagctcctgccccagggccctctgcaagtgctccttgcccccacaataggcaagagtaggcacctaacttcagagctcccctacatgcctaaggccctcatttccttagccctcatcctgcatctatctcaatacctccagctctccaacaggcagcggatatagagctccttgttcactaacttctggacctcatagctgacaaggcctggcggagctctgagcttctaggcccccacctagagcctttgagacttgatgccgaaggtgaaaaactgaaaaccactgccctagctgccaagggtagatggcctgcagaagctccattactggcacttaccttgactgatggataaaaagtctgtcttcatacttgccaaggattgaaaagagaggggctaaatcgccccatgacacatatgctggatgcccagctgcccatttatggatcatgcttaagagagcctctcctctcaagaattccaaggacaagggccaagcatggaatagcaacccttctgtagtatctacttaccaaatattttcacatccattatccattatccacacaccatcaccatgagatcgcagctgctaccttcttgtccccgtcctgcagttaaggataatagggccaagagctcccaatgttccttagatgtcacccatatttggggcaaagcaagactacccgtgctcgcttcggcagcacatatactaaaattggaatgatacagagaagattagcatggcccctgtgcaaggatgacacgcaaatttgtgaagcgttccatattaaaaaaaaaaaaaagactctacccaacataggtttgatttgctccccataaaatgtgggaggggtgcttcccacattttaatctcaacatcttaagtatttgttaatgaatgttttccactcacctaaggtaagcacccagctcctctttcaatgttatactaatgaagttgcagtgtgattttgggcaagggtttgccttttctgtctcagtatattatttgtatggctgtcacaatacctgacagaaacaacttgacaggggagatagaaactttgcggttttggagagacttcagtccattgtggtggagaaagcatgatagagggagtgtttcgcagagatgagaagaatagaacatttggtagtgggcgatcccatggtggtggaccaagattcaatggttaagctatagcctttatcattagcctacccctagtgatccacttcctccaaacagtctctatctcctaaaggttcaatgaaattgtaccatccagtgggcagcgagcatccaaaagctcggagcctgtgggagatgtttccgattaagtcagaacactccatttcatcatgtataaagtgaggctaatttccatgcccttgtaaatcagcatgatgtctgacatgccaaaaatgcttgataaattatattcataacagttcattattatgatttatgacccgaatttaatagtaattaacattattgttggggaaatatatttgagggttaccagaggctaacaatgtgaagatattgtactctaatggatggtatagcgctgtgcaggatgctccaccatagctgagaagccaagctgctcaaaaccttcctagggagagacccctataggcgatgtcaggaagtgctgtcaaatcacattcataaatgcaaagtcacttgtcacattcaagatctccaaggggaaggaaggaagagccacagttgaaaatacctactgaatatcttttatacaaaacaaaaaaacaaaacaacaaaaacaaaacaacaccccccaaaagaatcaaaggccataaaatggttgagaccagccaaagccaccctaacctgaaagatactacagaagactgaaaatacgtcagaccacaagcatttagtatatgagagatccaagctgtataggactttttagtattatattagtttaccttttgtgtggtatgggtggtatgccatagctcaagggcagaggtcagagacaacacatgcagagttggtttcttctaccatgtaggttctgtgatttgaactcagatcttcaaggtttagtaacaagtgacttttctcactgagccatctccctggcccagtgtgttcatgcaaaggatgtaggtggtcagtgccttagtaaagaatggacctgaattctgtgagtcgttctgccttctcccagttgctcattgattctctgacttatggaggatttgctccatacaataaaccttccagaatcttggaaatatgatagccaaggggcgccaatcacacctgcagatgagcagtagagtctcagaaagtcgccctgctgcctcctgcacacaccctctccatcggagttcagaatgacatcatccgagaggttatggtgtaatgtgtgtgggggtgggggagggaggggtgtctctggaaaagctggatgtggatatagaaatgtaggaggggcaactctgattctggggtgtgtgtaggcactgccatatgcctccacgtgtgttctgggtggtattttgaaaaaggtgagtccctatacacgtgaacaaagtgtcagcgggtggcatgtgtgacccttgggtaggtctccagcactggagacaatgtgcttaggcacttcatggtgagactggaatctcaggtatggagcccaaagcaggagccaggaatttgcctcaaaatactaaggcccagtggtagtggggtggagctaaagtgagattggccatggcttttaattgttcagcagagcaatgggccccagtaaggcttcactggactttttcccttttatgtatcttggaatttttctgtgactgtaaagacaatgataagttttatctgagtgggaggacagttaaacgagcagaatgtctgcattccacacctgtgtacagtgaacgagggtggcgtgctcttgggaggcccacattcagactgtgagtctatggggaggggagagtaggtgaacatagaaacaagaatagaaatgatgtggtgtgtgtgtgtgtgtgtgtgtgtgtgtgtgtgtgtgtgtgtgtgcctgtctgtctgtatgtgtgtatgtctgtgtctgtatctgtgtgtgtgtctgcctgtctgtgtctgtgtatgtctgtgtctgtatctatgtgtgtgtgcttgtgtgtgggtgagggtgtgtaattgtgtgtttctcagctatttctgtggtccagaggcaagatttgtgattatagataaacagtagctttctctctctggtttgtatttggttttgtttttaacttaaaaaaaaaatccagagttaatgtcttgtctgtttcctatctgaccctctttaagagatgtgtttgatttttaaaaatttttatttttacttacttattttcgagaaaaagtggcagagaaagagagacagagaggcagagaggcagagagagacacacacagagagagagagagattgagaaactggaaacaaagaatcgttgtctctgagccctggcaggcaggaaaccccaatctcaggggagtccagccagccagcccggccctggagtcagactccaagtttctgaattcaatttgacagcttgtctgggacactttctaagtaaccattatccttcctttctctaagtaaaagaactgttattcctgtcccagggtgtgctgtgtgctctgttattgcacacgtgtggccatacgatgacgagcacacggtctctaaaattactggaaacagttttcatgttccctaagacaagtgtaaatttgttccaggctaatgagcaaaagatttgaagtctcattccccaacctggtgagaagtaggtagatgggcgaggggggatgaggggaggggagcatttgccctggtgttgtgcatgtacacactattcttactaggatttctttgaagtacacacacacacacacacacacacacacacatccttcactgaccactatcctcagcgtaagcataagttctctccctctctcgtccacactcacatcagcctagagctgcaggttgcaaggagatgactcctctgtgttcaatctgcaggccctggaagcaggaccacactgggttctttggatctttgacatggtgttgtgagggattaggcagcagccaccccctctgttcatacttgaaatccaggggcaacgtgtaagtttatgtcacagcaccttctggacaactgtggatgcttgctctcttgggtctgccctcgagtctgaatggaactgtacctactatgccttcagtcaagcttgggactgtctctccacttaccccacccctacccagggacctgccgccccttcagaggccttggccctatagctttgcctggttctagtctcctctgccccttttatgaggtgttttgtttgtacccactctttctccaatttagtagtgtttagtattggacagattccagaggacagttttttcctctcaaatgactaaagcaccctggagctagaaaccattggatgggcagatgaaagtcacccttaacccactccctaaaaggtcactgtaagccagccctccaagatgcttctatggggagactggctttttctcctgtgggggttgcagggggtaccctctcccctcccctcccctcctctcccctcccctcccctcccctcccctcccctcccctcctctctgctaaccctcacttcccacttgatatgatcaaccctgaagctgtaaagggtcccatcccaaaataacaagggaaaatgtctcatcgtgtagctgtccatgcttaggagctcgtggtccctttgacccaaatgctacttgctattttatcagctaaactctctttcaagtgtggcctctcagtctgtggctgtgcaaaggggaaccacaggaaaaagtgatcctccagaatactactaccactccttccccttccccttccccttctcctcctccttctctttctttctttctttctttctttctttctttctttctttctttctttctttctttctttctttctttccttccttccttccttccttccttccttccttccttctttcctgtttctatcttttttcctttataacatatttattaaatacttagtcatggaagatttttctatgccataaaaccttattagtttaatgctatcattattcccattttatagatgagaagcccaaatcaccatgttggtttgaagcagggcagaatctgttctcacagtctcctccccagccgaggtagaagacaggctctgaaatttcctcttgtatttcgacccaactatgtcttaattactactgatgctgagggggaaaatgccttgacaaaagcaacttggggaagtaaaggtttctttaagctcacagtttaagattcatcatggtgagaagtcctggaggtaggagtttgaggcaattgttcacattgcatctccagttaggagttagcagagaagagcgactgctctgctccactgcctttctccttttaatccagtccaggatccaagcctagggaatggtgctgcccacttctacctcaagtaacctaatcaattgttcctcacaggcatggccagaagtttgtctccttcatcttgccaagttgacattaataacatcacagcatgccaaaagacccatttctttcaggaagctgggtttgtctaattgttaaaaccatgggactgcatcgattcctgcaatggttcaaaatttctcaatgttaccggcatttctggaggcatattagtttgtttcacaaatttttctgtagatatatttttataatttgcatgatgatacatgattaagcttttgagcttaattgaacacttaagagaaatgaaaaaaatgagcttcagtaaaaggcatattacactgagtaaaaccatttccatgtgttgcaatgaacttaatctgaaaaaacgagagtgagacacagacatgtcattagaaatcaggttgtcatgttccccttggttgatatgagcatcaatcatgaagaccttccaggatcctacctcacctaagctccctccatgaagttaacttttcctgcactggggcactgaggaaggaagctgtagctgactgttgggtccttagaatcgacagcttccattgcttctgcagtgttttcccacctcaacctttacagcccacactttgttctcacacttaatgacaactttagcttcttggtttacatcagcatcctttctgtcaccataggctggcctctcatgtccctgggccagaagacagcactcccctcagatagtcagaagttctcatttagatcaacatgactttcttgtgcctgtctttgcttttatgcatttcagagctgttcttagaggcttccagaagaaataaatgaggctgtaggtacccatgtatgtgttctgcgctgctaatgacggtaacggggaatgcacgtgccctggtgcatctctataaaggaatgtgattcctgtaaacacttgaaggtagagggccaaatgtacaaggctgtgggaagatatttgtgggtaatgacatcctggggaactttccaacctgactccattcctcctccttccataccagcagagagaggccttgactgtagtgctctgtggctgaagctctgaccatatcacacatttcttggtagcaattcacacttgctaagtaagcttggccttccttattcctctccagtcttgctgttactatatcagtcctgccgcctctaccaagctgcttcttgcgttaaagatctgtctcactccacagagtgaagctaaaactcagaatgaaattcattttagttcttaaacatcttcaccatgtgctctgatttgtgatggaaactaaaagtggtcctgttagctgatgttgagaagggtttcaagttaactggcaagaaaaggggattgtctacaagtgctgttgatgctcactggtggctacctcagcacagggtcgtccagatacgtgggctttgcccaatgtactgatttagctattccaggaggtttgtttagctatactggaaagtatagctggcctctcccatccagggcttccacatcggcagttttgaccaaccattgctagagaaaagagcatcctcttggacaagcaagctccctgtcatttcctaaatgacacagtatagcaacgaattacattgtgttaggtattttaagtgatcttagatgttcctccagcagtgcagtgagttagtgtgccttacttacacagcagtgtgtatgcatggaagtgataccccagtcgtgagatagcgtaagtggtccatcaatgactggaagtctttgggaggatgatcatgcgttctatttagcactgtaccatgagaatttgagcattatgggtcatggtgcatgatagagactctgaaaccatttaccctcacatgcaaaggaaagactatgcttacaaaaaaagcttattttcccaagcctttatctatcttatgtctgtctgtctgtctgtctgtctgtctgtctctatctacctacctacctacctacctacctaccatccccgtaaagaaaggtatagatctgtcttttttttcctctctatttgaagaaggaagaagagagagaagcacagacatggaagcccctcttgacgcacagggaagaagtgtatcttctagttaaaaggatgggctgtaagcagcaccatttattattttaatatgaaaatcttttatagatgtaacaaattcctctctttggagaagcctcaacttaatatcacaaagaaatcatttctcctgtagaatccccacggaagagaaggtaaagtctttcaggaagaaagtctgaggctggcatgggggtgtgagggctttcccctcttttgggaatccgcaggtctcacaagtaaattctgagacgcttcttccgcctctttggtacagcttgaattcatgtcaggcagaagccacagagagaataataacattatgtaagataattacttatatgtcaaatcccaaatcaatcctacctgctcagtgtgtttaccttactccgacgaactgtgtctcttccctaagccctgaacccaggagctatttctgaacctaattgcagattatcttgtcatctttaattgtgacttttgtccattattcttttctcccaccccaaagattttcagtaaataaccttgacagttgatggatttgctgggaaagaaaatctaatatttttcaattgagttaaatatttactcagtcttgctctactaaaggaagaatcagaagaaattatcttagcacaagaaaaaatttatttctagccaggcagtggtggcgcacacttttaatcccagcatttgggaggcagaggcaggtggatttctgagttcgaggccagcctggtctacagagtgagtgctaggacagccagggctacacagaggaaacctgtctcaaaacaaaaaacaaaaaaacaacaaaaaaaattaagttcttatctcctatgaataaaaaaacctggaaaagaatagtttggggaaatgtctaatgggtaaaatactgcacaaaggtgaggttaaattcaggtctgcgttacccacataattaaaaaaaaaaactgggcaaggtggcatgcatctgtaattccaccctgagaatagagacaacttgaacctaggggctcactggtcagccaatcactggccaaaacagtaagcttcaggtccagtgaatgaccttgtctcaaaataacaacactaatcctactaaataccaataatgatatagaatgcagtaaataggaggaagatactcaaataccacctctggcatccacatgtgcataccaagatgagtgtacaagcacacacacacacacacacacatacacacacacacacacacacacacgcacacacgcatgcacgcacatgcatacacacacacacgcacatgcacacatacaccaaaatgctgactggaaaagattaactacaattccataggagactttggcgtgtgtgaagggtttgtgtatacatgatcttatctattctccaaagacccttgtgaggattaaatatactgtttgctcttgcatggtctgaaatttacaaaatagtcaattgtttctcacaagagtatacttttcagagaggggaagtcactcaccaaggtgcacacagcacataactgatgatctgggaagcagggtgcagagttggagtgacggagatcccgaattctttcctttgcagtgaatggctttactgtttggaaaccatgagattgcttcccccaaatagctttaaagctttaaatgacaccccaaaacagtccagttcttgataagattcagttattccaaagaaacacaagcttctcgggatataattttgaaaactctttgagcctgaaagcgttggctggcccagttactcaccagtcctgcccaatagcctaagatcagtttaaagaaagtcagttttgatagtctgagtcatattttcaatttctaataaaattcttacatggccacatacgctgtctcccaactttgaacctagggtctcatgctcatttgcatgtctggtttagatcatgtctgggatcccttgaagtctgaaacagagcctgccattctgtgatgtagtgggaatagattcttaccaaaactaaggccattttctcagatactcggatgtaagattccacgtttgacattgcctgctcacctgccagaccagaacaaagtggtgcagtctcccttagtctgacctcacctgcccacttctcctatgatgactccaaagacatgtcccctggaacccactttagcattttagctgtctgtcaaaaggccagactcgggaactgctggtgttcgaagtttcctcattagaatagtcatcttaagtcatggatgggggaaatcagactgactctgaataacacgaaaccagcaaacaatcaaaagatgttgtagagcttttaaatgtcactgtcctccaatatcaacccactcatactacatgtgaaatgacaaaatggaactagctgtcctgaaagttgtcactgtcaatatgggacaatcccagtacttttcagaggaaaaccatggagttcccaagagctccaatttaatcatgttagacagtccaaatctttgctcaaattctgttttctgaggccctcctacccagccctgcctactccctcttctggcttgctttgctccctcacacccagcagcttcttctaatctactgcattgtttactatttgttctgaattaagttccacagaagaagggagtttgcgttgccagagttgtattctaggcacatacgtgggtctggcaacagagcaggcattcaacacaacttcattgaatgagtgagtatgtggtagggtgtgtccactaagtccaataagctagtactggggtggggcaagagcaaatttgctgagggggcagaagtgactaaggtccggtccctctgctgcagagatgctcacctagccagagaggtaacacacttgacactggatggttgagcagacagggacagtaagcacgaaagcaatggcccgaaggactggaaggaaggtgtgcaaaggtcaaatcgtgaggcagatgcaggatgcaatcgcccatggcaaaggaggacgtcgtataggcagcgtggcctctctgtgtgcagagccagagggcaatcataaacaactctttattgcctaaatgagctgttgttttgcctttttttttcctagctggttttaaacctgacatccatctgaccaaagaagtatgcgattgagtcgtgtctactgtaacccagtgtggaggggaattttgacaaatacccaattcagctagtcaatctaaattcctcttccacgtatggctcaaagccccactttgaggccttatcaaaataaatagtttatttagacatctgtgccatttggacagcgagcccacggggcagacaaaatgaaagaagagcccaggctgggcaggatgccttgcaggaaggtggcaaggctgtgcccagagaatgtgcctcttactttgtcaaactttttgtatttcaaagccgccccgtgcctttccagcattttcctcatgaatcttcttttccctctgcacacagaatatcttaaacactacgtccattgtgctccgcgcagtggtactggtcctgaagctgaggggctgcttgaattccaggacaagatccttgagaagaggaaacttgagccaggatgttttctcttgcttctttgagttccaagctaaagcaaaggattccctttttaacttcctctccctgcagtcttgagggatgccaggatcctctgtagctctgtggaacaaaaatcccactggagggaaggctgggtgagctttagggaatggatcaaatgaggtagaggattcatcctgagcctctggaccagctaaagaggaacctgagcactcctcagtcatggaagaagcaaaagctgaccgctcccagctgcccatcgctgtcttctgagatcatgtttaaaaccagggttcaggatgacccaccactttccttggaatgtattcctggaataactgtttgagggcgccaggttagagttggtctttggggattcttgggcctctcttccttctcaaggccttcctgtacgacctttatgacctcctcttattgtagaggtaaaggcaagatggaacaggcatctatatatcatgtccaaagttcccatctatggaaaacacaattgattcccacagcaggtctgttaagatctgttatcatgctgtgtagggaagcagagttgaagttcaaaagacaaaataacctaaccaggggattcagatgaatagggacagagctgggattagattccagggccatggatggccactgagaccaccattaagccctagaaaaaaggagcactccccagggacagagccctaaactctgtttagactgcccattttcttcgtaagtttcttttgccctggatttaaagtaggatccaggccagtaagtaggtaagattcttagcaaatcagagatgatttcagatgagagactgttccagagttgtgaactgggggttcaggaagcatagttagcttttgtaggaggtgttcagcccaaaggagagtccaaagcagagaattccagtcaggttggtggtcagaaacatccatgcctctactgagatagaacctactaggagaacatgacctcgaatagagactccactgagaggatcatgtaggcacaggccctaggacatctgaccgtccccaaacacagatgacaccttacttattggcatcactgaggttggcaagcagacccaggttttccaagcataaacagcacagacactgccagcctggccagcaaaaaacagaaattcagcgagaagtgaatcttttttccactaagcatagagagcagggggcccagtgtggtgagggactgaaagagaggctgctgtgtgctgctgatggctgtgtgtgggtgatgtcatgacagggtgtgagctgcgtacagcctgatgcacctgcgtcttggacagttaactggaggcatcaggagaaaacaaggtattctcagagatgaaggccatatttccaggaccagtttaaacactggtgcgtctatgccatggtcacagccagcaaaagccttccctttccaacggggctcagagctcatattactctaccctaggaggctgtcttggaatctaagagaccatttagtgtcgcattcagccacactgagtattgcataatggagaaactgttcagggcgccgtagatgggaagcagaattatccacaatggctggcaaagcccagaatccccggcatgaggcccaggtctctttgctttggcgagaactgacctcagggctgcctgaaacaagaaaccttaggcaaagcccactggtggctgctcagcaaaggaatcacaataggatttgtcatcttaggactccttaaagccagggggtgtcagccttccctgaggcagaaagagagtttgtcagaatcagggcataattttctgctgataaagccatctgccaccacagagaaggtccaagagcatcacctcgggtgctggccgggattgccacatttttgacactgagtctttggccacctcagacttttcttctctaaagccagatgtagctgtcaggatgcgggctccatgtgccacatgtggggcgtctgtatgtgtgcacttggctgcttggagccgccacagcccgcgggagaacgctgcactatctggcgctgaccatagccaggcagcatctggctctggagccaggagtgtctgtaggaatttgtacagcaggcttgcccccttctctagcttttccgagttgcttaccgatatgtctgtcagtgtgcctggtactgtagctgacctcactgccaggcttttatttgggggacatttaataggagaaatcacaatccctcattttaacgataacactgccctgtgaatgatggaaccagttctgataaatgccgcctcgcttattttttatccccacgtaaatatcagaatatgctttcacaaactaagatgccgatgaccacccaagatgacacaacattacgggaccaccatcccttgtgctgtcccctgttgatccaggcacataaatgagtggtgcccagctcctgacctccctgaaggaacatactctcagcttccacttcaaaatgggtggcttgctgctcagccggtgttgacatagtctgtagtccttatcaccacaggcctgaactagctagagacctagttcaagaaggtaagcgtcttggattcttttctgctagctgacaacaaaagggattgtgtgcatttaacaaggagagacactgctgattccattcgttggttcgtgtgtatgtattgcatgtttaccatgtatggggcactgttctcagtgttgcgacacactccaaaccgtaacagctccttgctgtgaggacctggtgtttgtgtgtggaatacaaacaacaaagatggatgaatgaatggaaaaggagagtgagaaggatggggagacgtagaggggatgcgtatttaacaaatgggccaatgtgtttctgctccaggtgtttttcagatgagtgagaacagcacagatcatctcaacgctaatgatatctttctcctaaaacatggggcacactggtccttgtgctcagtggtgacttgacgctttcacttcagctccaaaggtctccaatgctttgagcatccgaggcagctagatgcccttggccttgggctttctcatcttgccacctccctctcaaaacactggtttttcatttcagtcttgcacgaaggagacataccctgcaccacaactcctctgtggtgcattcaccagcttgtgcagtaaatgggcaggccctcacactgctttgcagattcagaggccagagaaaggacgtctgcatatgtagaggggctgatgggagagaagactgtattttccatgtttgattccactcactgggtcacacagtgactgaagatgcctgctgatggcatggccattcattgctcagtgaacttcatagtgacagtgttgcaaggctggtttatggagtggcttctccatctgtatcacttctgccttcacttatggtaggaccgagtagtactgagttggaatccccaggagataggcttatgggagcatctccctgcgaactcagcatcccccaccttcgaggtctgctgaatcttagactgaaaatagaatcttagaaaagatgggctgctgtggcctacctcaagcttcaacttcaaaacattattcctcacctagcattaccaaagaatatggtgacatcctaggaaactaattcctacattctgggacagttttcatccaggaggagggctttccgaagcaagtgtaggttgaaatttttaaggcagattttacaagtgctcgagacatcagatggcacacatcatctcctggaacatagtgggttcttctcctttttagttactcacctggctagtttcacgccaacttgacataagctacaggcatctgaaaggagggaacctcagttgagaaggatgtaagtctttatcttaattagtgatcgatggaggatgctgtaacgccaattgtgggtggtgccatccctacattgatgatcctgggttctataaggaagcaggctgagcaagccatgggaagcaaaccagtaagcagcactcttccatggcgtctgcatcagctcctgcctccagatttcctgttctagttcctgtcctaacttccttcattgatggtcttgttacctgggagtataagtgaagcaaaccctttcctccccaagttgtttcactgtagcaatggtaagcctaactaagacacttatatttatcactttccaggtcatccactttctcttctgtccttacaaaatgacctccacttcttagggcctctgtgctttccacacagcatctggaatgtgtggaaatgtctttgctctatgtctctcagagtcactacatactgggaacccccttggccgtatcgtttgaatgatgaaggccctaaaggtgatagcttagttcctacaaggtcccaaagggccacccaacccttccttccttgtccttttcttctctccctctacattcctgtatgccagccatgcccacagtaccactagccttttcatggctctcccccacccccacccccgaagctaggtcttgctcaagtccctaaggcctctagtgcttcttgccttcccctcctttgtctccaatagttattgacatctcaaccattcttttgcacatggtcgtaatacctcatagtctttcagactgtgtcatgtctaaatgcaaggactttgttttatatgactgacttctctagtgcatgcacacagcaccgttcagaatgttgattctaaatgattgacaggagaccgaactaatcatattccaaaacttagctggctcccccttgcctgaggcttatcctaaagctgaatgcaccctgtgggactccacagatcccctcagaaagtgtccataaagctatcaacctcactccaagcttataacaaggctagttgacttaagctgttttcaggaaacaaagaaaaaaaatagatcaaaaatgaaaaacattcaacttaaaggagctgtgtctccttgtcctgttccctgcctccctctccaaccccacccccatgctctgttttgcttttcgtgccaatggctgaagactataattttaaaaactgagctgacttttccagacccatgaagaatgtgcgtgtgcacatggatttttccacaaggacacttcctgtcttttgggttgtcttagccagtaatagtgaagccaggcaatcagatgcatctgtccattcgtccatccatccatccatccattcatctccccagcccttccttattctaatttgtttgcgaggctcaggacaggccaaaggggatggtttgtgtttcaccctgtcagacagttgtttgatgaggtttgtgttccatttattcagatggtttttatggttcctttgttgttaagggaaagactttgaaagtcataattctgtatccttatcccttctggtaggcctgtgccatgtctcaatggctttctcacaatgagaaaggaaatgagtgtttccaggccgttacttgagcagtttctgaacatggttgtggaagagaaaagctgagtcaaagttcagggtccatatagtgctggcctctcccatctgaaagatctctgtcggttcattctctgatcagcccaagtcctcaccacaattctggcctgacctctctgtgggtggttataagaccctgcccctttctgctacagacatgtctgagagccttggtcagcctacaatgtggacacatgtctgcatgtcattccatagcaccaggactatgaggtgcgaggctggagttggccttacaggaatgtcatgggcctggaccttgagacgttcttcctagagaccttcatctagacatcacctcttagattttcatccttgcccaacatccttgcatcagtgaaaagagtttgtatttttcccttgatttatagtagtttatctttttagaaaatcttgtaaagtggctcacaaatattctcacttgatccttagcataaccccagaaggtagataattcatatacaattttgcgtctacaaagacacgggtcaggggagacctgtgggcttcccacgtctcacaacaaataacagcagggatagcgattgagccaatcctccaacttgaagttcaggattcttcctactgcttcagctcccagattagacaaataagatattagagtaaatattactcagggaagacgatacttcaggaatgtagtggtgcttaacaagttattgctgaagtaaatttaacttcttctggccgccaagagagcatcttcatagaacgaaccttcctgcaaaacatacagagctgatgtgtcctcttttgttctttctcatagacccttcttatgactctgtcaggagaggagcatggaacaataatatgaactctggcctcaacaaaagtaagtaaataggaaaccatttgggggtgagtcaaatgtttctggagagccagaagttggggtgtgggcgtagggtcataagacacacactaaaaacaagtgttggtcttcatgctgcctgattagatgtcagtgtgaatttgcagtgcctgctcagatttttgaggtctactttgatttttttttttttttttttttttttgctatatttatgtgtacttggttttagaacttataaggtttgaggttttctcagaacaacttgatatataaaagaaaagtaactcgtctggattttgatatttcagtcaggacgttgaatctctgggacatatattctccacatgacaaggctcagtcaggtcaatacccctagccctagttagagagattaacatgaaggataacctaagggatgttgcgcatcacagacattaatttgaccaacagtgatcagccgatgatttgttgaaatccacccagtgtcttccattaaggggcagtgaaagagagcgattcactcttcaaccaatgtgtccatcttactgtctccgagaagtaaaactgcagggaaatgaagggaattggggagattatgttaataatgaggttgcattggtgcaagcgataaccaggatccctttcaattatgagtgtgcagtgtttgttcactctgcatgcaggacatgacgctatgggactcacaaagataagccaggcaaggaccagttatttaggcaggagagagaaatcatggacacacatatgtcttcatctgggttgtattaaagagttcttgcgcacctgctaccgttagagctactcagacaggccatgtctagggaatgtctagggaacaggagacaggtaaacctggagagctagatgtcagggacgaccatggtggtatgtctgacagtgaggaacctaggtttatggagtttaggatgcagagtagaccaaaagataagaaagggatagtgaatgataatatggaagtagattccagatcttcagtcctaaggagtgctgaagagtatgtgagtcagtttgaagtatgagaggtccagttacaccgagccacccatcacacaaaaagcagcatacattcaaaactggggaagccagaggtcaaacatgaacagccttggagaggctctcacgaaacacagtgtgacaggcaccaggtggtctgtgctcaaatgacactttctcaggagagacctctgtattgccatgtctatttgtgggggacacgtgtgtacatttgggggcacaagtatagccgtgtacccatgcacatacatggaggccaaagagagacactggctgttctgttttatcactctgtgcctggtccctttgagacactctcttactaaaccctggagttcaccatttctcggctagcctgactgtccatcaagcctcggtaatcttctgatctgtgccaatccctctccgttcccaggcacgtgttagaagtgcacacagacatgtcaagtttttatacgggtatgcttgggatctgggcccatgtcctcgtgcagcaaacagtcttaccatggagccatctcgaagctcaaggtcctatatttcaaaggaatggtctaaccccatgtcagcagacattgttcagtgttttctcttctgttaaaatataacttcattgctaactcttctgccccgagaccagtgccagcgtagcggtttgataggtattcaggaataaaatgagtctgtgagtccatgggagagtgcggtcctggcagctcatgtgccctccttccgggggatatgtaacaggagcatcttctgccacttttcttgatttctccacaggtcctctccttggaggatcacagaccatgggcaagaacactgagcagcggccccagccaggtatgtgattcaaatatgtagcctctcacttgtgtgttatactgctgtggagtcagtcaatggtggagcaagacagtgtacagttggctgtccatatctgtgggttttaggcctggggatttaaccaaacacagaccaataatattcaggaaagaatctacatctgcactgactgtggacagacttgctttcttttcattattccatcaacaatacagtacggctctttgcatagcatatgtgtcatgatggtaatctatgatttaaggaatgtggatggatatgactagattatatgcaaataacccattttatgtaaaggacttgagcagccacagatttcagtatccttgacagaccttagaacaaatcccctgtgtatcccaagaggcaactctagttcacacattgtctcttctttccaagagagtatctgggaattaagcagcaagtcctggaaccagggagcgatctgttaaaaggaacttaaaactgaaatggtccaacaccttattttgtggaagaaaacaggggttctgaagggtgaaaggatttgctgaaagacaagcagagctgaatttctttaagttccagagcctccacttcttatccaagcattttacgctttacgaaaccatacagaaatgccttcacctagtagatacgcagtcaagacataagaccttttgaagctatggacctggagacccttaataaagaaatgacttagagactgcagtctataatccctcggtagcatgacctcttatgatgggatgcccttgtttctgaccctgaccccgcccctgctcctccttgcttgcttcaacaaacaggaagttgacaacctaccttgacttaatccttttctgagccagagccctctgttcagctacccctctggccacttgtcttctggggagaggtcccacaggaagaccctacacagatctgaggagagccattgcactcagctctgctgtcttaattaagaatctgaattaagatctgaacaagctatttgctttggggtgtgcaaacatggttcttcatttccagccaaaatatagaaagagaaattgtagtaaaaagtgaaattcaagtgaaaaccaagtcaggtagagcaaatttttaaacaagttccaacaacaacaacaaaattgaatatctactcaaacaatttcagtttcatcaaaatttaataaaaaatgtggactgaaaggcttcaagaactgttaaattaattctttttaattcattaataattactattataattgaaaaaagcagtgtgtttttaaaaaggagtgacttcatagctaaaatacaaattctgcttagtgttgacattttcaagcttaaaatcacagagttttggtagaagggaagagagcccagcagcccaacccactcttcatagctgagaaaacaaatacccagaggttgtccaaaccatgatttagttcatgacatagctgggactagaacccaggctacctaatggtttttatagtccatcggaaaactcagacatgcgtaatgtcttcagcattagaaagatctattaatggctagtaattgctgaggaacctgctttaagcatgtttaataagcaatccttcagttcattcactgcctggttgaatttagccagatgctttccaaacgtgtgggcgattttgtttggggggtagtgacagcataatctaaaagtttagaaaccaggtatgaagcaagagtgctattactcgtctacgttgactgggccataactttgatcaaggcctctaatcaagctttcctatggccctgagataaaagtaggaaccgttgaagtctccttcatcttgatgctgctctcagattatttgctgaggaatgaagtaagctttttttttctttctagatccttatcagatcctggggccaaccagcagccgcctagcaaaccctggtgagttaacttgaacctgcaagcctttccctccagagcattcgttatatctgtaaggttacacagaaaccttactcctcggtacggtacaggcacctgtctggagactgcatgggcttccttagtcaaatattcaactgtgcacaaacaagaggcagggcctgttcatgagtagcagggtctgctgccacaagacgtttctggagaacaagcacctctggacagaggtttatgtccatggcaaatgactcagatggaagctccccgttagggaagctattctcagttattcctcatccagggctcatggataaatgtccccaagtgttgtggttttgacttgagtgctatagttatccagcctttgaaaaaggaagtgcaagcatcccaagagagttgcacacacaatgaacgtgacaagatgtgaaggattcactattaaaaataactctcggatgtgttcttctaaacccaaaccatggagatggggagctcaaggcaacaaaagccaggcccacgtgcctgctgcacctgcagtgctacaagctcgctgggcctcctccctaacctttagctaaaccattcctgcccagaagataaaaagccatccagcatccagcccctcccgttgcctctgcccatgcggaactgaacactaagagccgtgcacttttctggaaaacagcccagcttagtgaaccccaattctatgaggtgccttctctctgctctaccccacagccaccccccaagaggttcttggatacttgacactctttaaggccaatgttgaatagtttgagggatttcagcactaaatggagattagatagtgactcaggtctaggtagaaaggtctaaggggagggtcaaaaatcttaacaaaaggatgtggaaagttggcttccctgagatcctaagagcttgggacaaagccagcattcaccacaaccatcctttgggacaatctgtcttaagatctaaccttgcttactacgctcattttggcggcggcagtagagtaacagtatatactgtaccctttttttaagatttatttattttatttacgtgagtacactgtatctgtcttcagacacaccagaagagggcatcagatcctattatagatggttgtgagccaccatgtggttgctgggaattaaactgaggacctctggaagagcagtcagtgctcttaaccgctgagccttctctccagctccataatgtaccttttgaaactagctggataagcccgtctttgatgatgagcaagcttttgaagtgatgggtgtgtgaattgcccctctgtgattgtcaaccactatgtatgtctgtcaaaatatcaccacatgccctgtaaacgtgtacaattatcatgtgcctatttctgttttctaaaggaaaacataaagggttgtctccactttccttttttgttttgttatttgtttgtttgttgttgttgtttgtttgtttgtttgtttgtttgtttttccagatagggtttctgtgtagcagagccctggctgtcttgaactcctagaccaggctaacccccaactcacagagatccacttgcctctgcctcccaagtgctaggatcaaaggtatgtgccaccatgcctaaccaataaaggttgtggtggtggtggttgttcttgttgtggggaaaggacatgagttgtcatgtttaggaatcagaactgagactactgttcttctgtttcctcctgcatgcagggagtgggcagatccagctgtggcagtttctcctggaactactgtccgacagcgccaacgccagctgtatcacctgggaggggaccaacggggagttcaaaatgacggaccctgatgaggtggccaggcgctggggagagcggaagagcaagcccaacatgaattatgacaagctgagccgggccctccgatactactatgacaaaaacattatgaccaaagtgcatggcaaaaggtatgcctacaagtttgacttccatggcattgcccaggccctgcagccacatccaacagagacatccatgtacaagtatccctctgatatctcctacatgccttcctaccatgcccatcaacagaaggtgaactttgtcccgtctcacccatcctccatgcctgtcacctcctccagcttctttggagcagcatcacaatactggacctcccccactgctgggatctatccaaaccccagtgtcccccgccatcctaacacccacgtgccttcacacttaggcagctactactagaactaacaccagttggccttctggctgaagttccagctctcactttactggatactctggactctaaaaggcacagtagccttgaagagataagaaaactggatgttctttcttttggatagaacctttgtatttgttcttctaaaaaaattattatttttatgttaaaaacttttgtttcctctacctgaaaaaaaaaaaagatcattccatgagccagtccaccagtttggattctcaacctcctatcatcgaatgagttaaatatttaggttactggaacggtttataccatgattctgagaaaggagtacgcattttctttactctttttttttatgaccaaagcagtttcttatcagcacacgggtctcatcattgtaggattccctacgatcatgaatcatggacttgaccagggttggtctggtttgagacttagtaaaagtcaaggcaggatgtttataatcttatcttcggaggactcaattcagtggatggcaactggaacactggctctgaggccagtgaagttttttgcccaactggaatttaaaagatgtgtgtctatgtgtgtatttaagaagccattattattacaaaattcctcacaatgggcagtatgtgtttgggtgactcttctccccagaaatagtcagaatatgaacaaagaaagtttaacacaaactcagacactcctgacgggcagaggattaaataacatttttttggagggtttaataacatttttggaggggtttttttgtttgtttttgtttttgggggttttttttgtttgttttttgttttttggtttttggtttttttttgttttttttttttttttggttttgatttttaatgacagtgagtcccagaactttgaaaagtcatggggatttctaaactcagattcgcaaacgctgtgcgtttgtcagaccaccagaccaaggtcaaacaatcagaaggcaactaactgtataaattatgcagagttattttcctatatctcacagtattaaaaaaataaataattaaaaattaaagaataagtaaacgagttgacctcggtcacaaatgcagttttactatcaaatcaatcattgttatttttttaaaatataatttgtacatctttgtcaatctgtacatttgggctatttgtacgtttttgtaactgtttttttttaataagcataatgtgactattgaaaacgaggagttaaaagtcactgagtttttaggaagaaaaacctaaaaatacagttatttaacacgcatgcccaaacaagatctgtttagacctacaacgctttagaaatgtttgtaaataacagagttgcaataacctgaaaaggacaaacaaacttttctctgtgcacacgaggcactctcctgctctatatatgcaatatatttttagatgtgcaaatatatatataatttttcaggtaatcgtgactttttaaacgatattgttaaggtgacaactcttagtccactgaagactaagttgtaaaataatttgaccttaataaattgtgccttcttctttttcttcttctctcagaactggtgacattgttttcttatttacttccagatcaaaggctttcccggagggaagttgtttttattgctggtgtgtgtgtgtgtgtgtgtgtgtgtgtgtgtgtgtgtgtgtgtatgtaagaacacacagcacacatttaaaggtcagaaggcagtttttatcaaataaatcagttctctccttccatgttagtttttgaggcagaatctcttggtatgtctcccaccctgtggactccagacacacaagcttccaaaaagctctcccgcttccacctcccctcttaccacagagcactgggattgtcggtgaatacctccacgtatggcttctttcatgagttccagggatcagagtcagtcatcaggcttacaacgtctcacgtttatccactgagccatctcattggccccgaggaaaaaaataacttgcctacttattcttgtaccatcgataatctcctaactgcatgtgctgcagtacagtggaagacacagtatctgtgagtttcagatgcttgttaacaatgacgattttaaagcttctctaagccattaagatctgtatgacctttgtaagtgagagacagacctaggtaaactatatccagggaactacagcagcaaccgtctccaggacctggccaggtagacttgactctgttccccacaagaaggcgacctgatgcttcagcagagaacaggagtctagcctgacttcaaccccacactagggtcttacgtagactctctggctctatttttcagcccaatagagaagcttgcttccaacggcttcagcgttaagcatcatgctcctctcctttacaacaaagatgactaaaactagaaatagctggtgttgttgcagggactctcatagaactagtagctctagaaaccccttaaagaagtttgcagcctctggtcctcacacagagtaatttctagaccaggtaagcctacgtgaagaagatgagaggagttctgaacactggtctccaacttctaaaacatgcaccctacattataaaatacattaagaacatatcctttatgtttatgtatatgctggtttgtatcttgcattgacaaaatatataccattatacatttgtagatccctccaatcatgactgaaaatattcagaaagtgttttaaattattgggtaaagagagctattgaggttaagagcaattgctgcccttacagagaacccaggttgggttcccagaatttacatggggtgactcacaactgcctataattttagcttccaaggatctgttgccctcttctggcctcctcagatatctctacactcacagcatatggttacacaaacacacacccctatacacataaatgaatagttgcatctttcctgaatatatactgactctttattggcattttaatcaaatcatgagtgataacaactaattacagtgtttaccttgcacttgatatgatacattatgtagatgtgatttaaaagataggagaagaatatgtaaacagtgtgccattttaaataagtgattttggcatctatggattttggtgtctttagggtaatcctggaacccatacttatccagaggaaaataagattaaatatttgttataaacaaaaagatgagattttagaaggtaatatgaaaatgtttaagctgacattctgttttcttcccttatttatattgcttcatccctggttccaacattcaaaacggaaaccgtgaacattactgagacaaacacatatatttacattcatacatttgctttctagcaaagaataactacttggcattaatggctcatgcatagaaagacatgaggcaagtcagttatgttcataagtagtcaactttcaagtctcatagtcaacttgaaaggtctcatgtcagtttgcaaatctacaaagtcctattaagggggaaattgagaggcacatatccctgatgcactgctaaaagaacaggatgctcacaccattagttcacctttaaaaacgtgtgtgtgtgtgtgtgtgtgtgtgtgtgtgtgtgtatttgtgcatgtgtgcctgtgtgccacctgggtgctggtaactggagttgccagatgaggatgcctacatcctaaccctgaaactggagttacaggcagttatgagctgactgccatgtgagctgcccaacatggatgctgaaacacatgcctatgtcttctgtgagggcaaacagtttcaactcctgagtcatttctcagccactggttagccctctagacagttttgtttcctacacaaagctgcaatgctttctcacaatcctgtacccagagtgtcatggtggttcattccatgatccaaaagctggtctaccctgacaggagcagagcaatttcgtccatcaagccttcgctcagggaggaatgacatttagtgcccagattgaatggtctcagctgacaaacaggcatttatgtcatcctgactgtgagtcccctctaccactctgcacttgtgccatgaaggccattacatctgataaactgtggcagcaaagcagagagggcacagcaaccctgtgagggactctaatggaaaccgatcctctccatgtccccacctcagctccggacctgtccacagcacttcagagcaggtggctgtcttagtccatttgagaagtcatggcagactgctgtaggctcgctggcttataaacaacagaaactcagtgttcacagttctggaggccagaattccagtgccaaagcaccagcagatttgtcattgatgggggactcactgtttattcctgattcacaggaggtcccttcgcactgtcctctcacacagtcccaggcagcaagcagctttctggcatggtgtgtgtgtgtgtgtgtgtgtgcgtgtgcgtgtgcgtgtgcgtgtgcgtgtgcgtgtgtgtgtgtgtgtgtgtgtgtatctacgtttattcatgagagctcctctttataggtccacctccaaatagccacacgtgggggattaagctttaatatatgaattttataggggaatggaggaatattcaatctacagcagaaattttaacttcctggtgtcaaaatattgttgctacccaaagaaagttgtattttcaatatctgttgctttgaaaattttttagaagtcaaaaaacactagtcatttaagaacaattaaagtgatcatcgctttatctgaccaataatacctgcatgcagttggggaatgagaataacacatgagttctgtccatggcaaatgaatgagatgtggtttcataaacagaatatttgctctcaaaaccaagtgggagaaaagtatccagaataccaagggagaaaacaatatccattaatcccaagtaagacacagccagagcaagatattatttgtggatattttaaaaaccactgcaaatcaaagattatttttaaaaattgcatctatattcaatgtatattaatatttgattacccctaaatattatttcactattatatataataatatttataaatatataaggcattatatatacaatattctcttattccataaataatacagtgcaacaattatttccactgttctactgcattaagcaatagaagtaatttagagtgatttaaatatataatgcataaaatatatagatgcactatgccattgtatataagggacttgaacaaccaggggtttgggtatctctgtgactttctgaaaccaatacccttcaaatttcaaggtacaaataattaaagttttttttaagatttacttctcttactttatcttatgtacatgggtgttttacctgcgtatacacatgtgtgccacgttgagttccctgtacttaaggaggtcagaagagaagggttagatccctgttcctggagctactggttgtgagtcaccgtgtgtgtgtattgagaactgaaccctgaccctgtgcaagaagtgccctcaacaggtgagccaccatctctccagcctgctttctatgagaaagtttggactctgaggacttgctgtcacaccgcactttcccttgtctttctttattaataaccataatgcaaacatgttgctttgaaaaacagctgggaaagcacactttggaagaatgtgcctggggacatggtctgtgagcatggcgtctgctgccagccagcatcctgtaccttgctgtggtctgactcttcacaggggttcctttatgtcatcgggagtgggggcttgcttctagaactcaggaggtagcaaagaggtggagtgtctgcggagaccaggagcgaggctgtagactagacaggggcaggggtggagttctggtgagcacaaaggcttcacttttatccaagaagactttgtgatttctgaaaacatgcaccgagcatttatttcatcactagaaggctactgaaacggatactgcacgcctttagccatagaccctctagaggattagaagaggtcagctgattagaatactacaaatcccaggttccctgggaggatggccacttctgagaggaagtggttcagccaggcaaacccccagggctgcagccaattgagaaagaaaatgaagggaagtttttgaaagaaatgccgggctcatgtctggggtctgtctccctctctcactcctacttggcctcctgtctaattgttacagcctgtctgagctggcaaattccaaagcacatagtcaatttacacgtagcttaaaagctctagaggaaaacacatttgcagtgagaacattcacttgcctacaattgctaggttaaccttctgggctttcacccagttaactcgtgtgttttcttagttgggagagagagagaacttggggagattaaatgagtgtgaatataatcccagggaccctgcgttcaaattttgaccctttcacgtagtaggcaaattatcaatacctactgactagggtatcatctcctgccagtgatcctgtctatacacacacatcaaagaaacgacctggaagtccattgcaaaatgctgcacaggatgtgtgtgtatagacagtgtcacctgctagatttctcaggggacaatattaaaactgtaatagctaggagccgctctgtccaggcacttaatgaagattttttttttatttgtggtcaagaaggtgtttttttttttgttttgttttgtgttttgtttttttgttttttgttgtttttgtttttcaaatgagtgaaaagtaggagtagattgagttttccagagggtatttatatgtctgccatcgccagcctcactttgccgtgtgggtgcttgtccttcactggctctgtatggtcacctcaagtcagtagagcatgcaagaagctttagggctgcaaataaaagagaatggcctaacgtgaggctgaaagggaactttgtcagaagtattggctagattgttaaattggctaagaaatagaagttggcagctgcaattccctgccttgataagcttgtgcccaacattctcacagacctacatttcctccgaggcttcacgggaggtgggcataccgctctcttgtttgccactgtggtgacactggttcgcagcaactggtcacttgtaaatgtggagtgaagcagaagaaagcgtccacagtcagcaagactgagttgtgaatccagctgtccctccctgagttatgaattcttgtctctgaggttcacttcctcatgggtaaagctaggactgttgtagtatcatccagggatatcaaagaagtaacgtaagatcaggtaatgaagtgcttgctatctgttttaaaaaaaaatacggaacttcaaaatattatatggatgtcttagtcgattgatacttcctttttacatgactctggtccccctgatataatacagagttaaattaggagctgagaagatggctcagtggataaagtgcttgttgctcaaacattagaacccgcatcctaaccccaagctcacacttaggaagcctagcttgatatctgcatgagtaactgagctgagtcaggcaggtccctgaagttctctggccaatcagggtgctccaagctcagtgtagagatctggcctccaaaaaaaaaaaaaactatactgtaagagaggaagagaggaaaacatgacatcaacagggagagagagagagagaaagagagagagagagagagagagagagagagagagagagagagagagaaatgcgctactttattgtacataactatttttagatttcaatcacttgggacaggagagagatgcttggtaggtaagagacttgtcagggtaagaggacctgagttgaaatcttagttccatacacatctttaatcaacattgtgtggtaggaagtagagggagacaagagtttgtatccctgtgccttgccagttgtgagtctagttccaagttcaataaaagaccttgtctcaatggagtacgatgaagggcaatagaacagaacacctgaaaccattctctagccctgaggatgtgtgcactagcctgcttctgcacatacaaggttgcatacaccacattcactccgatgcatacacagtcacacacacaaagacaaaaattataaagccttgagatcatcacaaacttacaaaacagctggaaaaatataagtgagcgtcttttcttgggctgtttgagaggagactcctgacaaatgctccattaactctggatacctgagtgtatatttctgtcaaacatcggtcttctcctaaggagtccaccacaagtcagagaaccagaaaattaacctgcataggttacttccctgacactctctggcaccaatcacttttctttctgcatggatatttttttccaactctgggaacttaaccaaccctgtcatatactgctctactctttattttaaggcaagacttcactaaattgcccagcctctccttaaactccctttgtagccaaagtaatccttatgatcctcctgcctcagtttccatagtaatgcaaattagcagctttgtgccaccaagccagcccattatcatgtgttgtaggagaagaaagcaccacccagaatcatttggaatgcccagacttcccctgactttcagaatcttgggaattttagaaccccttgggctggccacattgtagaataactcccagggttaggtgctcgggtgtgtgttcatggttagggctgccttccctgtgagcagcaatcatagaagtcctcccaggttcctcccctggcagcctatgtggaggtacatgccctcaatgtatctcgatatgagggggttcacttagatggatggttgtggaagagatgatgtttttcaggttcttctaaaaatttacatttttccttttgtaattagcattttgtgcagtgttcctcatggaattatggaaatatcccccactattaaattctagtgcatgtgtgtgtgtgtgtaagtataataagtgttcctaaaggtacatctctaattagtcctgctttccaattttattgagagacttgaatttgttcttctcattagtttgatgatgattttggcccaataggaaaccatttaagtgggtttcaactttagcttacgcatgctaacttccttacttgttccttcaaaaacacatttagggctccagtccctaattcagggattcctgcatcattttagtgagaaatgatttttcaaagccaatatctgtgtgctaggtgtgcccattgttagtggtcttatctctaagatttcccagaggatagcactaagcattatatgcatacataataatatgcatatactatgtgtttatatacatttccatatgttcatgtatacacattcataagctaatatgtactcactccatattcatctcaatctatattgaaaatcctgagttcattcagatgtgtccatttccaaccagggagcgcaggattcctctacttcttcctttccatattgtaatgaaaaccatgttttttgtttagacatacagagtatccttccttaccaggccctgccaaaaaccagtttttcctctctggactgtccgcacccacacgtgacaggctccttcccttgcttaggccaaccccatggcccttcccttcacacagtgtatgccctcttcagttgttcaaacataacaccacatgccatcttccctctccacaaggacacagtctccagcctgtggctgtactctgactcccatacacaacacactaccacagcttgccttgccctgctgagcactactgctcacatcgggccaacccagtgccactgcacctacagcttcaggaggtgaagagattgtcgaggcgggatagatgtattaacctgtggcttttatctgactctgtctacacgtacacatatgcacccatgcatgtgggtactttctgagctagaaaatattagaaatggggagaacaataattataaattggcacccttctaatgatcttatgttccattatgatattttttttctaaatgactaatgtttacactgttctctccaggagggaaaacacagaggaggagaagggaccgggagaagggaggagggccgggaaatgtggaaaagcaatgctttgggttatgatgtcagactggagcaagggatgcacgacttttgagtcacttttggttgttgaacaatagaacagagcacagaaaaggcccaagttctttgtgtctgaaagcttgtgtcttccgctggacagtaagggagagaagagcagagactatgtctggctgtgtgcctggcttacaaaaagctccagtgcatgtctgttgtttatcaaattgcacctgctagacagaaagggctgaaggcccagctgagaagcaaaatgaagtgtcgggtctgctcattccctgctaacaccaaagatgtgcagaggaacaaaaccaggggcaatgcagtcaaaacatcagacttgatcactgttataagttgctagcagttgttaccaaatccctgcttggtgttaattcctttccccagtcgatgcagtatatcttccggcaatgattattatactgcccagagcctctggcttctagaaatgtttaatcaagcaacacatatatcctagcaatacatcccagacgcctcccgacagtttcaccttcctctgctctatggttttttttcccccacagtataaacttatcacacagttctctgcataatgtaaaggtttgtcatctagaaaaatagcaaaatagaacatactaccatcgggaaacctgtctatgtcaggcactgctctgagaacaccgagctgtggggagtgcaggctatgcatgcagatctatgcagactgtgaagagagaacatgtcttagtttctgtgtgactaaattcatagcataatagcttaaacctgcaccccaaaaagtatttctacaggctgctcagcctgctctttccagatctttacaaaccaatgattcctatctagaatccagggcctcaaaccctaatggatcccactcagttgagcaattgcaatagtacctctgtggccagcgccctcagaggcaaatggaagtgatcaggggagagagagaccaaccaaggatttccatccctacaatgagctacattgccaaagacaccatggtcccttaggccaccctgcactgagcagatagatcttcatttaggccaagatctaggtccctttcctgtgcagaggtcttgttaattccaaataggatccactgaacatctgcagcttccaaaacaacaacaacaacaaacatgaaaaaaatacctccatcttgatggaaaaaaacatatttgtatacacatacacttaggttaaatcttgctctagaagggacacctagtcttcaagagatcaattatctagatgattggcagctaactgcaggtggcttgggtccagaagacaacagggagaaattgagttaaaggaactaccttgttacgtatgcaagaggtcccttggggaagaagcaattccatgtctagaacttcgttaatcagaacaggtaaacaagcatcccttactcttgaggatctgtccattgtcctgggagaaatactacaggaaaatggagtcacactggagttccagaatatacagtgccatctctgtgcaaaacttagtttcctctaagtcacagtctctccagaaggtggatatcatctccccactaaatcccaaccacacagatctctaagtaaaatggaaagattggcctgactatggaatttcctgatcttggtagatttatgaccaaaaaggcagaggatgacccaagtcataactgccggctgcaaagcaaattcaattaccccaaattccaacacacccaccctgcttcctgtatgtcactcctttctgataatctgtcctgggccatgaaaccccactgtgtcatctgcacccatgtttaatctctccacgaatgaagccttgagaaccaatcccgaggccatctcagcagagggaacgcaccacattcctgatgaagcccaatgacataggttcaacccagcctggcctaacccacacacgcagtaagtaaatcagcccaaccccttcccagccatctctgaggattaagaactcagtggtaggacatgaggaatgttttagagagtcttggaggagtgggttaagggctaaggcagggacagcctagaatccgtcttttctgctgagctgggagcctccactgtacaaacaccatgcctctctgtgacttccacccatccaacctgaccacacagaaacaaagtacatctctacacggttacaagatgtcatgggaggtaggttctctgagttttaagggtcaggcacttgctcaagctttgtggagaagttattagaaaccttccttggtataggctggggagagagttcagggataagatgcttgtggtacaagagtggggaactgactttgatccccagcgcacatacatacacatcaaagatgggcatgatgtctcacattcgtcatccaaaaactggagaggagaagacggaagatctttgcagcccagtggttagctagtctagcctatgtgaagaccatatgaaaggagagaagctatttcaaaaatcaagatggacagctcctagggaatgacatttgaggctctcctctggcctacacacacacacacacacacacacacacacacacactcctggctagacaggaaccttgaaataattcccatggttcctcgcccaatggggctgcggatatggcaagcaccctgactgggcaccctgacaaagtcaggacagcaccaggcatggaacgacccaacgtggcacctctctcgagcattctggcttctgaaaggtatttggtctccatgcttcatcctaaaatagaaaattgagtctttggaaaggctacaaataccttattttacaaaacaactacacatccccaccaggtctagagtaccatgtgccatttggagactgaaggagagtaatgtgctgttgattttcatttaatcctttagaaacccagaaggtagtgtttttcatagctgagggctccaaagctctgagagaacatgagtgggtggacttggcctctggcctgtggttgtgccctccgggatatttaaatgggcagtcctttctgtcccctgtctggcctcctctacctgtggatacctctgttgacatctgttctccagaaaacaaaggggagccagtctcatccacacagggggtcacacactaggattttacccagcaaatcttttattgtctgtcacttcccaagctccatggagcctgggtgttgtctgttctcttccaagctgagcccccagatgtggcccactgtaattttgggcatgtatgccttgccttgttaatattattcttgctttgagacaggccttgttcatcttgaactccagcttgag

SEQ ID NO: 16 - DNA, 143161 bp, Mus musculus
ctcaagctggagttcaagatgaacaaggcctgtctcaaagcaagaataatattaacaaggcaaggcatacatgcccaaaattacagtgggccacatctgggggctcagcttggaagagaacagacaacacccaggctccatggagcttgggaagtgacagacaataaaagatttgctgggtaaaatcctagtgtgtgaccccctgtgtggatgagactggctcccctttgttttctggagaacagatgtcaacagaggtatccacaggtagaggaggccagacaggggacagaaaggactgcccatttaaatatcccggagggcacaaccacaggccagaggccaagtccacccactcatgttctctcagagctttggagccctcagctatgaaaaacactaccttctgggtttctaaaggattaaatgaaaatcaacagcacattactctccttcagtctccaaatggcacatggtactctagacctggtggggatgtgtagttgttttgtaaaataaggtatttgtagcctttccaaagactcaattttctattttaggatgaagcatggagaccaaatacctttcagaagccagaatgctcgagagaggtgccacgttgggtcgttccatgcctggtgctgtcctgactttgtcagggtgcccagtcagggtgcttgccatatccgcagccccattgggcgaggaaccatgggaattatttcaaggttcctgtctagccaggagtgtgtgtgtgtgtgtgtgtgtgtgtgtgtgtgtgtaggccagaggagagcctcaaatgtcattccctaggagctgtccatcttgatttttgaaatagcttctctcctttcatatggtcttcacataggctagactagctaaccactgggctgcaaagatcttccgtcttctcctctccagtttttggatgacgaatgtgagacatcatgcccatctttgatgtgtatgtatgtgcgctggggatcaaagtcagttccccactcttgtaccacaagcatcttatccctgaactctctccccagcctataccaaggaaggtttctaataacttctccacaaagcttgagcaagtgcctgacccttaaaactcagagaacctacctcccatgacatcttgtaaccgtgtagagatgtactttgtttctgtgtggtcaggttggatgggtggaagtcacagagaggcatggtgtttgtacagtggaggctcccagctcagcagaaaagacggattctaggctgtccctgccttagcccttaacccactcctccaagactctctaaaacattcctcatgtcctaccactgagttcttaatcctcagagatggctgggaaggggttgggctgatttacttactgcgtgtgtgggttaggccaggctgggttgaacctatgtcattgggcttcatcaggaatgtggtgcgttccctctgctgagatggcctcgggattggttctcaaggcttcattcgtggagagattaaacatgggtgcagatgacacagtggggtttcatggcccaggacagattatcagaaaggagtgacatacaggaagcagggtgggtgtgttggaatttggggtaattgaatttgctttgcagccggcagttatgacttgggtcatcctctgcctttttggtcataaatctaccaagatcaggaaattccatagtcaggccaatctttccattttacttagagatctgtgtggttgggatttagtggggagatgatatccaccttctggagagactgtgacttagaggaaactaagttttgcacagagatggcactgtatattctggaactccagtgtgactccattttcctgtagtatttctcccaggacaatggacagatcctcaagagtaagggatgcttgtttacctgttctgattaacgaagttctagacatggaattgcttcttccccaagggacctcttgcatacgtaacaaggtagttcctttaactcaatttctccctgttgtcttctggacccaagccacctgcagttagctgccaatcatctagataattgatctcttgaagactaggtgtcccttctagagcaagatttaacctaagtgtatgtgtatacaaatatgtttttttccatcaagatggaggtatttttttcatgtttgttgttgttgttgttttggaagctgcagatgttcagtggatcctatttggaattaacaagacctctgcacaggaaagggacctagatcttggcctaaatgaagatctatctgctcagtgcagggtggcctaagggaccatggtgtctttggcaatgtagctcattgtagggatggaaatccttggttggtctctctctcccctgatcacttccatttgcctctgagggcgctggccacagaggtactattgcaattgctcaactgagtgggatccattagggtttgaggccctggattctagataggaatcattggtttgtaaagatctggaaagagcaggctgagcagcctgtagaaatactttttggggtgcaggtttaagctattatgctatgaatttagtcacacagaaactaagacatgttctctcttcacagtctgcatagatctgcatgcatagcctgcactccccacagctcggtgttctcagagcagtgcctgacatagacaggtttcccgatggtagtatgttctattttgctatttttctagatgacaaacctttacattatgcagagaactgtgtgataagtttatactgtgggggaaaaaaaaccatagagcagaggaaggtgaaactgtcgggaggcgtctgggatgtattgctaggatatatgtgttgcttgattaaacatttctagaagccagaggctctgggcagtataataatcattgccggaagatatactgcatcgactggggaaaggaattaacaccaagcagggatttggtaacaactgctagcaacttataacagtgatcaagtctgatgttttgactgcattgcccctggttttgttcctctgcacatctttggtgttagcagggaatgagcagacccgacacttcattttgcttctcagctgggccttcagccctttctgtctagcaggtgcaatttgataaacaacagacatgcactggagctttttgtaagccaggcacacagccagacatagtctctgctcttctctcccttactgtccagcggaagacacaagctttcagacacaaagaacttgggccttttctgtgctctgttctattgttcaacaaccaaaagtgactcaaaagtcgtgcatcccttgctccagtctgacatcataacccaaagcattgcttttccacatttcccggccctcctcccttctcccggtcccttctcctcctctgtgttttccctcctggagagaacagtgtaaacattagtcatttagaaaaaaaatatcataatggaacataagatcattagaagggtgccaatttataattattgttctccccatttctaatattttctagctcagaaagtacccacatgcatgggtgcatatgtgtacgtgtagacagagtcagataaaagccacaggttaatacatctatcccgcctcgacaatctcttcacctcctgaagctgtaggtgcagtggcactgggttggcccgatgtgagcagtagtgctcagcagggcaaggcaagctgtggtagtgtgttgtgtatgggagtcagagtacagccacaggctggagactgtgtccttgtggagagggaagatggcatgtggtgttatgtttgaacaactgaagagggcatacactgtgtgaagggaagggccatggggttggcctaagcaagggaaggagcctgtcacgtgtgggtgcggacagtccagagaggaaaaactggtttttggcagggcctggtaaggaaggatactctgtatgtctaaacaaaaaacatggttttcattacaatatggaaaggaagaagtagaggaatcctgcgctccctggttggaaatggacacatctgaatgaactcaggattttcaatatagattgagatgaatatggagtgagtacatattagcttatgaatgtgtatacatgaacatatggaaatgtatataaacacatagtatatgcatattattatgtatgcatataatgcttagtgctatcctctgggaaatcttagagataagaccactaacaatgggcacacctagcacacagatattggctttgaaaaatcatttctcactaaaatgatgcaggaatccctgaattagggactggagccctaaatgtgtttttgaaggaacaagtaaggaagttagcatgcgtaagctaaagttgaaacccacttaaatggtttcctattgggccaaaatcatcatcaaactaatgagaagaacaaattcaagtctctcaataaaattggaaagcaggactaattagagatgtacctttaggaacacttattatacttacacacacacacacatgcactagaatttaatagtgggggatatttccataattccatgaggaacactgcacaaaatgctaattacaaaaggaaaaatgtaaatttttagaagaacctgaaaaacatcatctcttccacaaccatccatctaagtgaaccccctcatatcgagatacattgagggcatgtacctccacataggctgccaggggaggaacctgggaggacttctatgattgctgctcacagggaaggcagccctaaccatgaacacacacccgagcacctaaccctgggagttattctacaatgtggccagcccaaggggttctaaaattcccaagattctgaaagtcaggggaagtctgggcattccaaatgattctgggtggtgctttcttctcctacaacacatgataatgggctggcttggtggcacaaagctgctaatttgcattactatggaaactgaggcaggaggatcataaggattactttggctacaaagggagtttaaggagaggctgggcaatttagtgaagtcttgccttaaaataaagagtagagcagtatatgacagggttggttaagttcccagagttggaaaaaaatatccatgcagaaagaaaagtgattggtgccagagagtgtcagggaagtaacctatgcaggttaattttctggttctctgacttgtggtggactccttaggagaagaccgatgtttgacagaaatatacactcaggtatccagagttaatggagcatttgtcaggagtctcctctcaaacagcccaagaaaagacgctcacttatatttttccagctgttttgtaagtttgtgatgatctcaaggctttataatttttgtctttgtgtgtgtgactgtgtatgcatcggagtgaatgtggtgtatgcaaccttgtatgtgcagaagcaggctagtgcacacatcctcagggctagagaatggtttcaggtgttctgttctattgcccttcatcgtactccattgagacaaggtcttttattgaacttggaactagactcacaactggcaaggcacagggatacaaactcttgtctccctctacttcctaccacacaatgttgattaaagatgtgtatggaactaagatttcaactcaggtcctcttaccctgacaagtctcttacctaccaagcatctctctcctgtcccaagtgattgaaatctaaaaatagttatgtacaataaagtagcgcatttctctctctctctctctctctctctctctctctctctctctctctctttctctctctctctctccctgttgatgtcatgttttcctctcttcctctcttacagtatagttttttttttttttggaggccagatctctacactgagcttggagcaccctgattggccagagaacttcagggacctgcctgactcagctcagttactcatgcagatatcaagctaggcttcctaagtgtgagcttggggttaggatgcgggttctaatgtttgagcaacaagcactttatccactgagccatcttctcagctcctaatttaactctgtattatatcagggggaccagagtcatgtaaaaaggaagtatcaatcgactaagacatccatataatattttgaagttccgtatttttttttaaaacagatagcaagcacttcattacctgatcttacgttacttctttgatatccctggatgatactacaacagtcctagctttacccatgaggaagtgaacctcagagacaagaattcataactcagggagggacagctggattcacaactcagtcttgctgactgtggacgctttcttctgcttcactccacatttacaagtgaccagttgctgcgaaccagtgtcaccacagtggcaaacaagagagcggtatgcccacctcccgtgaagcctcggaggaaatgtaggtctgtgagaatgttgggcacaagcttatcaaggcagggaattgcagctgccaacttctatttcttagccaatttaacaatctagccaatacttctgacaaagttccctttcagcctcacgttaggccattctcttttatttgcagccctaaagcttcttgcatgctctactgacttgaggtgaccatacagagccagtgaaggacaagcacccacacggcaaagtgaggctggcgatggcagacatataaataccctctggaaaactcaatctactcctacttttcactcatttgaaaaacaaaaacaacaaaaaacaaaaaaacaaaacacaaaacaaaacaaaaaaaaaaacaccttcttgaccacaaataaaaaaaaaatcttcattaagtgcctggacagagcggctcctagctattacagttttaatattgtcccctgagaaatctagcaggtgacactgtctatacacacacatcctgtgcagcattttgcaatggacttccaggtcgtttctttgatgtgtgtgtatagacaggatcactggcaggagatgataccctagtcagtaggtattgataatttgcctactacgtgaaagggtcaaaatttgaacgcagggtccctgggattatattcacactcatttaatctccccaagttctctctctctcccaactaagaaaacacacgagttaactgggtgaaagcccagaaggttaacctagcaattgtaggcaagtgaatgttctcactgcaaatgtgttttcctctagagcttttaagctacgtgtaaattgactatgtgctttggaatttgccagctcagacaggctgtaacaattagacaggaggccaagtaggagtgagagagggagacagaccccagacatgagcccggcatttctttcaaaaacttcccttcattttctttctcaattggctgcagccctgggggtttgcctggctgaaccacttcctctcagaagtggccatcctcccagggaacctgggatttgtagtattctaatcagctgacctcttctaatcctctagagggtctatggctaaaggcgtgcagtatccgtttcagtagccttctagtgatgaaataaatgctcggtgcatgttttcagaaatcacaaagtcttcttggataaaagtgaagcctttgtgctcaccagaactccacccctgcccctgtctagtctacagcctcgctcctggtctccgcagacactccacctctttgctacctcctgagttctagaagcaagcccccactcccgatgacataaaggaacccctgtgaagagtcagaccacagcaaggtacaggatgctggctggcagcagacgccatgctcacagaccatgtccccaggcacattcttccaaagtgtgctttcccagctgtttttcaaagcaacatgtttgcattatggttattaataaagaaagacaagggaaagtgcggtgtgacagcaagtcctcagagtccaaactttctcatagaaagcaggctggagagatggtggctcacctgttgagggcacttcttgcacagggtcagggttcagttctcaatacacacacacggtgactcacaaccagtagctccaggaacagggatctaacccttctcttctgacctccttaagtacagggaactcaacgtggcacacatgtgtatacgcaggtaaaacacccatgtacataagataaagtaagagaagtaaatcttaaaaaaaactttaattatttgtaccttgaaatttgaagggtattggtttcagaaagtcacagagatacccaaacccctggttgttcaagtcccttatatacaatggcatagtgcatctatatattttatgcattatatatttaaatcactctaaattacttctattgcttaatgcagtagaacagtggaaataattgttgcactgtattatttatggaataagagaatattgtatatataatgccttatatatttataaatattattatatataatagtgaaataatatttaggggtaatcaaatattaatatacattgaatatagatgcaatttttaaaaataatctttgatttgcagtggtttttaaaatatccacaaataatatcttgctctggctgtgtcttacttgggattaatggatattgttttctcccttggtattctggatacttttctcccacttggttttgagagcaaatattctgtttatgaaaccacatctcattcatttgccatggacagaactcatgtgttattctcattccccaactgcatgcaggtattattggtcagataaagcgatgatcactttaattgttcttaaatgactagtgttttttgacttctaaaaaattttcaaagcaacagatattgaaaatacaactttctttgggtagcaacaatattttgacaccaggaagttaaaatttctgctgtagattgaatattcctccattcccctataaaattcatatattaaagcttaatcccccacgtgtggctatttggaggtggacctataaagaggagctctcatgaataaacgtagatacacacacacacacacacacacacgcacacgcacacgcacacgcacacgcacacgcacacacacacacacacacacaccatgccagaaagctgcttgctgcctgggactgtgtgagaggacagtgcgaagggacctcctgtgaatcaggaataaacagtgagtcccccatcaatgacaaatctgctggtgctttggcactggaattctggcctccagaactgtgaacactgagtttctgttgtttataagccagcgagcctacagcagtctgccatgacttctcaaatggactaagacagccacctgctctgaagtgctgtggacaggtccggagctgaggtggggacatggagaggatcggtttccattagagtccctcacagggttgctgtgccctctctgctttgctgccacagtttatcagatgtaatggccttcatggcacaagtgcagagtggtagaggggactcacagtcaggatgacataaatgcctgtttgtcagctgagaccattcaatctgggcactaaatgtcattcctccctgagcgaaggcttgatggacgaaattgctctgctcctgtcagggtagaccagcttttggatcatggaatgaaccaccatgacactctgggtacaggattgtgagaaagcattgcagctttgtgtaggaaacaaaactgtctagagggctaaccagtggctgagaaatgactcaggagttgaaactgtttgccctcacagaagacataggcatgtgtttcagcatccatgttgggcagctcacatggcagtcagctcataactgcctgtaactccagtttcagggttaggatgtaggcatcctcatctggcaactccagttaccagcacccaggtggcacacaggcacacatgcacaaatacacacacacacacacacacacacacacacacacacgtttttaaaggtgaactaatggtgtgagcatcctgttcttttagcagtgcatcagggatatgtgcctctcaatttcccccttaataggactttgtagatttgcaaactgacatgagacctttcaagttgactatgagacttgaaagttgactacttatgaacataactgacttgcctcatgtctttctatgcatgagccattaatgccaagtagttattctttgctagaaagcaaatgtatgaatgtaaatatatgtgtttgtctcagtaatgttcacggtttccgttttgaatgttggaaccagggatgaagcaatataaataagggaagaaaacagaatgtcagcttaaacattttcatattaccttctaaaatctcatctttttgtttataacaaatatttaatcttattttcctctggataagtatgggttccaggattaccctaaagacaccaaaatccatagatgccaaaatcacttatttaaaatggcacactgtttacatattcttctcctatcttttaaatcacatctacataatgtatcatatcaagtgcaaggtaaacactgtaattagttgttatcactcatgatttgattaaaatgccaataaagagtcagtatatattcaggaaagatgcaactattcatttatgtgtataggggtgtgtgtttgtgtaaccatatgctgtgagtgtagagatatctgaggaggccagaagagggcaacagatccttggaagctaaaattataggcagttgtgagtcaccccatgtaaattctgggaacccaacctgggttctctgtaagggcagcaattgctcttaacctcaatagctctctttacccaataatttaaaacactttctgaatattttcagtcatgattggagggatctacaaatgtataatggtatatattttgtcaatgcaagatacaaaccagcatatacataaacataaaggatatgttcttaatgtattttataatgtagggtgcatgttttagaagttggagaccagtgttcagaactcctctcatcttcttcacgtaggcttacctggtctagaaattactctgtgtgaggaccagaggctgcaaacttctttaaggggtttctagagctactagttctatgagagtccctgcaacaacaccagctatttctagttttagtcatctttgttgtaaaggagaggagcatgatgcttaacgctgaagccgttggaagcaagcttctctattgggctgaaaaatagagccagagagtctacgtaagaccctagtgtggggttgaagtcaggctagactcctgttctctgctgaagcatcaggtcgccttcttgtggggaacagagtcaagtctacctggccaggtcctggagacggttgctgctgtagttccctggatatagtttacctaggtctgtctctcacttacaaaggtcatacagatcttaatggcttagagaagctttaaaatcgtcattgttaacaagcatctgaaactcacagatactgtgtcttccactgtactgcagcacatgcagttaggagattatcgatggtacaagaataagtaggcaagttatttttttcctcggggccaatgagatggctcagtggataaacgtgagacgttgtaagcctgatgactgactctgatccctggaactcatgaaagaagccatacgtggaggtattcaccgacaatcccagtgctctgtggtaagaggggaggtggaagcgggagagctttttggaagcttgtgtgtctggagtccacagggtgggagacataccaagagattctgcctcaaaaactaacatggaaggagagaactgatttatttgataaaaactgccttctgacctttaaatgtgtgctgtgtgttcttacatacacacacacacacacacacacacacacacacacacacacacaccagcaataaaaacaacttccctccgggaaagcctttgatctggaagtaaataagaaaacaatgtcaccagttctgagagaagaagaaaaagaagaaggcacaatttattaaggtcaaattattttacaacttagtcttcagtggactaagagttgtcaccttaacaatatcgtttaaaaagtcacgattacctgaaaaattatatatatatttgcacatctaaaaatatattgcatatatagagcaggagagtgcctcgtgtgcacagagaaaagtttgtttgtccttttcaggttattgcaactctgttatttacaaacatttctaaagcgttgtaggtctaaacagatcttgtttgggcatgcgtgttaaataactgtatttttaggtttttcttcctaaaaactcagtgacttttaactcctcgttttcaatagtcacattatgcttattaaaaaaaaacagttacaaaaacgtacaaatagcccaaatgtacagattgacaaagatgtacaaattatattttaaaaaaataacaatgattgatttgatagtaaaactgcatttgtgaccgaggtcaactcgtttacttattctttaatttttaattatttatttttttaatactgtgagatataggaaaataactctgcataatttatacagttagttgccttctgattgtttgaccttggtctggtggtctgacaaacgcacagcgtttgcgaatctgagtttagaaatccccatgacttttcaaagttctgggactcactgtcattaaaaatcaaaaccaaaaaaaaaaaaaaaacaaaaaaaaaccaaaaaccaaaaaacaaaaaacaaacaaaaaaaacccccaaaaacaaaaacaaacaaaaaaacccctccaaaaatgttattaaaccctccaaaaaaatgttatttaatcctctgcccgtcaggagtgtctgagtttgtgttaaactttctttgttcatattctgactatttctggggagaagagtcacccaaacacatactgcccattgtgaggaattttgtaataataatggcttcttaaatacacacatagacacacatcttttaaattccagttgggcaaaaaacttcactggcctcagagccagtgttccagttgccatccactgaattgagtcctccgaagataagattataaacatcctgccttgacttttactaagtctcaaaccagaccaaccctggtcaagtccatgattcatgatcgtagggaatcctacaatgatgagacccgtgtgctgataagaaactgctttggtcataaaaaaaaagagtaaagaaaatgcgtactcctttctcagaatcatggtataaaccgttccagtaacctaaatatttaactcattcgatgataggaggttgagaatccaaactggtggactggctcatggaatgatcttttttttttttcaggtagaggaaacaaaagtttttaacataaaaataataatttttttagaagaacaaatacaaaggttctatccaaaagaaagaacatccagttttcttatctcttcaaggctactgtgccttttagagtccagagtatccagtaaagtgagagctggaacttcagccagaaggccaactggtgttagttctagtagtagctgcctaagtgtgaaggcacgtgggtgttaggatggcgggggacactggggtttggatagatcccagcagtgggggaggtccagtattgtgatgctgctccaaagaagctggaggaggtgacaggcatggaggatgggtgagacgggacaaagttcaccttctgttgatgggcatggtaggaaggcatgtaggagatatcagagggatacttgtacatggatgtctctgttggatgtggctgcagggcctgggcaatgccatggaagtcaaacttgtaggcataccttttgccatgcactttggtcataatgtttttgtcatagtagtatcggagggcccggctcagcttgtcataattcatgttgggcttgctcttccgctctccccagcgcctggccacctcatcagggtccgtcattttgaactccccgttggtcccctcccaggtgatacagctggcgttggcgctgtcggacagtagttccaggagaaactgccacagctggatctgcccactccctgcatgcaggaggaaacagaagaacagtagtctcagttctgattcctaaacatgacaactcatgtcctttccccacaacaagaacaaccaccaccaccacaacctttattggttaggcatggtggcacatacctttgatcctagcacttgggaggcagaggcaagtggatctctgtgagttgggggttagcctggtctaggagttcaagacagccagggctctgctacacagaaaccctatctggaaaaacaaacaaacaaacaaacaaacaaacaacaacaacaaacaaacaaataacaaaacaaaaaaggaaagtggagacaaccctttatgttttcctttagaaaacagaaataggcacatgataattgtacacgtttacagggcatgtggtgatattttgacagacatacatagtggttgacaatcacagaggggcaattcacacacccatcacttcaaaagcttgctcatcatcaaagacgggcttatccagctagtttcaaaaggtacattatggagctggagagaaggctcagcggttaagagcactgactgctcttccagaggtcctcagtttaattcccagcaaccacatggtggctcacaaccatctataataggatctgatgccctcttctggtgtgtctgaagacagatacagtgtactcacgtaaataaaataaataaatcttaaaaaaagggtacagtatatactgttactctactgccgccgccaaaatgagcgtagtaagcaaggttagatcttaagacagattgtcccaaaggatggttgtggtgaatgctggctttgtcccaagctcttaggatctcagggaagccaactttccacatccttttgttaagatttttgaccctccccttagacctttctacctagacctgagtcactatctaatctccatttagtgctgaaatccctcaaactattcaacattggccttaaagagtgtcaagtatccaagaacctcttggggggtggctgtggggtagagcagagagaaggcacctcatagaattggggttcactaagctgggctgttttccagaaaagtgcacggctcttagtgttcagttccgcatgggcagaggcaacgggaggggctggatgctggatggctttttatcttctgggcaggaatggtttagctaaaggttagggaggaggcccagcgagcttgtagcactgcaggtgcagcaggcacgtgggcctggcttttgttgccttgagctccccatctccatggtttgggtttagaagaacacatccgagagttatttttaatagtgaatccttcacatcttgtcacgttcattgtgtgtgcaactctcttgggatgcttgcacttcctttttcaaaggctggataactatagcactcaagtcaaaaccacaacacttggggacatttatccatgagccctggatgaggaataactgagaatagcttccctaacggggagcttccatctgagtcatttgccatggacataaacctctgtccagaggtgcttgttctccagaaacgtcttgtggcagcagaccctgctactcatgaacaggccctgcctcttgtttgtgcacagttgaatatttgactaaggaagcccatgcagtctccagacaggtgcctgtaccgtaccgaggagtaaggtttctgtgtaaccttacagatataacgaatgctctggagggaaaggcttgcaggttcaagttaactcaccagggtttgctaggcggctgctggttggccccaggatctgataaggatctagaaagaaaaaaaaagcttacttcattcctcagcaaataatctgagagcagcatcaagatgaaggagacttcaacggttcctacttttatctcagggccataggaaagcttgattagaggccttgatcaaagttatggcccagtcaacgtagacgagtaatagcactcttgcttcatacctggtttctaaacttttagattatgctgtcactaccccccaaacaaaatcgcccacacgtttggaaagcatctggctaaattcaaccaggcagtgaatgaactgaaggattgcttattaaacatgcttaaagcaggttcctcagcaattactagccattaatagatctttctaatgctgaagacattacgcatgtctgagttttccgatggactataaaaaccattaggtagcctgggttctagtcccagctatgtcatgaactaaatcatggtttggacaacctctgggtatttgttttctcagctatgaagagtgggttgggctgctgggctctcttcccttctaccaaaactctgtgattttaagcttgaaaatgtcaacactaagcagaatttgtattttagctatgaagtcactcctttttaaaaacacactgcttttttcaattataatagtaattattaatgaattaaaaagaattaatttaacagttcttgaagcctttcagtccacattttttattaaattttgatgaaactgaaattgtttgagtagatattcaattttgttgttgttgttggaacttgtttaaaaatttgctctacctgacttggttttcacttgaatttcactttttactacaatttctctttctatattttggctggaaatgaagaaccatgtttgcacaccccaaagcaaatagcttgttcagatcttaattcagattcttaattaagacagcagagctgagtgcaatggctctcctcagatctgtgtagggtcttcctgtgggacctctccccagaagacaagtggccagaggggtagctgaacagagggctctggctcagaaaaggattaagtcaaggtaggttgtcaacttcctgtttgttgaagcaagcaaggaggagcaggggcggggtcagggtcagaaacaagggcatcccatcataagaggtcatgctaccgagggattatagactgcagtctctaagtcatttctttattaagggtctccaggtccatagcttcaaaaggtcttatgtcttgactgcgtatctactaggtgaaggcatttctgtatggtttcgtaaagcgtaaaatgcttggataagaagtggaggctctggaacttaaagaaattcagctctgcttgtctttcagcaaatcctttcacccttcagaacccctgttttcttccacaaaataaggtgttggaccatttcagttttaagttccttttaacagatcgctccctggttccaggacttgctgcttaattcccagatactctcttggaaagaagagacaatgtgtgaactagagttgcctcttgggatacacaggggatttgttctaaggtctgtcaaggatactgaaatctgtggctgctcaagtcctttacataaaatgggttatttgcatataatctagtcatatccatccacattccttaaatcatagattaccatcatgacacatatgctatgcaaagagccgtactgtattgttgatggaataatgaaaagaaagcaagtctgtccacagtcagtgcagatgtagattctttcctgaatattattggtctgtgtttggttaaatccccaggcctaaaacccacagatatggacagccaactgtacactgtcttgctccaccattgactgactccacagcagtataacacacaagtgagaggctacatatttgaatcacatacctggctggggccgctgctcagtgttcttgcccatggtctgtgatcctccaaggagaggacctgtggagaaatcaagaaaagtggcagaagatgctcctgttacatatcccccggaaggagggcacatgagctgccaggaccgcactctcccatggactcacagactcattttattcctgaatacctatcaaaccgctacgctggcactggtctcggggcagaagagttagcaatgaagttatattttaacagaagagaaaacactgaacaatgtctgctgacatggggttagaccattcctttgaaatataggaccttgagcttcgagatggctccatggtaagactgtttgctgcacgaggacatgggcccagatcccaagcatacccgtataaaaacttgacatgtctgtgtgcacttctaacacgtgcctgggaacggagagggattggcacagatcagaagattaccgaggcttgatggacagtcaggctagccgagaaatggtgaactccagggtttagtaagagagtgtctcaaagggaccaggcacagagtgataaaacagaacagccagtgtctctctttggcctccatgtatgtgcatgggtacacggctatacttgtgcccccaaatgtacacacgtgtcccccacaaatagacatggcaatacagaggtctctcctgagaaagtgtcatttgagcacagaccacctggtgcctgtcacactgtgtttcgtgagagcctctccaaggctgttcatgtttgacctctggcttccccagttttgaatgtatgctgctttttgtgtgatgggtggctcggtgtaactggacctctcatacttcaaactgactcacatactcttcagcactccttaggactgaagatctggaatctacttccatattatcattcactatccctttcttatcttttggtctactctgcatcctaaactccataaacctaggttcctcactgtcagacataccaccatggtcgtccctgacatctagctctccaggtttacctgtctcctgttccctagacattccctagacatggcctgtctgagtagctctaacggtagcaggtgcgcaagaactctttaatacaacccagatgaagacatatgtgtgtccatgatttctctctcctgcctaaataactggtccttgcctggcttatctttgtgagtcccatagcgtcatgtcctgcatgcagagtgaacaaacactgcacactcataattgaaagggatcctggttatcgcttgcaccaatgcaacctcattattaacataatctccccaattcccttcatttccctgcagttttacttctcggagacagtaagatggacacattggttgaagagtgaatcgctctctttcactgccccttaatggaagacactgggtggatttcaacaaatcatcggctgatcactgttggtcaaattaatgtctgtgatgcgcaacatcccttaggttatccttcatgttaatctctctaactagggctaggggtattgacctgactgagccttgtcatgtggagaatatatgtcccagagattcaacgtcctgactgaaatatcaaaatccagacgagttacttttcttttatatatcaagttgttctgagaaaacctcaaaccttataagttctaaaaccaagtacacataaatatagcaaaaaaaaaaaaaaaaaaaaaaaaatcaaagtagacctcaaaaatctgagcaggcactgcaaattcacactgacatctaatcaggcagcatgaagaccaacacttgtttttagtgtgtgtcttatgaccctacgcccacaccccaacttctggctctccagaaacatttgactcacccccaaatggtttcctatttacttacttttgttgaggccagagttcatattattgttccatgctcctctcctgacagagtcataagaagggtctatgagaaagaacaaaagaggacacatcagctctgtatgttttgcaggaaggttcgttctatgaagatgctctcttggcggccagaagaagttaaatttacttcagcaataacttgttaagcaccactacattcctgaagtatcgtcttccctgagtaatatttactctaatatcttatttgtctaatctgggagctgaagcagtaggaagaatcctgaacttcaagttggaggattggctcaatcgctatccctgctgttatttgttgtgagacgtgggaagcccacaggtctcccctgacccgtgtctttgtagacgcaaaattgtatatgaattatctaccttctggggttatgctaaggatcaagtgagaatatttgtgagccactttacaagattttctaaaaagataaactactataaatcaagggaaaaatacaaactcttttcactgatgcaaggatgttgggcaaggatgaaaatctaagaggtgatgtctagatgaaggtctctaggaagaacgtctcaaggtccaggcccatgacattcctgtaaggccaactccagcctcgcacctcatagtcctggtgctatggaatgacatgcagacatgtgtccacattgtaggctgaccaaggctctcagacatgtctgtagcagaaaggggcagggtcttataaccacccacagagaggtcaggccagaattgtggtgaggacttgggctgatcagagaatgaaccgacagagatctttcagatgggagaggccagcactatatggaccctgaactttgactcagcttttctcttccacaaccatgttcagaaactgctcaagtaacggcctggaaacactcatttcctttctcattgtgagaaagccattgagacatggcacaggcctaccagaagggataaggatacagaattatgactttcaaagtctttcccttaacaacaaaggaaccataaaaaccatctgaataaatggaacacaaacctcatcaaacaactgtctgacagggtgaaacacaaaccatcccctttggcctgtcctgagcctcgcaaacaaattagaataaggaagggctggggagatgaatggatggatggatggatggacgaatggacagatgcatctgattgcctggcttcactattactggctaagacaacccaaaagacaggaagtgtccttgtggaaaaatccatgtgcacacgcacattcttcatgggtctggaaaagtcagctcagtttttaaaattatagtcttcagccattggcacgaaaagcaaaacagagcatgggggtggggttggagagggaggcagggaacaggacaaggagacacagctcctttaagttgaatgtttttcatttttgatctattttttttctttgtttcctgaaaacagcttaagtcaactagccttgttataagcttggagtgaggttgatagctttatggacactttctgaggggatctgtggagtcccacagggtgcattcagctttaggataagcctcaggcaagggggagccagctaagttttggaatatgattagttcggtctcctgtcaatcatttagaatcaacattctgaacggtgctgtgtgcatgcactagagaagtcagtcatataaaacaaagtccttgcatttagacatgacacagtctgaaagactatgaggtattacgaccatgtgcaaaagaatggttgagatgtcaataactattggagacaaaggaggggaaggcaagaagcactagaggccttagggacttgagcaagacctagcttcgggggtgggggtgggggagagccatgaaaaggctagtggtactgtgggcatggctggcatacaggaatgtagagggagagaagaaaaggacaaggaaggaagggttgggtggccctttgggaccttgtaggaactaagctatcacctttagggccttcatcattcaaacgatacggccaagggggttcccagtatgtagtgactctgagagacatagagcaaagacatttccacacattccagatgctgtgtggaaagcacagaggccctaagaagtggaggtcattttgtaaggacagaagagaaagtggatgacctggaaagtgataaatataagtgtcttagttaggcttaccattgctacagtgaaacaacttggggaggaaagggtttgcttcacttatactcccaggtaacaagaccatcaatgaaggaagttaggacaggaactagaacaggaaatctggaggcaggagctgatgcagacgccatggaagagtgctgcttactggtttgcttcccatggcttgctcagcctgcttccttatagaacccaggatcatcaatgtagggatggcaccacccacaattggcgttacagcatcctccatcgatcactaattaagataaagacttacatccttctcaactgaggttccctcctttcagatgcctgtagcttatgtcaagttggcgtgaaactagccaggtgagtaactaaaaaggagaagaacccactatgttccaggagatgatgtgtgccatctgatgtctcgagcacttgtaaaatctgccttaaaaatttcaacctacacttgcttcggaaagccctcctcctggatgaaaactgtcccagaatgtaggaattagtttcctaggatgtcaccatattctttggtaatgctaggtgaggaataatgttttgaagttgaagcttgaggtaggccacagcagcccatcttttctaagattctattttcagtctaagattcagcagacctcgaaggtgggggatgctgagttcgcagggagatgctcccataagcctatctcctggggattccaactcagtactactcggtcctaccataagtgaaggcagaagtgatacagatggagaagccactccataaaccagccttgcaacactgtcactatgaagttcactgagcaatgaatggccatgccatcagcaggcatcttcagtcactgtgtgacccagtgagtggaatcaaacatggaaaatacagtcttctctcccatcagcccctctacatatgcagacgtcctttctctggcctctgaatctgcaaagcagtgtgagggcctgcccatttactgcacaagctggtgaatgcaccacagaggagttgtggtgcagggtatgtctccttcgtgcaagactgaaatgaaaaaccagtgttttgagagggaggtggcaagatgagaaagcccaaggccaagggcatctagctgcctcggatgctcaaagcattggagacctttggagctgaagtgaaagcgtcaagtcaccactgagcacaaggaccagtgtgccccatgttttaggagaaagatatcattagcgttgagatgatctgtgctgttctcactcatctgaaaaacacctggagcagaaacacattggcccatttgttaaatacgcatcccctctacgtctccccatccttctcactctccttttccattcattcatccatctttgttgtttgtattccacacacaaacaccaggtcctcacagcaaggagctgttacggtttggagtgtgtcgcaacactgagaacagtgccccatacatggtaaacatgcaatacatacacacgaaccaacgaatggaatcagcagtgtctctccttgttaaatgcacacaatcccttttgttgtcagctagcagaaaagaatccaagacgcttaccttcttgaactaggtctctagctagttcaggcctgtggtgataaggactacagactatgtcaacaccggctgagcagcaagccacccattttgaagtggaagctgagagtatgttccttcagggaggtcaggagctgggcaccactcatttatgtgcctggatcaacaggggacagcacaagggatggtggtcccgtaatgttgtgtcatcttgggtggtcatcggcatcttagtttgtgaaagcatattctgatatttacgtggggataaaaaataagcgaggcggcatttatcagaactggttccatcattcacagggcagtgttatcgttaaaatgagggattgtgatttctcctattaaatgtcccccaaataaaagcctggcagtgaggtcagctacagtaccaggcacactgacagacatatcggtaagcaactcggaaaagctagagaagggggcaagcctgctgtacaaattcctacagacactcctggctccagagccagatgctgcctggctatggtcagcgccagatagtgcagcgttctcccgcgggctgtggcggctccaagcagccaagtgcacacatacagacgccccacatgtggcacatggagcccgcatcctgacagctacatctggctttagagaagaaaagtctgaggtggccaaagactcagtgtcaaaaatgtggcaatcccggccagcacccgaggtgatgctcttggaccttctctgtggtggcagatggctttatcagcagaaaattatgccctgattctgacaaactctctttctgcctcagggaaggctgacaccccctggctttaaggagtcctaagatgacaaatcctattgtgattcctttgctgagcagccaccagtgggctttgcctaaggtttcttgtttcaggcagccctgaggtcagttctcgccaaagcaaagagacctgggcctcatgccggggattctgggctttgccagccattgtggataattctgcttcccatctacggcgccctgaacagtttctccattatgcaatactcagtgtggctgaatgcgacactaaatggtctcttagattccaagacagcctcctagggtagagtaatatgagctctgagccccgttggaaagggaaggcttttgctggctgtgaccatggcatagacgcaccagtgtttaaactggtcctggaaatatggccttcatctctgagaataccttgttttctcctgatgcctccagttaactgtccaagacgcaggtgcatcaggctgtacgcagctcacaccctgtcatgacatcacccacacacagccatcagcagcacacagcagcctctctttcagtccctcaccacactgggccccctgctctctatgcttagtggaaaaaagattcacttctcgctgaatttctgttttttgctggccaggctggcagtgtctgtgctgtttatgcttggaaaacctgggtctgcttgccaacctcagtgatgccaataagtaaggtgtcatctgtgtttggggacggtcagatgtcctagggcctgtgcctacatgatcctctcagtggagtctctattcgaggtcatgttctcctagtaggttctatctcagtagaggcatggatgtttctgaccaccaacctgactggaattctctgctttggactctcctttgggctgaacacctcctacaaaagctaactatgcttcctgaacccccagttcacaactctggaacagtctctcatctgaaatcatctctgatttgctaagaatcttacctacttactggcctggatcctactttaaatccagggcaaaagaaacttacgaagaaaatgggcagtctaaacagagtttagggctctgtccctggggagtgctccttttttctagggcttaatggtggtctcagtggccatccatggccctggaatctaatcccagctctgtccctattcatctgaatcccctggttaggttattttgtcttttgaacttcaactctgcttccctacacagcatgataacagatcttaacagacctgctgtgggaatcaattgtgttttccatagatgggaactttggacatgatatatagatgcctgttccatcttgcctttacctctacaataagaggaggtcataaaggtcgtacaggaaggccttgagaaggaagagaggcccaagaatccccaaagaccaactctaacctggcgccctcaaacagttattccaggaatacattccaaggaaagtggtgggtcatcctgaaccctggttttaaacatgatctcagaagacagcgatgggcagctgggagcggtcagcttttgcttcttccatgactgaggagtgctcaggttcctctttagctggtccagaggctcaggatgaatcctctacctcatttgatccattccctaaagctcacccagccttccctccagtgggatttttgttccacagagctacagaggatcctggcatccctcaagactgcagggagaggaagttaaaaagggaatcctttgctttagcttggaactcaaagaagcaagagaaaacatcctggctcaagtttcctcttctcaaggatcttgtcctggaattcaagcagcccctcagcttcaggaccagtaccactgcgcggagcacaatggacgtagtgtttaagatattctgtgtgcagagggaaaagaagattcatgaggaaaatgctggaaaggcacggggcggctttgaaatacaaaaagtttgacaaagtaagaggcacattctctgggcacagccttgccaccttcctgcaaggcatcctgcccagcctgggctcttctttcattttgtctgccccgtgggctcgctgtccaaatggcacagatgtctaaataaactatttattttgataaggcctcaaagtggggctttgagccatacgtggaagaggaatttagattgactagctgaattgggtatttgtcaaaattcccctccacactgggttacagtagacacgactcaatcgcatacttctttggtcagatggatgtcaggtttaaaaccagctaggaaaaaaaaaggcaaaacaacagctcatttaggcaataaagagttgtttatgattgccctctggctctgcacacagagaggccacgctgcctatacgacgtcctcctttgccatgggcgattgcatcctgcatctgcctcacgatttgacctttgcacaccttccttccagtccttcgggccattgctttcgtgcttactgtccctgtctgctcaaccatccagtgtcaagtgtgttacctctctggctaggtgagcatctctgcagcagagggaccggaccttagtcacttctgccccctcagcaaatttgctcttgccccaccccagtactagcttattggacttagtggacacaccctaccacatactcactcattcaatgaagttgtgttgaatgcctgctctgttgccagacccacgtatgtgcctagaatacaactctggcaacgcaaactcccttcttctgtggaacttaattcagaacaaatagtaaacaatgcagtagattagaagaagctgctgggtgtgagggagcaaagcaagccagaagagggagtaggcagggctgggtaggagggcctcagaaaacagaatttgagcaaagatttggactgtctaacatgattaaattggagctcttgggaactccatggttttcctctgaaaagtactgggattgtcccatattgacagtgacaactttcaggacagctagttccattttgtcatttcacatgtagtatgagtgggttgatattggaggacagtgacatttaaaagctctacaacatcttttgattgtttgctggtttcgtgttattcagagtcagtctgatttcccccatccatgacttaagatgactattctaatgaggaaacttcgaacaccagcagttcccgagtctggccttttgacagacagctaaaatgctaaagtgggttccaggggacatgtctttggagtcatcataggagaagtgggcaggtgaggtcagactaagggagactgcaccactttgttctggtctggcaggtgagcaggcaatgtcaaacgtggaatcttacatccgagtatctgagaaaatggccttagttttggtaagaatctattcccactacatcacagaatggcaggctctgtttcagacttcaagggatcccagacatgatctaaaccagacatgcaaatgagcatgagaccctaggttcaaagttgggagacagcgtatgtggccatgtaagaattttattagaaattgaaaatatgactcagactatcaaaactgactttctttaaactgatcttaggctattgggcaggactggtgagtaactgggccagccaacgctttcaggctcaaagagttttcaaaattatatcccgagaagcttgtgtttctttggaataactgaatcttatcaagaactggactgttttggggtgtcatttaaagctttaaagctatttgggggaagcaatctcatggtttccaaacagtaaagccattcactgcaaaggaaagaattcgggatctccgtcactccaactctgcaccctgcttcccagatcatcagttatgtgctgtgtgcaccttggtgagtgacttcccctctctgaaaagtatactcttgtgagaaacaattgactattttgtaaatttcagaccatgcaagagcaaacagtatatttaatcctcacaagggtctttggagaatagataagatcatgtatacacaaacccttcacacacgccaaagtctcctatggaattgtagttaatcttttccagtcagcattttggtgtatgtgtgcatgtgcgtgtgtgtgtgtatgcatgtgcgtgcatgcgtgtgtgcgtgtgtgtgtgtgtgtgtgtgtgtatgtgtgtgtgtgtgtgtgtgtgcttgtacactcatcttggtatgcacatgtggatgccagaggtggtatttgagtatcttcctcctatttactgcattctatatcattattggtatttagtaggattagtgttgttattttgagacaaggtcattcactggacctgaagcttactgttttggccagtgattggctgaccagtgagcccctaggttcaagttgtctctattctcagggtggaattacagatgcatgccaccttgcccagtttttttttttaattatgtgggtaacgcagacctgaatttaacctcacctttgtgcagtattttacccattagacatttccccaaactattcttttccaggtttttttattcataggagataagaacttaattttttttgttgtttttttgttttttgttttgagacaggtttcctctgtgtagccctggctgtcctagcactcactctgtagaccaggctggcctcgaactcagaaatccacctgcctctgcctcccaaatgctgggattaaaagtgtgcgccaccactgcctggctagaaataaattttttcttgtgctaagataatttcttctgattcttcctttagtagagcaagactgagtaaatatttaactcaattgaaaaatattagattttctttcccagcaaatccatcaactgtcaaggttatttactgaaaatctttggggtgggagaaaagaataatggacaaaagtcacaattaaagatgacaagataatctgcaattaggttcagaaatagctcctgggttcagggcttagggaagagacacagttcgtcggagtaaggtaaacacactgagcaggtaggattgatttgggatttgacatataagtaattatcttacataatgttattattctctctgtggcttctgcctgacatgaattcaagctgtaccaaagaggcggaagaagcgtctcagaatttacttgtgagacctgcggattcccaaaagaggggaaagccctcacacccccatgccagcctcagactttcttcctgaaagactttaccttctcttccgtggggattctacaggagaaatgatttctttgtgatattaagttgaggcttctccaaagagaggaatttgttacatctataaaagattttcatattaaaataataaatggtgctgcttacagcccatccttttaactagaagatacacttcttccctgtgcgtcaagaggggcttccatgtctgtgcttctctctcttcttccttcttcaaatagagaggaaaaaaaagacagatctatacctttctttacggggatggtaggtaggtaggtaggtaggtaggtagatagagacagacagacagacagacagacagacagacataagatagataaaggcttgggaaaataagctttttttgtaagcatagtctttcctttgcatgtgagggtaaatggtttcagagtctctatcatgcaccatgacccataatgctcaaattctcatggtacagtgctaaatagaacgcatgatcatcctcccaaagacttccagtcattgatggaccacttacgctatctcacgactggggtatcacttccatgcatacacactgctgtgtaagtaaggcacactaactcactgcactgctggaggaacatctaagatcacttaaaatacctaacacaatgtaattcgttgctatactgtgtcatttaggaaatgacagggagcttgcttgtccaagaggatgctcttttctctagcaatggttggtcaaaactgccgatgtggaagccctggatgggagaggccagctatactttccagtatagctaaacaaacctcctggaatagctaaatcagtacattgggcaaagcccacgtatctggacgaccctgtgctgaggtagccaccagtgagcatcaacagcacttgtagacaatccccttttcttgccagttaacttgaaacccttctcaacatcagctaacaggaccacttttagtttccatcacaaatcagagcacatggtgaagatgtttaagaactaaaatgaatttcattctgagttttagcttcactctgtggagtgagacagatctttaacgcaagaagcagcttggtagaggcggcaggactgatatagtaacagcaagactggagaggaataaggaaggccaagcttacttagcaagtgtgaattgctaccaagaaatgtgtgatatggtcagagcttcagccacagagcactacagtcaaggcctctctctgctggtatggaaggaggaggaatggagtcaggttggaaagttccccaggatgtcattacccacaaatatcttcccacagccttgtacatttggccctctaccttcaagtgtttacaggaatcacattcctttatagagatgcaccagggcacgtgcattccccgttaccgtcattagcagcgcagaacacatacatgggtacctacagcctcatttatttcttctggaagcctctaagaacagctctgaaatgcataaaagcaaagacaggcacaagaaagtcatgttgatctaaatgagaacttctgactatctgaggggagtgctgtcttctggcccagggacatgagaggccagcctatggtgacagaaaggatgctgatgtaaaccaagaagctaaagttgtcattaagtgtgagaacaaagtgtgggctgtaaaggttgaggtgggaaaacactgcagaagcaatggaagctgtcgattctaaggacccaacagtcagctacagcttccttcctcagtgccccagtgcaggaaaagttaacttcatggagggagcttaggtgaggtaggatcctggaaggtcttcatgattgatgctcatatcaaccaaggggaacatgacaacctgatttctaatgacatgtctgtgtctcactctcgttttttcagattaagttcattgcaacacatggaaatggttttactcagtgtaatatgccttttactgaagctcatttttttcatttctcttaagtgttcaattaagctcaaaagcttaatcatgtatcatcatgcaaattataaaaatatatctacagaaaaatttgtgaaacaaactaatatgcctccagaaatgccggtaacattgagaaattttgaaccattgcaggaatcgatgcagtcccatggttttaacaattagacaaacccagcttcctgaaagaaatgggtcttttggcatgctgtgatgttattaatgtcaacttggcaagatgaaggagacaaacttctggccatgcctgtgaggaacaattgattaggttacttgaggtagaagtgggcagcaccattccctaggcttggatcctggactggattaaaaggagaaaggcagtggagcagagcagtcgctcttctctgctaactcctaactggagatgcaatgtgaacaattgcctcaaactcctacctccaggacttctcaccatgatgaatcttaaactgtgagcttaaagaaacctttacttccccaagttgcttttgtcaaggcattttccccctcagcatcagtagtaattaagacatagttgggtcgaaatacaagaggaaatttcagagcctgtcttctacctcggctggggaggagactgtgagaacagattctgccctgcttcaaaccaacatggtgatttgggcttctcatctataaaatgggaataatgatagcattaaactaataaggttttatggcatagaaaaatcttccatgactaagtatttaataaatatgttataaaggaaaaaagatagaaacaggaaagaaggaaggaaggaaggaaggaaggaaggaaggaaggaaagaaagaaagaaagaaagaaagaaagaaagaaagaaagaaagaaagaaagaaagaaagaaagaaagagaaggaggaggagaaggggaaggggaaggggaaggagtggtagtagtattctggaggatcactttttcctgtggttcccctttgcacagccacagactgagaggccacacttgaaagagagtttagctgataaaatagcaagtagcatttgggtcaaagggaccacgagctcctaagcatggacagctacacgatgagacattttcccttgttattttgggatgggaccctttacagcttcagggttgatcatatcaagtgggaagtgagggttagcagagaggaggggaggggaggggaggggaggggaggggaggggagaggaggggaggggaggggagagggtaccccctgcaacccccacaggagaaaaagccagtctccccatagaagcatcttggagggctggcttacagtgaccttttagggagtgggttaagggtgactttcatctgcccatccaatggtttctagctccagggtgctttagtcatttgagaggaaaaaactgtcctctggaatctgtccaatactaaacactactaaattggagaaagagtgggtacaaacaaaacacctcataaaaggggcagaggagactagaaccaggcaaagctatagggccaaggcctctgaaggggcggcaggtccctgggtaggggtggggtaagtggagagacagtcccaagcttgactgaaggcatagtaggtacagttccattcagactcgagggcagacccaagagagcaagcatccacagttgtccagaaggtgctgtgacataaacttacacgttgcccctggatttcaagtatgaacagagggggtggctgctgcctaatccctcacaacaccatgtcaaagatccaaagaacccagtgtggtcctgcttccagggcctgcagattgaacacagaggagtcatctccttgcaacctgcagctctaggctgatgtgagtgtggacgagagagggagagaacttatgcttacgctgaggatagtggtcagtgaaggatgtgtgtgtgtgtgtgtgtgtgtgtgtgtgtacttcaaagaaatcctagtaagaatagtgtgtacatgcacaacaccagggcaaatgctcccctcccctcatcccccctcgcccatctacctacttctcaccaggttggggaatgagacttcaaatcttttgctcattagcctggaacaaatttacacttgtcttagggaacatgaaaactgtttccagtaattttagagaccgtgtgctcgtcatcgtatggccacacgtgtgcaataacagagcacacagcacaccctgggacaggaataacagttcttttacttagagaaaggaaggataatggttacttagaaagtgtcccagacaagctgtcaaattgaattcagaaacttggagtctgactccagggccgggctggctggctggactcccctgagattggggtttcctgcctgccagggctcagagacaacgattctttgtttccagtttctcaatctctctctctctctgtgtgtgtctctctctgcctctctgcctctctgtctctctttctctgccactttttctcgaaaataagtaagtaaaaataaaaatttttaaaaatcaaacacatctcttaaagagggtcagataggaaacagacaagacattaactctggattttttttttaagttaaaaacaaaaccaaatacaaaccagagagagaaagctactgtttatctataatcacaaatcttgcctctggaccacagaaatagctgagaaacacacaattacacaccctcacccacacacaagcacacacacatagatacagacacagacatacacagacacagacaggcagacacacacacagatacagacacagacatacacacatacagacagacaggcacacacacacacacacacacacacacacacacacacacacacaccacatcatttctattcttgtttctatgttcacctactctcccctccccatagactcacagtctgaatgtgggcctcccaagagcacgccaccctcgttcactgtacacaggtgtggaatgcagacattctgctcgtttaactgtcctcccactcagataaaacttatcattgtctttacagtcacagaaaaattccaagatacataaaagggaaaaagtccagtgaagccttactggggcccattgctctgctgaacaattaaaagccatggccaatctcactttagctccaccccactaccactgggccttagtattttgaggcaaattcctggctcctgctttgggctccatacctgagattccagtctcaccatgaagtgcctaagcacattgtctccagtgctggagacctacccaagggtcacacatgccacccgctgacactttgttcacgtgtatagggactcacctttttcaaaataccacccagaacacacgtggaggcatatggcagtgcctacacacaccccagaatcagagttgcccctcctacatttctatatccacatccagcttttccagagacacccctccctcccccacccccacacacattacaccataacctctcggatgatgtcattctgaactccgatggagagggtgtgtgcaggaggcagcagggcgactttctgagactctactgctcatctgcaggtgtgattggcgccccttggctatcatatttccaagattctggaaggtttattgtatggagcaaatcctccataagtcagagaatcaatgagcaactgggagaaggcagaacgactcacagaattcaggtccattctttactaaggcactgaccacctacatcctttgcatgaacacactgggccagggagatggctcagtgagaaaagtcacttgttactaaaccttgaagatctgagttcaaatcacagaacctacatggtagaagaaaccaactctgcatgtgttgtctctgacctctgcccttgagctatggcataccacccataccacacaaaaggtaaactaatataatactaaaaagtcctatacagcttggatctctcatatactaaatgcttgtggtctgacgtattttcagtcttctgtagtatctttcaggttagggtggctttggctggtctcaaccattttatggcctttgattcttttggggggtgttgttttgtttttgttgttttgtttttttgttttgtataaaagatattcagtaggtattttcaactgtggctcttccttccttccccttggagatcttgaatgtgacaagtgactttgcatttatgaatgtgatttgacagcacttcctgacatcgcctataggggtctctccctaggaaggttttgagcagcttggcttctcagctatggtggagcatcctgcacagcgctataccatccattagagtacaatatcttcacattgttagcctctggtaaccctcaaatatatttccccaacaataatgttaattactattaaattcgggtcataaatcataataatgaactgttatgaatataatttatcaagcatttttggcatgtcagacatcatgctgatttacaagggcatggaaattagcctcactttatacatgatgaaatggagtgttctgacttaatcggaaacatctcccacaggctccgagcttttggatgctcgctgcccactggatggtacaatttcattgaacctttaggagatagagactgtttggaggaagtggatcactaggggtaggctaatgataaaggctatagcttaaccattgaatcttggtccaccaccatgggatcgcccactaccaaatgttctattcttctcatctctgcgaaacactccctctatcatgctttctccaccacaatggactgaagtctctccaaaaccgcaaagtttctatctcccctgtcaagttgtttctgtcaggtattgtgacagccatacaaataatatactgagacagaaaaggcaaacccttgcccaaaatcacactgcaacttcattagtataacattgaaagaggagctgggtgcttaccttaggtgagtggaaaacattcattaacaaatacttaagatgttgagattaaaatgtgggaagcacccctcccacattttatggggagcaaatcaaacctatgttgggtagagtcttttttttttttttaatatggaacgcttcacaaatttgcgtgtcatccttgcacaggggccatgctaatcttctctgtatcattccaattttagtatatgtgctgccgaagcgagcacgggtagtcttgctttgccccaaatatgggtgacatctaaggaacattgggagctcttggccctattatccttaactgcaggacggggacaagaaggtagcagctgcgatctcatggtgatggtgtgtggataatggataatggatgtgaaaatatttggtaagtagatactacagaagggttgctattccatgcttggcccttgtccttggaattcttgagaggagaggctctcttaagcatgatccataaatgggcagctgggcatccagcatatgtgtcatggggcgatttagcccctctcttttcaatccttggcaagtatgaagacagactttttatccatcagtcaaggtaagtgccagtaatggagcttctgcaggccatctacccttggcagctagggcagtggttttcagtttttcaccttcggcatcaagtctcaaaggctctaggtgggggcctagaagctcagagctccgccaggccttgtcagctatgaggtccagaagttagtgaacaaggagctctatatccgctgcctgttggagagctggaggtattgagatagatgcaggatgagggctaaggaaatgagggccttaggcatgtaggggagctctgaagttaggtgcctactcttgcctattgtgggggcaaggagcacttgcagagggccctggggcaggagctgcccagaaaaccaaagagaaagctgggaccttggatctaccacccaggatcagcagtcacactggatttcagtgtgcaggacagggaagaagggagtagggtcaagcttggctctagaaggcttatgtggaaaggccacttagtctcttgagcctcagtgctcccccatatacccaagttagcaacacatgatctgtttttagagagccaaatgaaggcatgggagcagggagtttctaagatgtaagatgctaaactcatacctagttgtcaataacagtaataatgacatcatcaactgtgagatgtttcacccacccgtgcttacaatcagtatatccacaggtctttgtctaggatgacctggggacagagaaggtcagaaggatccagaaagacctggagtggccctggatgtgccggttacgttccttcagtacaacgaagcagggcttgtccagctagaacttaagaaaaaaatccccaaggcccccgtaggtacccagtagagatttagaattaacacattatgtctgggccttagcctcagtatttgttgttatttatgcatttaattttttaaaaataaaatttaccgttttaaccactttcaagtgtataacttagccacactctgcacattcaaagacagtgaaatcgtcaccagcttccagcttcagtactctctctctgtcagcagtcaacgcaaagcacttctctctacctgcagcctctggcagccagcccccatttccatccagtgagctccagggctccaggttgctccagagaaggaagttacagaggacttgtccttggatgtcattgttttacaaagtctacaaggggctctctgtgcccttaagacggaaggctaaggtctagtagaggctgggtatacatttgtttctgaaaagggaacagagatgtagctggaggcagcagtgaaaaactacagaggcagagaaaaatgttgcagaaattcaaatttctgcaccaaattacacttaggaaaagatagctagagggaaaagactgtgtttttgaggaggaaccttggcaataagggccattaaatcatacatattttaaaatatttcaaatatatagtgactgtaagtactttgagaactcagagtgatgttactaagcttatctgcaatgtgtaacaatcaggtgaaagacacagacacatccatcacgtcacaaaagtaatcactggggccggggagacagctcagctggtgaagtgcctgtggaccaggcatgagagtccagactgggatccctggcagcctctagaagccatatgcctgccacagtgtggctctcaaatcccaaagctaaggagggagaggtaggaaggattctggagctcactggacagccagcatagctgaatggatggcttccaggttcagtggagagcaacccagggaaacacctgacgccagcttatagtctccacatgcatgtacacagatatgtgtgcgcatgcaaacatgcacacgccctcaaacatgtatacacacacacacacacacacacacaatcctattagctgttttgaaaatattgaattgactgctgtcaatcattcttttcctactctgccttagaagctgttccttcagctgcatgaggtccccactggcccctcaccctctataacctttccattcatggccttcccagactctggtaacaaccatttctctcttatgacagtggcttaagtgaaaggggaactttccttaccatactctgaggggctacaaaccattcaggggtcactttcatgttgtcccacctctctgcacagaaaggaaacaaaaacagcggactgactcacagaatggtgcaaagctccaaaacaaagtatgtacccgcaccaggcacactccaaaatcctgtttaagtgacagccgaggctgctatggaaatggttgacaataaccgctgtcttcctgctttaagtacattaaacttgacaaataaggtagaaaatgttcaatggttccaattgggtataactgagactcacaacacatttacaggtctgtggaaattgagttttgaaatgttgtcttacgttctacatacaaataaccctgagatagcttcagtcagtgttttaggaggtaggcaggctagaaaggacgatcatgccattctgaactaaagcagcactctagttgataagtaccatgaagatacattaatagacttcatctcctcagcttctcccatttgcgcctgatgccagctagcacctgccctttgcaaagcagggagcaaaggcacccgtgggcacacacccagctctgattgagtgccgtgtgtgcctcttattcaaagagagacatagtcaaggtggcattgatgtcttctatttctttttccatttaatattaaaaaaataaagatagctattagggaagaagagaggcagagaggtgggaagagggtgaaaggggggaggagtttgttagctttgtattgctaatgtactttattttgtggcaggctggctccttcagccagactacctcaaaagggggaaggcagtcgcctaagtggagagctttactgggaacaaaagatgcacctgcaaagcactggcttaatcgtctctagaggccagggccgaggctgggagataaatgcccatcaccacctgaatgggggcagccggtgctgcgtttgcctggatgctacagtcaattcatttcagaagagggttgctacccagtaggagctggcggctctgagcagcctgaatgaggcggcagggagacaaatgcactctcaacacaaaagggccagcagaggaggggctcagcctggcaggtagagcccagggccagggctgcactgaactcctcagcaggaaggaggacttggttagtgactgcattgtctgcagaccagtttctcaacctaaatcagtatttaaaccagtacgaacagagcagatagaccattagttctgtctacccaaaagtctcattggttaattctgatggtaccagcacgctgtacagtaaatcctaattcaatagttcaaaactcgccttcccttcctgctcttcccttcacgtccatctttcttctttcttttccttcccatccttcctctcctttctccctctgtttagtggcttatttgtttctttctaaacctgcaagccatggccccattgtcagccatcctcagaagctgattgctttacagtcaagacttgaccctccctggaagaaccctgaacctgacgtgagtctgaggacagagatgtgacaaaaccagggaaccagacctcagtgtattcatcatgcaaataggtattctctgctataggcatgtgtaacatgatggggcaggagatcatcagactgtagaatgagtgggcagagcttcaattctcacacacaaaaatatcattcatctgatttggggactcggtggccaaaacaagactaggttgggtgatagtttgtgtgtgtgtgtgagtgtgtaagtgtatgtgtatatgtgagtatgcatgtgtgtgtatgtgaatttgtgtgtgtatgtgtgtttatttgtgtgtttgggtgtaatatatgtgtgtgtatgtgtgtgtgatcatatgtgtgtatatgtgagtgtatgtgtgtatatgtgagtgtatgtgtatatatgcgagtgtttgtatgtgtatatgcgtgtttgtgagtatatgtgtgtatgtgtgtgtatttgtacgtatgtgtatttttatgtgtgtatgtgtgtgttgctggatcaaaccccgggcctcacacatgctgtgcatgcactccaccagcgagccggagcgtcagtccctgccaatgaagactctgagaagcatccttgtggtgctcactaaaaccattttttcaagaaagttttctttctcgctgatcaaaaccaaattatatcaaatgaactgtttgactaaaccaaccccaaccagaacaggccaacttatcctagaccaaatcttcagatcaccactttaaacatgaactgaaatgctaatttttcttttaggaaacaaagaaacaaacaaacaaacaaacaaaactttataaggtagacatacattccattatcttcaccaggagagcccccaagtgtcagcttggaaagtcagccgattcattgttctctaaggacagtcccctttctttgggtgggggtgactttaatttatattcttgtgatgtttttatgagatctttcaaagcctcccttgtagttctgaaatggtggcagaggaagaaaaacatggtctttagaaagaaaaaaaaagtttgctttttttgttattgttttgttgttgttgttttgttttgttttgttttttgttttatcttgtgtcctagaaaaatagtttcccgaggaaggaattggtgtccagacatagcatcccccacctgtctgagaagtatggacctgtgcggtggtgagagtggagggaacctgggcgcatgagaggacagactcaccttccttgacattcagtcgtgaggactggtctgtatgggaggttgtgttataggccagcagtgaacctgaaatgaaagtaaaaacagaaacatcaagcttcctcggtctgaatctagaacgttctccaaaaggcctgtgtgttaaagccaaggttcccagcatgttagaattaagatgtagaggaaactttagaaatggggccagagtaggaggctgctgacccttgcgtgggccgtggattgtgggaccccacctctgggatgtcgatactataacagacaattttctcagtgtctagaacagcagatctcaacccgctggtgtgtggtcttctaaacggaagctttgatggaaacgtctctgcaccaggtccagtggagctacttgggatagacgattgtttttctgttgtgattgcatgtaaaacatatgttcctctctttcctcagactagatctgtccttttgtttaaagtgatcccaagagtttattttataaattggaggcatttttaggattcctctcatgattctcctggggattttttttttaagccttcaaaataagggctgggatctgcttttacaaaggacgccatgagctcaacacatgtgtttgaggctaccaaagcctttctaagcacaactcttctccctgcgacatgtggccaagggaactgactgacggtcaggctgggaatggcttgtcagccatgtctctgcttagcctccagtcaaggaggggctgggaagtagaggggtgtcccctttagctacggatgctctggttgaatactcagaaaatatgggtctaagcagggcagccaaagtcacctcttatgggacataagacctttggcttaggtacctatcacttctaggtctcagcagttcctaggtgaaaaccaggaggtggtgggtaccatttagggactgctatatgccaaagtgcagatatgtagattacataagggacacagccacccgaaggcaacattccatcttccaagaatattagtgacaaattcatcttagtctaagctctcctacttcaaagtaacaagtttatttgggtatagctcccctggtcacatgtccctcgtctatactgggcgaaaaatgacatctacagaatgtggcttcaataaaactaagctcagaaggtgtgctgcagagatcctagcttgttttaaacattcagcagaggctagcacttatcatgactgctttcagttacacagaatggaaaccctttacacagagcttgcgggcactggccttgctggccggctggaattccagctagggatggattctgccgcagtgagggataattctccgtgactggacagagcttcagaaatggaatcaaacgttccaagagaataccccaaacctctcaggggtaagagcaagaatgtctgtgcctcagtcccaggcattttctccctcaggcagaaccttgctgctagagcaaataaagaaaaataatggtctccaagcagcaaaccactccagtcattagtacaaagttagacagagacggagctcagataaaccacatttattaaatttccccccatggtcagagttcctctctgggcacacgtgaagccacaggaaactcccagaatgccaagagaaagggtcgcttgacctcctgaaagcctgcatgaaatacatatttcatggtaacctaggggagagattttgccccaagactgtcttagttcaagtttcacaggggaggggcaacctacatgggggtggggctggtttctccccagggagacacattttcttttcactgggttttctttcaccaggttctcaggatgccaagggtgccccttgtgtctttttttttttttttaaattacgttaacttgccctgttacagggaagtccttcctggagtctggtctcccattggaggttttgagtttcttcctcctgctctgaggatctgacctaagcagttctattgctgctgagtcctgaggaatttcctgaaagcaagggccacaatcaatggctatataggacacacacacacacacacacacacacacacacacacacacacacacacacctgtgtatactcctatacacgaaggagtatgtgcccttgttcaagatctatctatccaccttggttttttggggtacagagtctattgctatgacctgagccagctgataggtaaggctggctgtccagtaagcttcaggaatccacctgtcttcacttccgcagtgcagggacaactgagacaagtgtatgctgtcacaactggctttttccacgtgggttctggggatcaaagtcaagtcttcacactagcatgcctggctctttcttgactaaaccatccccccttcttcccagacactatctctcttacttagtccttgaaggggccacccaaagcatgcgtatgctagcctcctcccacagctgagatcaacctttagggaagtcaaggcttacgatcacacagccagaggaaccagagccaagagacaagatcaactgacaggctgctctataagacctgtcctcagttcagaagcaggagcatcctttaggttaaatcaatacaggcaagatgggcaagaacggatgcacgtttattccagcactccagagactaaggcaagagcaccaccgaaagttccaataggctgaggttcacagtgaggctgtcccagaaattataaacaaacaaacaaatagtaaggggggtagtaaaggcagaagggatgaagggagggagggggaggggggaaaggagggagggggagggaaggaagaagggaaagaaaaggtgctggaaggtgagggcaggtgtcttgggggctagttgtaccttgtgattttcataactccctgcatgttatacctaatttaaagtgttgttcactctgttatgtgtgtgtgtgtgtgtgtgtgtgagacaggatacattcatgtgcacatatatgtgtctgttgatttgagacacattttgctctaaaatgttggtagtgacccggtccttcaagattaagagctcgaggacaagattactttgttttctctttttctttcctctgctctcttttttcttcttcttctttcctccccctcttcctttcccccctctcctcttcttttttctttgttaagtcagattctcatgtataccaggttggcttagcagccattacacagccccaggaccatcgtaaatgtctgatactcctgttcccaccacccaagtgctgcagatgacaggcaggcaccaccacaccagtttctagggtgcacacgatcaaaaccagagtgtcctgcatgctagccaagtgctctaccaactgagtgacatccctagcccagcaaggtcgttttccgttttgggatctgaaaggagttagtaaagtgaacataggatgggacttgcagatgggaagtccttagcttcctttagctctgcggactctctaacttgcttttcaaactggacacctggagcagtgtggacaggggacctggtgccagagcctttgtctctggctccattcatgttaccatagaacccagcagcatctaccccaacccaaccccagccagccagtcaattcctagctcactttctttgtgctacagccagccccagccctaaatgcacactggggagggaattaaggctctacacgctaaacaacaggccagctgactactgagtttcaggcaactgggcactttatcttattggaagcctgccttcttttcttggcctgatccagatggaaagtttaacacttccttggcttaatgactgggccatcacctttgcatggccatctgaggttgcagatggggatagcacagagtgtaaaatgtgttttccattacgtttaaattaaaaatgggaatcaagctggagtccttttctgtggtgtccctgatacttgatgtatttcatcctctggggttgccactgtctgaaagtgtgccttcttagaaggtttcccagctcaggcccagatggacattccactcacttcctttgaaaacgaacaggagcaacaacaaaaccccttttcttctgctttgggccactcatcccaggagcttttgggctcccagacatccccaaactccccccagtggctctgtgactgaactgttagttggagacagatagcgttgcctcattggccttggcctgagaagggactgatctcacttgcccattctcagctgccaacagtgtctctgtccagtgggcatatctgggagatcctggcagagctgccaatcacacccagagtctgggggaatcgaggaggtcagggtgcgtgagaggagggatttggtttgattggcttcactcctggaggctgcagaggagttttgcaaagcctgcatctattggtgcaacacaaatggaaagccatatggggacattggttttgccctcaagttggaggctggagaagagattggccctggagatgagaagggagacaaatgaggtgtggtctgcctgtgtcagcatcttaattcaggcatattcaagcatcctgcatgagagtcatcaagtcctctgcagcagtgaccttagctcagactgaaagcttcagtggtccgaggactaaaggtaaggacaggtgctttgtacatgccagataccgttggatgggctcctgaaactagccagcctcagttgcttcggtcaagaaatgggaatcaaagttttgttcatggtgtccacaagggggtgttctgtccacaggaagtgaatgacacctgggctggtgtctgcttgtgtctcagatatttcagctgaactccaataactgcaggtaccctagtcagttctagtcccttcatctctttcctaatgctacacaggtaccccatctggaacagccaaaagaaaggcccagatgtgaagagccagaccctctaggcagggctcatccatgaggacattgttatttcttccttatcattggccattcctctttaacttatgattaatctttgagaacttaaagtagacctttcttcccagacaacaagaatagccaactgtctcttgtgaaagtaaatttgatgcaagaatgcagcgccctacaaggaatctaaaacaaaaaaacaaaaaacaaaaaacaaaaacaaaacaaaacaaaacaaaaaacaaaactcagaaataagagattagaaaagtgcaatcaaattttacattgtgtgtgtgtgtgtgtgtgtgtgtacttgtatgctttagtgtatatgtggatgtcagaggccatctaatgggagttggttctgtctttccatcatatgggtcccaaggattgaactatgattgccagtcttagcaggaagtatcttctcccactgacccatcttgctgagccaattttgacttccatcaatccatgctttggctagtccccagtttttctgtattgatctccctttactctacgctgtgccctacatctatgttgtgagtctcagctcttttccctctatgtcttgccaaaaggggaatcatttagccccagctgctccccaacaaaagcccaacacaatgatgctaagaatctacacttgttcctctggccccaaccttgcagccaaaccctggtctctctctttatcatgaaatagctcatgtaattcagtctggaaaaacaaaaacagagaaggcttgaaggcatgtctgttagcaggcaaaagttttcagccatcacagagcagacaatgtctgacaaatggcctcctctagggttgatacagccaagtagtacccaataaccagggtcttagaggttagaatcctaaaaaagaaaccataatttgaaaaaaaaagtcagaaaaaatttcatgaagatcattttaaatccaggtgcctcagaaggttattacaatctgtattacatttcaagaaaatttaaatttaatgcaaccattatcatatttgttttggcccacagactcaactttgtgtcataagcacatcttatgtgtaagggtaggtctgatactgaggtcctattccccaattggttcttgatctgtcagtaaagaaagccatgggccaatcgctagacagaaggtacaggtaggacttccgggtcgctggattaaaagggagaggaaaggaaggagagggggagtttttgccaagccttggagggagaagaatggagcagccatatgaggtcttgggagaagctggggcctgtggccacaactacaggtggttggtcagggatgtttggcaggggctagatggaactagccactgaagttcagggcaggtgggaggtacagagctaagagtatagagaagtgtgcattttccaggcaggagatagtaatccccagcaattatgtcaagaaggcaagttgaaattgaacaactgtgtgtctgtgtcttttgttttttaagacttacttctttctttctttctttctttctttctttctttctttctttctttctttcttcctttcctttcctttcctttcctttcctttcctttcctttcctttcctttcctttcctttcctttcctttcctttcctttcctttcctttcctttcctttccttccttccttccttccttccttccttccttccttccttccatgcatatgagtacactgttgctgtcttcagacacatcagaagagggactcagatcccattacagatggttgtgagccaccatgtggttcctgggaattgaactcaggacctctggaagagcagtagttgctcttaatcattgagccatctctccagcccagtgtctgtgtctcttatctgcagattcatgggaagctgggagggggctggtagcatggtcacttcctggagcaaaggctggtagagcataaaagtacatgcaacacttatgttttacctccattttggtggcaggaaaactctccctgtgtagaactcccaactgttatcaccacatgcttactgccctttcaaaggctttccaaacatacacatgtactacctcttctcaactctggaaattccttcatagcaaatcccccttctggaaacttcgtgtgttgtatgacatttttcatagtgattacatgtgttcttaaaaggagagactacatggtttttctcactagcctccaaacaccaaactctattccctgctccctctatagctgctcataccttcatcatgccttgttatctgcccttgtctactagcaggcttgccaaggcttgataggaagcagtgactgattaacagtattcctagaccttctgagcagcagatatatgcctcatgtcagtatctgtggctcagattctttggtgacagaaggaagaaatagaaacttgcgctgtttacgggttggtcagaaatccaggcctgaaagtcacatggtcttaatgggcttctcttttatgaagtccaaacgttcttggacatggtcctcacaaagcatttactgtgaaagccaagattattggaccctttgtgtagagctcactggagcttctgacatttctccttccttagggatcactcaacctcttgcatagatgatgcgggaggagcctagaagtcaggcttgatggcgctatgctcctggcctctgctttctacactcatgctctgtgcctactgcctctcctgcttgtgcagatcatggcagaactccgttaaaagatccttttgttctttccttccaccaagcaattaaaggctgagaaatacaaatcattattaaatgctaagcatctgaaagtcaggagagactaagtagaaaatggccccttcttagagtgttatttcttggactgacctcatggtgcagcaactcagacatgaggtcattgcagtggagctaatgtgtcctctcccagcacgaccagatgccttagagaggtggcaagatagccagcccagaggcacccatggaaacttccaaatgcattttttaatattttaacttttcattttctagcccatgtgagtagagtgttgccctgctctctacagaactcccttgcactgagacgatgtattttactgataacaactgaaagcacaatggagatcctatacaaagtgaaccattccagagcccgtgaacccacaaaaggcagccccacagtgttggccgaggtctgagaattcaaaggtgccttaaaacaatcaaatcttctcaaactcttacgatacctctggcaaactaggccgctcatagaggacagtgcatcttgttctgccccgctaatcattgacgtggctggctgtagggatgctctcatgcagaatgagcccatgcctgccttcctgtggcttcagttcatctttgcagaccactgagctcacttccaggcttggggatagtctggatttctgatggagagttaaggctgagtcactagcaggtccataggtattccctttcatatctatcaaaattcacatggaactggtgggcggggcgtggtactagggagcctcctattgggtagatctttctttactaagctttccctgggtttctgtctgggaaagttttcagtgcctcctaacaaacctgggccactagatgctcttgttgtttcgtggcagtgggcagaagcagccccataggttagggttgggcatcaatgtgaatccagaataggaggagtagtctgtcagctcccacaatcttagatctcatatctatgttcagaacttccggtaagaactcttaacatttccttagaaagcctccaaccagagattctatctctgtacaattttggttagcagaagcttctgaaagagagatcttcccagagcctacctagtagctggtgtcatcctccctatgtcccaggtctctgtgagttttccattttttatctgtttcctttggacactccactcctggatgaaatctttcccttgcaggctttgtaggaacacatgtgaccttgatggggttcctgtcctaaggaaactgttccttggcataggtcttccatgactggtattagggtatccttcccttgggctggctcttggggacctggcaggacctgctcccaagccctggggtgtacatggtacttactttccctgaggtaactgaggtgcgacaacagcacttctgtgttgtaggcggaggtggctcggaggaagtcctccttgttcattttacacaattccttgccatccatgttctggaagaaggaagtgtcaatctccatcaatccgtattcctttatagcccactccagccactgtcgaacgtgctcctgtgtccacagtgtggggtctgcagtggagagataacaacggtcagcatgcatgcctgcccagcagcctaggctcccctccaccctctcttctctatcttctcctctttgcttcttccacctctgtcctctttccccacagccccctcttttcttctcctctttttttgctctctcctctttcttccgtcttctcctttttcctcttctttttctctcactcctgattcatggtatctttaacccccccacccccacccatctttccttcctatgcccctctcttccctcttctcttttctttctacctcctctctcttcccttccagatcgtcccctcagaactctccgtctggttccatggcttctgacactgcctgaaccacttagggctgagaaaggttcttagctgcctcaacacataccctgacaggatggtgtttaaagtttctggaggtcaagtgatagcttggcccaagaaatggtgacatcaaaatgaaaataatccccagtaactaacgtttctgggaaggggacccatttgcatcttaagactagcagtgaattcaggagggcacacttatccctccggactctccggaagggaaatatacacaagcctgcttttcctgtgattctgtcctggcagctggaaaacccaatggcgttactgtttgacataaatccaatctgggtttcctccttttggggggggggacagctgtgttaagatttctaccagaccacccctaaacatttttaggatatttaaatacttaaagatgagaaatggctctagagacagaaacctctttaactgtgaatgagcggaaacaggacaggactgaggcctctgctccaaacctgccttctcccagccccctctgtttcatcattccctgaagcatcttctcaacctgctcagtctaaggtgggagatgctataaatgacagacttccataggcatgctgatacattcaagcaatcccaggactcgggaagcggaggcaggagggttgagtatttgagactctctctctctctctctctctctctctctctctctctctctctctctctctctctctccctcacacacacacacacacacacacacacacacacacacacccatctgcataaatatgcagccatcagagcaatacctaagcaatgggttgtgctggtagttcaatgaaccttgggttgaagggtctagggtgaatttggagagtcctggaaggcttcctggagaagggatggtattttatattacagggtgtctggttgctcctgcttctgcttttctgcttgattgtttcatttagcatgcttatttagcaggaaaaacgtgtactcctcttaaaccaactcatattcctctcattctagaggctgcaaaagatctaggctaagagaactcagttctaaatggccagcaatggtggtggggagggagtgaggtgctgtgatctctaggggttataaaagaaacccttgagaggttgagagggagcacagaaaaaaatctgtcatatgtcacagcttctgtatgtcatactaagactccaagatgtacctactgagtaatagtccatctgtgagatcctaccacaagccagctctctatctgacccatttttttctctcatgagaatctatgaaatgggtcttgttatacccattttgtagatggctaaggaaccgtggaagttctgccttcgtgactactgctagggtttttacagaagccttcaaagatgtcacatagttggagaagcaggccccttgaacacccccccgccccagctttgtcttgtcaggatcccgccttaactcatttggaactgcaaggccttgttccaggacccggaagatctccccgagctagccctcttgctcatgttggggtttgtgtctatcagataaactcctggttctgtttccaaccctctacttttcagaaaccatcaagcaagggttatagatgaatggaaatctgagaattcaaaaggagatgtcccacaggggcttggattatgtggtgtatcatttcatccatagcttcccctagttccttacttgtaggaacttactagagtcttagactgtacattcaattttatgccctatattttatttattttattatttccgctcttcgctttgggctctgtcacaatgttaattctctccctctccagtaaaaggaattataaatcttccactctggatcatgctaaactcttccaaatgtatttcctggacgatttagcccttgttccttcccatctcgatgtggaaatggtgattaactagaaccctcatttatacttgtcttaaaatcccgtcataaattcaatcggttgttccactaatgttttattgccttgatttgtggacttgcccaagtgagactttcccgtgcgtccaggaggctgacctggaggaagccagagcgtctaggagtaatgcatacagatctaaccagtaggagaataaccaagcggatctaaagctcatgacttccttatgccaaatgctttgaaacagcatgatataaacatgccagttttgttttttactgctatgattaagtcggttcatggaagagccaccttttgccaatccccgtaagaacattttaactacctgaagggtagagagacaaccgaacagtctgccttatgacgaccaaagcaaggtggtgacaatcacctggtcctgaggtaatctccattcctctaatggttcatcccctaagagttccttcttaggctagagcaggcgatttggatagcaaaggcctctcctggcctagtggggtggagagagtctctcaccacgtctgcttaaaaagaatcacggcctcaaaatagagaagacgcacctgagctaaccaccaccagctgctctcctgagggtggtgacaaaccaattagatgatgtgacagaagagaaagcacttggctcctgtgaaatctggctgaataaagaccttctggccaggagtgggtggtgcacacctatagttagttcccaaactcagggggcagaagcaggaggattgccgcaaggtgctgcctggcttacacagtgaattctaggacggcatgtgctacacagtgaagccccttctcaaacagcccaaacaagcaaacaaacaaataaaccaggtgacgccttccttgcgatcagccccttatgcttgaagaagattgagcccaggcagattttagtcctgtgagctgcaagagcccttcctcttctgccttcatttctgataccttctgcactctttcccatgtggaatttagcccagagctcagaaatgtgactgtcacactaggatagcagatacaacttcccatggaaacaaacactagggacaggacagacttgctcatcacaaaaatcatccttcagatcaacaagacaaactatcgttctaagacacaactgcatttacacatttacaaatggaaggatccagcctctctggtgaagttattttggttaaggttagttttagctcccgccctgtaattcactttattcaaactcctgacattctgccccttccacctggcacccactctaaagtggcagtttttgaattccctccatacctaggcagctgagcatactgggcctggcccaggcagcatccagccaataggctagaggatttaacaatagatccccccggccccccactccgtaaccaacagcaccaatacctaggaaaaaaggctatttctacataatgacataacttgtggcacacacgtggaggcgttctgtttgttaaatatagttatttctattttaaaactgaaagagttggctgtaattttgggaaggtggaatctagcagaaggcaggaagtacatgcctgagggaagggtggacatcgggagctgcacttctcacaagaaggaatggcggggtgagcagccttgcctctgcccaagattcatcctgggggtaccaggctgctcactgaaaatctgccttgtgttatgtttgacagtggggcttctggaatcagcatgccagggctcgggtgacatttgaaatcctgccttggagggtagctacgtatgatgtgcaactttccctggtttgagtctgccactaaagactagggtgctgggttttcatgttctaagagatgggccaaccttccattacagcccctgaataatggaagtgtgggcgttggccaggcagctgactcccaaggtacctgcaggcacaatgactctccgttcgttggtggtcatgttgggaggaggggggccgttcttctcatccatgtagctattatagttcatggggttggcttcgcctccgcccaccagcttgttacatttgctgacactgcagtccaccggagactccctggagtgagaggaaacaggtcaaaagaagccatcattatggggacatgtcactccagcctcaacagaattggccagtcacttagacatccctgggatgatgacaacaatgacaatgaactcttagtgccaccttcctcgtggaacctatcctgatcctgtcataaataccctgtgtgtcctaggtgttcctgtttcaggggcctgcagccctcctccactgtctgctgtgtccagtttcaacctgattgccagtggtcaacacttacccaccttcactagtccttgtaatagataggccttctccacaaacctatagacgctgatgtctaccttggttacaggactgagtgagtccagcatgagatgctctgtgcagcctattaccctgtctcttctgtttcttgagatggtatcagtacttgctagcccagctatttctactgcatgtgtaccattttaatacatcttcataagctgtttgctttatctgagtttcctgataaccctttcagatgtgtggagcaaaggttactacgtcccttttgtggttaccaaaggaaaggtgtgcttactggtttcacatggctagtaaagatggatgcaggacccaaggtcccagtgttaaacttctcaactaaaggccacatacagaggagctgggtgctgcaaagaagagtaacccctggaatgcattgtgacctgttatgtatgactcttgtagcatttttacagctctgagtagtaaacacacataggaagcactatggaagtgcaagaggaagtgcacatatggaagtgcacataggaagcaatatggacgtgcaagaggaagaaggcacattacccatcctggactaagactaagcacagttagcagtggatattcacagcatctggcactgagcaatggtctggaaagctaagctgaccccatccccacccagtggtccactgatgcagcaagtacacacagagtattccacagtgaccttcagtgtagcaccacagagctctcagcaagctggggaagttgccatcccacccttcctagctttcactcagtcaccccaagaagcagaaccacagcagcctcctaaaggtgcagtggatactgcactatggtagtgccagacagcaagcatcatcctaacagcctgggaagtggccagttctcctgagagtgccaaaccggccttcaggccaaggggatgagacgaggttttgattacagtctgccagctctgcacgctaacatctccctacgtgccccgcctggctgctgccctcggtcagtctgctctccgtcattccgcagtgggcagggacagattgagagcccttaaggaacaggccttgcctactagggagtcacccatcccacagcaaggagacagtcaccagcccaggaagaaggggaagagtacagggctcctgagagtcaggcagagcagggagggcctgaacacattcaataaagaaaattaaatgaatttgtttcttaatctgaaaggaaaaaaatattgcagatcacttatcatggctgggagataaatgctccactgagatattagaagtcagacggtaattttttcctgatgtcttaccgaggagaacatgggctgaaaatgaaaataagatgtataacttacacatgttagaatttaaggttttactatttgcctactgtttttccaggcaaagaaccaagacccagccgtcagagtcccagattgttgaaggtttaatgtccccatggcagtcggaggagaggcagtagcacatcggggcttttcaccagcgctcagccctttggcttctgctgttgaaggacttggctggagatgaagcagccccagtcagaccctggtgcctgtgtctaagctgagctggccagagcatactgctgtcccccaggaaactgtgtgcgcacgcatacacattcacacgcacacatttcactacacacagcacacatacataatgaaaacattcagcttctaactttagtacatatgcacatacacacacacacaattcactatgctctacacactttaccacaggcatcatatacacagtgataacatgtacacatatatgtatgtactcggccatcaaaagacatattcacagatatgcacatgtgtgcatgcacacacaaacacacacacacactacttcacacagtacatgcgcacacacacacacacacacttatatacataggtctacacacacaatacaaatatgttcacatgttccacacacacattcacatagttctacatacaatatgtacatacatacaatcatcccataaaacacacatgcatatatactctaccacttacatgtatataatgtatgcatataatgtatgcagggatgcatgcacacatccataggctatcacacacatatagttagagaaatacacaccctccagcacagatgtgcacctatatgctagtgtgtgtaaaacccccacacactcacacacacacactcacacacacactcacacacacacacactctcacacacacacactcacacacacacactggttgtcttccccagattcttgtcagatgagaaaccatccaaataccagagaagcttggagaattaagttggcctgaaaccaagatactggaattttcattggctggtgggggtggggagagtggacagcacacacactttccatgcagggtgcccagagccagccagccaggatcaatggtagcaaaagaggaggtgcctacttcaaagtctcccatttacggatactggagagaagggttttttaaatgttctttttcataggtgtctggccttggaatttctgcatttaaaattggcctctttccaggcagagattagaacctcagaagcacccaaactagtggatctccctgacttggagctgtgtacggtggccatgggtggaaaggttgcttccactccctggagtaaaaaaaaaaaaattgataacaaagaaaagatgagacataaaaccaagcgtgcttggtggggatgaatggcaacaagggtgccctaggcatggccaagaagcaggtgcagaggagctggggccccctgggctccatcgctggcagtgcctggctgaccagtaagtagcatcactagcccacagaagtcctagcctcctccatctatccttcagctgtatgacccctggtggttgattacctgcctgagcgtccctcctggccttctttggaatgaggcccctttcttggtcccaaacagtttccatcaaggtcttcaaagggacttccttaggacaaggacctgatacccttatcctttacccttacagagctcaccctcctagtctagctcagggtgataaaggagaaagccatgtctcactggcttgcacacttgcctgccaggtttgtctctatcctttgcctcagcgagccagcccagccatgggcttggtgaccactgcctacccaggtgaagcccagcataaaagctgctctttaatgaggcagctggtgcctgtgaagagggcttaaggagaacaagagggaggggaggcgggagccctggcggggtaagaggtttggccattcattttgcccatacggctgcagctaatttgtattgagacccgcacttacagagagcaagaggtttgggcccacagacagctgactgtactggggcaggtgacaggagggcctaaggctgccacaatagagcaggaggaagtgatgggtataactcagagcatctccacctcaggcccccgggaggctacaggcagcaggcctcagcagtacagcgtaaccgtcttagacataagcatctattctgtgtgtttattgagcactgctttaagactgctaggggtccatagaagtgtcttcagactccaaggcaatataaagggagatgtgaaaccctgagaggggttaactgggatctcaaacttctcccaaagttaccttcccgttttgatcacagtgcctggagagatcacaggtctgttgagagccaaggaccacccgatgcccacgcagccagcaagggaccactgagcatcacggtcacagaatctgtctgtgtgtcattcatgtagcatgcacactgcacacctgaggaatctaggccgcctttagggtttctgtgagaaacttccatgtgtagaagtggcatgttgcttttgatatagaagtataatttcaagaaataaaacaaaacaaaacccatacaaaaaccccactacctgggctttcaacacagatgatatgtgtcttactccccatgcaaggtttagaattagaaatttaggaaggtacctgggaggctcatcttcctgagagtggaacagggttctctgcatgttcgatgcctcctgataacgctggccagtccagcctgtctcagggcagtgatgctgagtttagctcctgaatgccaggtattaaaactagttctgttttctccctcacaaactgttagtgtttccctcatgcactgttttctccaattcccatggtcgagacaggatgcagctgagagttatttgcaaaccacagcttggatcaagtttctgaagtttatatccaacacagaacctatgggctgtgctgtttggagggcaacccagagcaccggattcaaccacaacaggagtggaagggagacagagtaaacctcctacgacccaggcaacccagacaatctctcttgcctcagatctcagcccctctgaatgaccctttgaccctggtctagagggcttgctgctagggtaaaagggaagagcgtattgcagcttcagagacaaggagtacttccttcctgccagagacacggacatctatggagtgtaaataagcgtgaagaaggaacccagagacccatgcttctgaaagaactttgtagggatgtgctgtgaatcactgagcaatcggaaatgttctgctacatcacggtccactccaagtagattgtgagttacatatttgagacacaagggtcactttcaccttactagtaggtgtatttttaaaattgaaaaagtgagaagccagagatattattacccagcagttaaaagcacttcttgttcttgcagagggccatatggtgactctcaaccatgcataacttccattccaggggatctatctgatgcctttttctggcctctataggcatcaggcatgcacgtgaagcgcatacacatttgcacaccgaactcctccggcgcacaataaataaataagtaaataaataaatctaagaagatgaaatgaatttgaataaattcattaacataacatatcaatatattatgttattgattattatattaaatatattttgataagaaatacatattaaatatattaaatattatatatgataatatgataaatgcattaatattttaatacagccacaagattattatttcagcagaatcaacagtcaccaagatatcttacattttatcatactaagacttttaggtccaatgtgcatattacattatagcacatctaactcatagagtagctccagtcccagtgctcagcaacatggggctagttagtggccactgcatcagagtgctgggtgccacagacctggtccataagccaagaacttccaagttgtctgccctgctctgttttcttctttggagcattgacacaccctcctctacattttaaatagtattgtgtgcatctgtgcttgagcaaactacatgcgtgggtacatgccatggcatgggcattgaaatcaggtgacaactagaagaagttggttctttcattctttcatgtaggctctgtgggggtagaactgaggtcgtcaggcatggtgtcaggcatggtgtctgtcaggcaccttctgctgaaccgtctccattggccctcctctacattttgtgttatgataactggactttctgaaaattatcaaatgctatgcaactcttgatacccaccagatatagaaggtatgaccctattgatgaagatgacacacattttggtcacaagacacaaagaaatagttgggattgagttgggaatcctctccctgctggctggcatttgtggtgccagaggctctatgcaggctcctagaggaggaagtgtaccagtgctcatgcttgctgcacaatacaacttgacaggcattataaatccactggtacaacggtggcttgaccatatggtgggtagccagccactctgtgattggaagcctactgcatgagaggagatacacatctggtaccataaacctggtaaaaagcctgtggctggtggagtcttggacccaatgagaacataatgctgttgtttccctaaatggacatgctgctaagtctccagaatatttatatttatatccataggctagtatccctttcagtctagaacatgaaagcttctttcagagagtgacagatagtgtcgagactcatacctcatcagatgctgaggctaagtgaccgataagctctcagccctaactgggaaatctatattatatacaccctaagcctatagaaccctgcagaagaagagatgaagtgatgtaagagctgggagtggggaggggtgtcataaaatgctgacccacagataaaacatggccattccaaccacagagacacagaagcaatggatactggtggaagactgaacccgtcaacttccttcactgatagaggaagtgctcatgagacactgccccatctgaaggagatattaactgttagttgctgcagaggggagtgttgtttcctgcctgggggatgagctggtaaaagaagggtcttggagtgaaagcaagggagagtaatgggcgaatagaatcacaatacactgcatatatctatgaatcccaatacattgtatatatgtatcttaaaatcatgcaactaacaaaactaacaaagtcccgtgttactcagaaaataagaaagttgcactgttcaggatgagtaatttaaacagactgacatctatgtattcatttcatttgtcttctctctctctctctctgcctctttagccctctgcttctgcctctttgtctctttacccgcttctctgtctctgcccctgtttttttctctgtctctctaaatctgtctgtctgtctgtctgtctgcctgtctgtctctatgcctgtctctgtattttgtgtataaatatatgcatgcagttctatgctggtgtacatacctctggagaccaaaggacaactttgagttttgtttctcagaaaccatttacctttttgtggcataagatctgcagcttgcctagcaggctgtctgtccagtgagcctaggagatccagctgtgtgcctcctcagcagctgggatcaccagagcatgccaccatgcctggtgtttttacatgttatttctctcacatagttaaataatgctaagttaatgctaggtatggtttcatcccaaataaaagcatctttctgaaagtctttgatcctggctctttattgtgcgtgctttgagggtattgattaggtgaaaaccatggctatgcctacctgggtggctctagactccactagatctttacttcagcacagtaggtgagactgtacacccaaagccaggtaaatattcagccagcttatgggaatacttacacgggcttcttccagctagtgtctgggtgactaatgctaggcatgacctggaaatggatccagagtctttttccttgaaggattctcttagctcttaaacagcatcctggagggcccagcagtacccaggtggcagggatgggaacaggtagctcagtgatacagatatgttagaagggaacccatgcttcaaaagtacagggtgaactcagcagagcttgggctgtcctgcctgggcattgtgaccttggggatcacccatatggacatctgttcctcggattctccatctgaaatatggtttgggtactagcatgaggccacagaaggaaaattccatacctgatgcacaagagagcccacagtcccaatgcaaatgcaccaggctatagtcttactgttgggcactgagcacacgtgcatacaaaacagccattatcatactgagatatctgttacactgtgtgcaaacaaacatgctaaaatctgaaagagcctgaaacacatgtcaaatgtttcaggtaagggagactcaactcatacctacatggcatgtccttgaagaagcaacttgactttggcctgctctgctgtgcccccatttagctttttcctgaagaaacacatgaaccctgcccagtgagcaaaagccctgcccatattctagtgagggagaagacaacttgaataacccaccagggagagcgagcgatagggtgctctttcagattcggggagtgtcagggattctgaagaggtggtatatgggcaaaaacccgagagagttgtatgaataaatggagaagaaatgttttagaaagaagggacttggggaagataaaccaaggtagtggtgtgctatggtttccaggagcagctagagtcttgtgtgatggcatagaggaaggcaggagccagggagaatctgggacttagctaagactttagattctgacatgagatgctaaaggtttttgagcaagaaggttactgttgtgaaaggatggatgactttcactgttgcctgttgagagaataggtctcaggcagggaaggggaagagtggagcacagatgtctctgtggcagctgggagagacactgtgggcttggcaggcaatgataactagatacagggtacatcaagactatagactctccaatattagcatctagatttttcagtagggatcaggaacaccttgtgatggtgcaggcagcttgggagtcctttctgaactggcctcatcaccagagggtgctggcagaatgggatcgtggtacagaaccatgacgcacaggcagagagggagaggcagcaagatgcccaagcaatcggaaaggctgggctggcgccagcttagcctctctcgacttcctttctatacggtaacaggttgagaatattggccttctagattagtagggagcagtgatacaagactagatacaagtgtttgataaactacactctgctgagaatggactgaccggaatcatggtataagcatcattctgcatggagggctcaaggctcaggttctctgagctcccctaaccctagaaccctgcagggatggccaaggtcccacttcctggttttagttcatgggatggaagcgtggcagggctgagggttctagagggcagctctgagacagctgcaaggaggaactcccttacagcagcggcagcagccccctccctgcttcctcttgcctctctggactagtttccctcatgactcactttcagttaagcctcccagagaggatgcctaagcctcaattccagtcccaatcctacgggctttggcttcctaaatccagtagacattttaatctagagactgtaccacttgctcacaaagggtgctaaaggacgtcccctcctcaaggcatcaccccttcccacctgcttgtcgccactaactgcatcccctttcaaaggtccagactcagcagcatccagtccccacctctcaatgtttattaagtccgagctcttgtagccatccctttgatatgctctttatgcacctcccctgggcttctgtcatcattactgtcaccctagcccagaacttcgattccttatctgggctatttcagtaacttcttatctttttgcactcctgtccacaatccctgcaggacaatgattgtcacctcatcagctttgtctcatgggtccgatgatgcttagtgtcctggcagtcctgagggtcagcctctgttggtggaataaactggattcctagcttatcaaccaaggtcttgtcttgtatttactcacttgcttttactttcatgtctgtttgcttcaggctaagtggattacctgggaatccactgggaattatcaggtaataaactaggctaaagttttccctcttgtgtgtctgtggtcactaactcattgagcactttggaactagacaatgtcctgggtcctttccctacaacacacttgataaacatgtttggtgttctgactctggcttagacaagagaaagctggtattcagatgggtttagataatttagccaaaatgttgaggtagtgcctgtcgctggggctgcctgacaatgggttggttcgtgtgctctttatccctgagttccccttcccagttccataaacaaggctgtacctggcctttcctaatgaccccgccccactccacccccacacttcccatgtgtgaggctggcttcctggcacacagtctgtctttctcaccacttttccacttttacttgaagaatttttgggtcacctttgctctggttagtgccacccagaggaccttaaaacatcctcaagagcacaggaagagcatcttactgctatgcgttttccttgcaggactggacctggcctaagcttgacagcaaacgcactgagtactgcagtagggccttggggcctgacccatctgctgctttgtgcagatcggcttgacagggtggtcctaggaggaattgcgcccaggcttccctgcttcatgaggactggccaactctggcaggctcacctggatccattcatgtggtcatactcccgcttgacattgactctcactggctggttgatccactcctgctgcggtggcagggggttgattttgtggggctgcccgtagtcaggactccccgaagcagtcatatctgccttggggagatgggctgccgctccgtatgctgaatcaaaaagggactgatcgtcactcaccacagacagagcctcctgcaagaggggagaagagataggacattcagtatcaattgtcacccgagccagcgacaccccaactctcagatatcacagtggcacagggcagtcctctcatgaagctgtaactgttcaaggtaatagattcacagtgtcagcacaggcttacccctgcgtggggagaaaggagtctgaacattggaatggaagaacactagaacaggtgtacttgttgagtgttcgagctagaagccccacaaaggagaatggagacagggtggctaaacacagagttgcaagaggtgataccagtgttggttctagcttccagacacagacagcagcacattttactaactgtgtgccatagccacattgctaggagagatgaaaatgagaatttatcccacaggtgaggtcatggagagccaccggagagcttgtctagacctaagctatgtaagggaatcagggaatccagaacttcagctaggtcgatttcagtatcccagtcagtgaggatgaatagtttttttgtttgtttgtttgtttgtttgtttgtttttttccttctggcttactaggtgaattaaattagcaactgtagttcaagtgtttggtaagagtgaacagtggtgtgctgaggactggctagcgggaatgagtatgtcctgtagatcttagtgttgatgattcagccaaataattcaggaggaagctctgatatatagaaaaggcagttagtgtaaggtctctgtaagagaccatggtttaccaattcatactgtaccatctcctgactcaggggaggcttttggtaatgggttgagaaacatagccttactccttccagagactgtctgttgatcaaagcatggagataagatccccccccccccccactattccaaatcacatttagcagcagggattcaaggctggaggacagtattccccagggccacgcagtacacaaaagcaagctgaccatgtttcagaagaaatggcagccatctataatcgcctcatcatctacataatctattccatgtaacccgactgtgaaggaaagatggactaatcaatgggaaatagctatagcaacactaggcacagcacaaaactccagaaagactagcagtgatgaccatttgtgttcaaacaagggttctgttgggttcttgttctatgctgaattccgcttcctctgaaatctatatatcaaatccctaaccacctgtaacttagaatgtgattccacttggcaataagacctttaaggatatgattaatttgaaattagaatgtgaagatgggctctaaactcaactgactcattataataagagatttggacacacaaagaccctaagggtggctgtgtgccaaggactgaccatgtaaggcatgtagggagacagattatctgtaagccagagcagaaagcctcagaggaagccagccctgctggcactctgaccttgggtttccagttttcagaactgtgagcaaataaatttatgttgtttaagccactcagcctgtggtgtgttgctatggcaaccctgcctttacttaagaacagaatgatagatgatgagacccttttaaatcttgaggtttgcctactctccctacataattcatatctctgcctggaatgccttctctaaagcaaataccctcgctatgtctggacgtccttcattcagacctaaaggctgctggagcccttctggcttcacctgctgcccctgggcagggtcaggggaaggctgtggctctggtctacttgtattttggttcttagatccactcttcatttcggttaaggttctgctctggctttgtgtctcaaacaaacttaaacttttacatagacacttagtgtttaactccaagttgaaaactgtgaagttatggctgttcagaaggctgagcataaatctttgacattatatgggtgtcaccaaagattcatcagagtctctttgacaaaaaaaaaaaaaatgcagaacaagccccagatctgttgttgaaagagatgtcatctaagcagatttctgcggcagagaacagactatgcctctagttagtcatgagtcagtcttgagagttccagcaaaatcatacaatggcagagttgaggcgatctgggaggcagagatggacatggggatgctgtgggggaagggaaggcccttgtcatcactgccatccaaccaggaggtcaaaagcagcaaaaggcaggaatgctgagcccaaggaggacatacagatggtgcagcatgcacagcacgcagagcaaagaggttgcaccagggaacaaatgggagagctaagacttggaggcttgttaaggaagtgagatttgcaggcagaagaaacagcagcacagcatggggctggcacaagagcagaagggatggatccccttagaacccattttaggataaacactttatttaaaacaaagagccaatcaaaggtcatttagtcaagtggcagcatcacaggaagagagtatcccgattcatccccaaatgccccacacctctgacccctgacccggccaggtgcacgtacactgatagatctctcctcacactgctcttacccttccccaatctcctgtgcctaatctcagacagatcccattcctccaaaggctgtgaatacagcttgtacccgtcaattcttcccccaagaacttgctgtatttctaccatggaaaaacctacactcagtcacttggttttcaattacccagccttgccctatctgtcaaaccatttgcgagttgccactacaacctctgtacagttctaactggttcactggggtgctttttaactcaatgaaaaccttcctgaaaaatgtcctgaatttctggatcttttaaaacacacacacatacacacacacacacacacacacacacacacacacacacacacacacacacacactccatacagcatgcatgcatcctttatgtgcacacacacagttgggggatttattgtatttacaatcattgatagcaaagggctttctgcccacatagtagtgtggaaagcagactctgtagatgagtgaggctggaaagaaagaaccgaagaaaaaggtttgtttcctgtttggcttttggactgaatctgaaaatcaacctagttaggataagttgccaacagcaatgcagtaaaatatttgggggctgaggtgccaaagaagctgatttaattttccccatgtgaaaattacagttggggaggacattcttgccacacctgccaggaaataggacccctttgtcattcaagcctgagaccatgccctgggtgccctgctgcttccgggcgagagtgaggaccctttcaaaactgctttggagataacagacatccaggatggaaacaggagagtgggagagtgcagaggaggggatgggtgctgggcagtggtggcaggcctttgtgtcacttctgtggactgagaagaccatggacaatgagatgcagaagccagtaccaaggtgcagctgcggcagacaggtgagagtgagtgtgccagggagcactgcctctctcttgtagctttatgagctgatgttgctacttaatgtgtgctcctcaaagctctatacttgaaccttaaaattcctaatgcttaaactcaaagctattaacgggtacttcaaactctttataggaatgagcattatgctgctgtcaaagcagctctagtggcgagatattgagaagtacccgtctttggcacggcagaccaaatataaaaggaacaccaatgggggattcaccttcaccactgttcttggtctctaatgagtttgcatttcccatgaacgtggggcaatgatgatttcattcagaaaacacaggctattcttggaaagacctgttggttccatgctgcttaaaactaggttctttacctctgtacaatgcccacctataagatttcttagcacctcagtagggatcactacaagggagcccagaacaagctcaacagttggttcactagaagcacctttgcatcccctagtcaggatgccttggtgcctcacccctgagctgcagacctagaaggtggtacaatgttccctaccccaagttgtcaaatattctagcacagtggtactctgtggcgacccctttccttagagtcctttcagagggactgcttgagttagcgggctgagctctgagacaaagcagtggactgctaaggcctagggcaacacttccccccatcctctgctggagctaggagatgtatactatcaatgactgatacataggctccgatgaaaactagcttgctttcctagtacagataaggtaacgttcccatatcacttcaaataaactgggtcttaaattatagaaataaatagaaacagtagacaatttagcaaagcacttactagtagtgaaattatgtttacacgaaacatctaattcatccatccaagtgatatgagaggtgttttcacctcttttttttttaggcaagaaaacagatattcggagaagcgaagtaacttgttcatgcacacagaaaatgaagatgatgtggggtttccatccatgccctctgcttgggcacagacccactaccactcactgagaaggtttgttttgccagttagacaattggccctttgaaagtgatttttgtgggttttagaacttcaagcacaatctttggagccagggaggctctaagtgccaacccaaacttcatcctctgttcctttagttcccagtgcaatgactttatactgtaggagctccgttttctcatctgtagcttggggatgccaacaagccctaacctggtggggcgtaaatgaagataaaatgacatcatctgggtaaactgcctaattgtctattcagtgttcttgggacagagtaaataattacatctttagttttaaagccagtaccaagagatagcctgaaaatgtttggggtggagatgatgagacagggacggaccggatggaacctgagcaatgcttctttcttccctgtgccttttccctaaatgttcaagaaaagaggccactttgattggctgctgctgcttctgctgttcctcctcctcttccccatcaccaccaccaccaccaccaccaccatcaccatcattgtcatatctgggacagccttcccttgctgcccttagacatcagggcccaggatgtggccttgggactgctgggctggcagtagccgcaggcttacaatagcagcactcgaccatctttctcagccacagtactaacttccttggtcctacagtctgcaaatgggcatttggaaagttccaagccgccataagcatgttagataattctcctaaagagcctatctataatctagtcatcaacctctggctcctaacagtcctgctgttctggaatccctaattcagatgggcagctagctccagagaacctggctagattcctcccctgagaatgaggaatacgtcaggccttagagactctgttggcaattctaggagaatccctatgtatcctcagtgtcccttctattttactttaaccacaatccctcagtactgggcacggtgtccctgcatggagaagcacgctctgaaatgttcagttagaacaagccgattcctttctaggattcctgcatcacaacagccccccccccccacacacacacacagctgcagtcatcttgcattcccatagtgacgtcaaaccagactcccaatcatgaaccatcactgcccatggagtcatgagcttgttaatctcctgagtatgacatttaaacccttaggggacatggcatcattccatgcaagtcctttgcctagaatagcatctggcacctagtaggtaatgaacacatgtctccgaatgaatgagtcgggggctggggggagacggagacaaagagacatgtgaatgagaactcctttgactattatgtaggattaggatggaagtacctgggagcaggcatcctttgcctcattaccagggtggcctctgagtgctgtcgagggcccagcgtgttagacactcgtttgctcgatgagtgtctgctgtatgcatggattaggtagcaggtgttcgaagaaagctcagtagacctgcttgggaagcaagcagctaaatccgaatctgatgtagctctctgaccatgggtggccatttttcaggactccccacaatacttatgatatcatttatagtccttgtagagaaacattgcaagagggaatcaagtagctcctgggatgacttgtcctcctctcacccaatcgctactctcctgagcaaaggacatggtcatctgtaagtctactgcatcatcttaaagtctactattttatcttttcccctcttttcccatggtcgatgctgtttctctgacagcaccttcccttatgaatagttctctctctctctttctctctgtctctctctctctccctccctccctccctccctcctcctctccctcctccctccctatcttcctatctccctcctttccacccctccttctgactggcttgggccttccattttcatgccttacctctcccaatgctgaccagaagcccttggcaaactctttgccttggctttgtctgaagcagggaagaagtacgctccacccaataaatcctacttgccggatgctcagtgagtcttacatggccaggagccattggaaataagactggtattcttttaaaaaaactgacataaaataagagatcatttttcaaaggttagagatctagcagttggtgataactgttagattctgaaacaagaatatgctggtcttctaagcagagtgctttactattccgcatttccaatcttcatttcaagtgatggatgctgttccccgtaggccctgacttcttcccctttctagcttgattttgggcttctaggtggcagagacaaggctctttcagtggctccacaaccaacgtaggaggcatccatggccaaagtaatggatacagtagtggtagtgcctgcttgcatatactctgtttacataatacggatttggcaagtgacagaaaaagccatgcagggatctgattcattagctaaaattcacttattttgaatttgtcacatatgagtgtgtgtgtgttcatacatatatacatatacccatttattccttttaaattcacaaatatatcttctaccttttgttgtccttagttaggttagtaggtgctttccatgtcagatgaagaataataaacactgtcataggatgaaggaagagccaccaagtccatctcttaaacagcttagctaaaacagacacggaaaaacatccagagaggcaaagacagacatccagagtgcctggcgatctatctctacactctattcaggaatattccaaagaaattttcctcacacatccttctatgagctgggagattgaaacaagacagaagagaagtcctggatttcctgctcattctcagccctattaagctgtgttttcttttctgagagaagggcacaagatgtggggcaaagaggcagtaatttcccaaagacccatccctcttttgcttttgtcctgccctggaccttgaaaggacaatttcagtagctgatgaatgttgctggaggtgatggggaaaaggaatgtcaagtttcccgtcacttctcatgttcagggggaccacagagcggctcccagactagtgctctgcaaagctaatctctggcatatccgctcctcagggtcaccgtgggcaacaccggagctttggcattttgctgcattcttttcataacgacatgaacttccttctcttgtcaacctgagggcatacaaaatgctgacagctttcttgggagcagagcttgctgccttcattgctttgggaaccattctgcacagggagaaacatcagcctagagtgggagtctccagggcgcgatgaacttcggagagggaccccgctgtgctctagggcgagccttctgattcccgaagaaggaatgagaagataatttaatggaaagtaggataaggaggatcatgtgaaacacctgtcagtcaccagttactaaacttaattccagttccccttaacggctatctccatatgtacagtcttatctcctccattaagagccagattctatttctcttcccttttctcagcaacttttctcatttctgttaccaaaatacctggcaggaggcaaattaaagagggaagtgtttgtgttgatttgtagtttaaggtgatcccatccatcatcctgggcagggtatggtggcagtagaaatgaggtggctggtcacactgcattcatggtcacgttgccaagaaagacaaatgctagcatccaggtcgctttctccagtcggatcccggcccgtgagatggtgctattcatattcaagttaaagcatttttcatcagtcagaccttttcagaaatatctccacagactcaccccgagacacacgcccatggtgactataaatcatccaaattacaatgcaagttaaccattatacccctgaagcccgatggaatttcatggttgcgtcaacaaattcagggtcatagaagttctcttgcttgacctcagaggctagatgataaaaagtactaatgcctccacccacttcatattagtccttacaaatcagcatcatgttatgaggaagtccaaagaagttactaaatctgcatggaaaggaccacatgcacacacagagaggacctacggtcatcagccaccagccaccagccagaactgacctccagattataacagcaaaccattaaatagagtggatgggggccactgtagttcgttcaagcctaggctataggtgtgagccaccacacatggctatttaacctttctaacttaaaagtgtgagccaggtagtggtgatgcacacctttaaccccaacacttggaaaccagaagctgaaggacctctgtgagtttgggactcatttgtgtgtgtgtgtgtgtgtgtgtgtgtgtgtgtgtgtgtgtgtgtgtgtgtgtgctagaaaatccatactcaaagggtgattgaaaatcccttgactgtggtttttaccaggatggaccagatggagaaactgaggcacagagaataactattccaggttcacacagtgaaagggaatcaatgttgggataaactcctctaaccactatattgtagaattactctctggaaaggacaacacaatggacatcaggtgacaacagctgttgtagctcagaaacacagtcctcacctaggttagtaaaaccctatgttcatctccggtgccataaagccaagcaccaaacagacaaggaccattttttgtttgtttgtttgtttgtttgtttggttggttggttggttggttggctggttggttggttggttggttggttggttggtgggttggttggtttggtttttcaagacagagactctctctgtagccctggctgtcctggaacttgtagagcagtctggccttaaactcacagagatccttcgacttctgattcccaagtgttgggattaaaggtgtgtactcccccacccccgactcccccaactcacacttttaaactagacaggttaaatagccaggcctggtggctcacacctgtagcctaacgcttggggatgcttaaggctagacagatccagagtttgaggacccagtctaggttacttagcaagatctgtgtcaaaaagtaaagctagaataactattgtttgatgttcccaagacaattttgtaaccataaccctttaaaatgtaagttgggtcctcatgctaccaagacggaaaccaaaccttaaagagacccaggacttgcctggggttcctcagctccagaatgacaactccagttgactgactgcagggatcatacgctctgcagccattttcagtttgtcccctctaatctcaggctgcacacacacaggcagacccttctcagagccctgggaagcctggcttgccctagtcatttccttggtcaccaaactcccttttgagactgctctctctgctaagaggatgtgtcccctgatgatctgcctgtaggaatggttcacagtcactcttgtagaagtggattagtcacaggggcacccagttcaggccctcttcctcccaagtacttatctctctggctcaccctctcttttcttctctactctccttctttcttctgtttctctcttctgccacttaggacataatatcagcacaaggccccctctccagttcatgccctttggcatcttccagtctgcagaacccataaggccaactttttttttttttttagcacagccagcctgtggcattgtgctagagcagcacaaaacatccaaagacaccatccctgtctcaaattgccacttgctggggaggcagcttctgcagtggatggtccagagaggggtgctcccctgattgcagtgacagtgggattccttgcatatgaaaggatttcattgggattaacaaattaggatgatgggcctaagtgggttcaaaggacaggatctctgtgacctctcaggggatgctacacaccaggatccagagcccaggcctcttctaactgtgcctccagtcagctgcttctccatctctctctgggcttgtgtgtgtctttgcctgttgactttgagtcctcgccattactttttgactgcaaccacatttaaagggcattgctaaagatcaaagttaaactctcctcccacagagcatgatcatactgctgaatgtggaaactcacaggatgggggattctagacctgtctgtgtcccaagaagagaatgttttgcgctacggttttactttctgtttctctctctctctctctctctctctctctctctctctctctctctctctctctctctctcacacacacacacacacacacacacacacacacggaggttgatgctagatatccttcttgatcactctcatttttttattgaaattttttcatgaagtatgttttgatcatattacttgcccttccctctctttttgatctggcactcatcactttggcaagactggttggctggtgagttccaggaatcctcctgtctctgtgtttctagagttagggctatagacaaaggcctcctcatctggtttttatgtgggcgttgcggacctgaactcgggtcctcatgcctgcacagtaattcaggtattgactaagcaatctccttagtccctgctttctgtttcacctcgatgaatctgacctcgcagaagtctgcctttttaagaaggcagtggagacactggggttgatagagctctgttgcacttaaatcagtggtcttcagccttcccaatgctgcaaccctttaatataatccctcattttgtggagaccccccaaccataaaatgacttttgttgctacttcattactgtaattttactactcttctgagttataatgtaaatatctgaatttcccaatgatcttagacaacctcaaaaggagtcatgaactcataggttgagatccactggctatgtcctcccatctgaccaccaggcgacaatctctccagataacaaaactggaggtgatctaaggtggacctccatggtgccgtgggactgggcaggatgaaggcaggctgttgactgactggggttaggaactttgaactgttcttccctgttctgccaggcctgataccgggcaggattaaaagcctgagtgctacaggaggaaataataaaagagaattctcagttaagagggcagaattgggtcccacaggcaagtttggctcaggtgagttgtacttgggaggttgctgacacacagtagaagatgtgatttctgtcttgctgttgggctttgtcctgcctgttttctccagatggcagtagcagtcatatgaaataccagagaactggttgtttgtctcccccaaagcccaatcaagacctgaagagataacagaagactctgaagatgggaggagagaaggaggcagtgtagacctgccagcctgctctctcctcaggggcagaggcttgttcatcaggggataacatgcttgctgccagtttgcttaaacattgaggagaggagataggataggtggctggaactctggggtattgctttgactcctagggccacaaaaactttctttttatttcctcatatactgattctgatctaatcaagagaaaagcaatgtcagccttccagatcctttcctccttcctttgcttgaacacttctcaggatctagtaggtatacaatctgttattctgaggaataaaaaccccagagcatgatgggaaaggcagaaatccttgcctccctctccttctccctctttccctcctcttcaccaacacctctaccactaactgacatcttctttccgcactgcagcatttttggagaagctttgacctttgctctccatcccagcctggtcctcttttaaaacaagccacatccgttggctatttctaatgcaaagccactgagcactctttttttttttttttgccactgagcactcttgtcaaacaatcactggaggtctttttcttagaaactacaacctgaacccacaattttctcctgtgacagttaccacggcaaccagacttctcagactcaccagaagccctgaaggaaacaagcacacaagggggccctctgcttccaccccttcactaaccctggtggaaccacctagaacagtaattctcaacttgtgggtcacgacccccacagtggttgcatatcagatatttacattacaatttataacagtcgaaaaattacagtcttggggtagcaagtgaataatcttatagttgaatgttaccacaacatgaggcactgtattaaagggtcacacagtattaggaagttgagaaccacttccaaagaagaagggagagccagccccatgaagcaaatccccttgctcatagcaactgataccaagggctgagccaatgggcttagttggtactcttctgggagattgccagttcaactggatgggctgagcaggcataacaccagtgttactcctttcctcctgaggtgtgtagaggagagatccctgaatccacttcccaggtctttctggctctttcctttgtatgattcacggctgggaggcaggcttggtgacctcatgcccatcaagtggggaggcagctcagccttgagtcctgagggtgcaatatttctagctagcacatctggatgaaccattctatccaaggtgtttagttttgctgtggccccggggcatatggttaccatattgttacggcaacatgtggcaaatgctttgctgatgggaggaacagagggaggcggtgcctgaggagggccattttctggatgggctcagcagcttgaggctctgccttctgtgctgctgactctcctgctgctccatcctggtccttctcatcagcatcctttgtgccttctcccacccatctttgcttctgctcccattccatctcgcttgcttcttctgcattctaatgtccagtgcgagagttctcttctcatatatcaactctcccaccctctttgccatcacttgtcacctttaggtgaatgtgtgacccgctgtttgctcttcctgcattggtaattaacaagtagtgcttttcttcctcgagctggacccagcttttcccctcatccagttgccttctcccatccctctgcctcgccaagccccacccagtcacaatctggttgtctcctcttggaagcttcccttcgattcgtgccaccatagtaacctctcctgtggcctgaggtctgccccactctagccctctaccaacagtttggtgcttcatccctcagtgtcacatgggcttttctgtttgaatctccaactttggttttcattgcagtttggcatacacttccattgtgcctcactatctagattttgctcctgctttttttttgtagacattattactgctttacccccttatccaaaatatacaaaacgacagaagttgctccaaagggctgccttgagtggctgtgtataaagtgccctctccatgctggctgctagagagaagcactgagctaccatctctgatgttgcctgcaaggcccgaatgtcagaatctgaattctgcacctagaagatgcaaattctatgaccttatgcaagttctttcatcgttctgtgcctcagttttctttcttttttttttttttgtaaaatttgtttagtatgttaccatagagtaatatctaataatggcatcctaactcttgtctgtcacactgtaggtatcccataaacataatcttgctgtgatttataaaccctgctatagttaaaaggcacctcatctgtatgggttcatttcttgacctacaacatcaaaggatcaacttggatgatttgtggcctccctcccatggttttgaacctgaagtccgttagtgcagagatcctagactcccatttgcctgggacattctgctttactcttgctagtcctgaaagtgcctagtagcacagcctcctttgactctcagagttacatcgatcgagatgatgcattatatggccatctagcctacttgcgagcatggatatttctgtgaatattggctctgtgggcacagtagcagccatccctgctctgtactccagagggaaggtaaggggaactgaggacagcctgctgtatccaggagaagccaagtgtcttctcatcatgaagcttagacatcatctccggcacacagctggcctctcagctggcagccaccctcaaagctgtcacccactgagttggcctctatccttgttttactcaagtgccaaacctactcactctggctccaggacctcctgtctctcagcatccatctataggaaaagcagatattttgtgaacaggtcctgccatggcttgccaatgcaaacacagaagtgggaattgtctggagagaccattttttgtcagcctcaataaagctgtttgagcagatgccacagttgaaacccactgatggttcctaggaactaagagctcgtttagttacttcacaaaaagcacttagtattctactcttggaaacttctagagatagcagccttgcccagcagaagcagtaactgtcggcctcaaggacatgtgtcgtgccagcagtaaggttcaaccctttgcattccaaagttttatggggaacaggagaccagtctatacaatggtgatgaggctaccaagcgtcttagtttcttacttatgaattgttcccacccacccacccccatggttttaatgttttattgtagaatggcagaaagacagagagagagagagagtgagagagagggagagagagagagagagagagagagacaaagacagagacacagagagagagacagagacagacagagagagtgaaggtagagaaggagaagccagccttggccatgtggagagaggggagaagggagggggagaaggcgagctagagatgagaataagagaggtaagagcttaagggttagctatggagtcttagctcttttccccactctgaatttcattactttgggactcaatgtcaaaggctgtcatattctcatattgctaatgctacttagttgtctgcatgctcaagatctcccatgtgcaggatgttctggctgatttttttcagagaagacagtcaatgatcgcaacttcttcaacattgtctttcttggagagatgagagcaagcatcccgtggaagaacgccccgtggaagaacgctgtgggctctccttgttccgtctaatactgagccaagaaaggttgtaagaacttctgtctcttaattctggtttttctgtagactatatttgctgtcttccccagaatctgtatcgtgttttagatgctatcatggtttctccagccatccaagtaaacactacatctcagagcacagttaagtagctaactcctggcctcaaaagaaggtgtcaaggtgtgagttaaagggactgccaaggagggggatttcagaggacaagaaagcagtgagctgagcaggaatgtaaacacttcactgaccaggggactttcctggacacaaatagctaacaagggcctcggtgaacatgacctctctcactctacaatatacatggagggaagacttggatcactatggattgactatttctcccaagtgtttatatattgacaatgtatgatctgtgaggtaagggttttgggaaataaatagggtgagataggcttaggagaacaaagcacacatgactacaccagtgactgaaagggaagaggggctttgctcacttgctgtccccatgacataccctcttccatatcatgatgcagcaaggtagctctctccagatgtcagtgaaaggctcttagatacaccaatccccagaaataacaataataataaaataataataataccaccaacaacaataaaacccaagtgtttcttcttcataaatgacttcatctgtggcatttcgttgaagcaacagaaaatggactgatccaggggccgaggcttgccaccgtcaagggctcatctctaaggcactgcctctgttagattaagtgctctggctctacactgaagtcctttagaaggtaagaccccatggcgatatggcactagactgtgataggcttgtgactcaagctttgaaggtggcgctttggtgttctgagtaaatatagtttaaactagagattgtggcttggcactgtaggtagcttaacacatcactgatacttcttcaaggagtcatggtgaggagagcagcatctttgacttgtgcagctcagggactggcaggccatgtctgatagtacttccctttctcctgttgggttaacaatgcttgctagaaaacaggatctgtgctggtgcacatcttctgcctttccttctagtgactccatctgcttccctcctgggatgtgacccaaacatcacttaggcaaccaccccactagctcaactctaacaagtgtcctcaacctgcaggatgctccaggctcctctgaccctctggaagaaagactatgtaaaagtaacttccaagacccacccatcaccactgatttaatggggaaaccatccaaacatcttcttctggaacccacagggatgactggaccagaatccagtggtaataagggcagagggggcttccccctccctctagtggcagattagcttaagtgaatatttaaatatctgctttgaagtgcatggacaaaactgtgtgggttaagtgagagaagagaatataagctgtgagagaaacatgaccagaatgttctaagacatgagactgaacatgtttatgctctttgatgacccaacagtgttcaagaacttctctgctctaatttgtgaacttccatgggacttaaaaaaaaatcaccaaatacatgtgccaaccaaaggaagactcaaagcgctactccggagcatctctgggtaccactgtttgccgtggcaggggagttactcccagcccctcttgtggtgccctcaggctttatagagctctcttgctgtctagccagacagcatgggcactctctgcctcctctctcacgtggtacattcctaagcagaagctcctcaatcagagtgggctacttttccgtaatgagaagtccacacacattttgtgggggaaaaaaaaaacacttgcaattttgatttacttcagggctaggagtagttggtgcaatcctctctcaagatgctagcaggagcaaggaaccagagctgctagtaagccccatgagcagtagggaactaatggactctctgtaggggacagtgctgcacgaccctatagtttagaggcattacagagcactgcagacttccaatgggttcgcagggacgcgattccatttcaaatcagagaacatctgtgtgccacaatttcaaaagccagcttttcttcccacccccactacagacaggtcccagttttcttaggaggttggtcggtgcatgtatgagatgcagacacaaagctggagttggagacaaggagtcatctgctcctttatgagtcaacagtcctgttccctcacaggtaggggtgagaggcccagccagagggaaggagctggctgtggctcagccaaggccctcagttccttcagcaagaggaaaatcctgtcaaaatggcttaacgatcttctaatattcccatgcaattaaggccacatctgtctcccaggcccctgcactcctttgcgagcgaacagacaggaaccaaacagtctgtcttgtcgatctggaaggaaacaaagagctccattcataactggaggcactttctcatttttttttcaaagtaaaatagagttttcactttgagagtaacctgtgtggcaagaaaacgaaggatcaccccccaccccaataaatcaaattcaacagcctaataaaatgctggctccccttcccccatcccctccttccccctcccatctcctgtccctctctaccagaaaacagtggactagagagggggtgggtgagccaaagagagaggggaaggtgagcagtgagcaggagtgtgtgtgtgtgtgtgtgtgtgtgtgtgtgtgtgtgtgtgtgtggtgtggtgtgcgcatgtgagaagtaacagtgggtaggcagcctgcctttccctcccctactttacatactatctcaaccttcctgcgtgcttctctcctccacccatccccacacttaaagccaagctgccacatcgtccttctccctggatgggagcaaatggctctagttggggagaagtaggataaggtttgcatgggctacacctgtagctgaaacccagcagaagcgggtacatctctcagagctaggcgatgcgctctcccctgcctttgaagcctccagagagtgagtttgcagcagataaaggctgataagcattgagttggtgcttatccgcagcaaacaagatcttttgaggttctcgctgcacttgcaagcaggggagactataatcagaaaaccaaagggaaaatgtgaaaccaagtcgcactggctgctgcctctttcttttcttttgtttcagtttgcacactggaaagcccagcacagatcatgtcagtcaggactctagagcatgatactgtaaaagctttgctttggttactgttgttttctgtttatgtttctttcatagtgttttctcatttttttggtcttctatatgaacatcagtggatgaaatcttttcagttctgacttaaaaaaatatgaaagagccaaacattgacaacaactatatagccagcattttattgctatcgtgtccaaagtgcttttacagtcttggcattgtctggctatcatgatagttctaatgcatacaggacagacagtgcctaagtcagcgcctggtttaggatgtatggcatccttaacaccatacaacttaaagtggcatgccaggagtacaaaccagttctttgtagctatcaagatggtttctattcattctaccccatgcaagggcttggcaattagctaattagcagtgagaatggccttgaacttcagtgggccacctggaagcacttctaaagccttagcacccgtgaatgtagtcagacggaggattttctgaactttacgaccttgagtacgaactttggctgccccatatttcaatgcactggtttcatgttatttcttgggggagaatattgacaagatgcagatgctgaagataagtgtacatggaaagagcactgggcagtctgaagctctgatttctgatcaattatgggctcttgaacaagcatcgtttctgcaatgtcacccaaagcaggagaatggaacgcaaaggagacaaagagagtgcctggtcccatgtgagccagcttctaaataagttctctgaaaattatgctacaatagcagcaaactacaggtaaagggtgtcacaatggaaggctacgatgagacgcacaatggtagaccttggctattctcactcatccctcccagttcgtgttcaatgtgctgctgtgagaacctaacccaagaaacatcttacagtcacatatatatccataaacatggtagacggtcacacacatatccatagatggtagatggttttatatatacacatatagatggtagatggtcatacatgtatacataaagatgataggtgacttgcaggcaagttttgattaagcagaatggtcctgatggctgagtcctcagttgtttataatataagcttcaggagtttagtccatttgaatgtgagtagattgtcagctttacaagcatggtgcccaaaaggcctggggctggcctgaaagaaagtttttggaggcaagaaagtgatttacagctcaaggagttatcttaagctcctcagaatgccttgatagagacctgcagtagttcaattaggactgggagtcacgatgcgttaacaaggctttctctctctctgaatcttctacagaagtatatttatgtgttaattattttctgaaacattaattttatgggtgaagagatgcttcagtcagtgaagcaaggaaatctgagttcaaacccacagaagccattaagacacctggacagtggtgcagaagcagatcagttcccaggggttaatggccaatcactgagtccaacattccgtaaaggacactctctcgagaaactcaggtggagagcaatcaagtgaagaagacattggatgctgacctgtagccttcccacgcacacatatgtgtgagatgtgtcccccatgttctacatgcatacgtgaacacaaagcaaacaaaaaccaaaaaacatataaaagatataaaacaggaatgctcacaagttatgtttgtggtttggaaagaaggattagattctcactgatgacttatttaaaccctttccttctttccagtgatatttggaaccaaatctagaacttcacgcatactctacaattgaacgacatcctcactcctttgtatttgctgtcaattaggtagtttttgtttgattgtttccgttttcttgagactgggtctctcccaacttagcccaggctaactcaactcatatgttcaccatcctcccagttaatgcccccaactggctgggtgtgtgctaccacatctggctcactgaacttctacaattctgacagaaaagaaacgcatcatgcagcaaaaactttgtgctccagcctgggggaggccatcagtggaaagaggcacaacaagttcttttgtaaaatcctactttgtgcttcatactttatcagaagccagtgtaggtgattgtgattatgttttcaggagagccaaagccagtggccctgctggcacggaggcctcctctctcaatctctcaagcttccctgactttcaatatggtcttacggagaccagactggcctccggctcacaacacagtcaggaacaacacagtcaggaatgatcttgaattttggatcttcctgctttctgcctctacttcctaagtgttgggattatgaccatgaaacaccacaactggctttatgcaatgctggggtggaactaaaggcttccttcaagctatatgaacacagctccaggccctctgtctctctctatttctatattagctgcctttcatcagactctcacccaggccacatgcaattatctcagagtagctttgtgaatttaatcaactgagcctggaaaaggatttcagaaaatcatgtccacttaagaattaaagctagtatgaaaatatgtctcttgagtttcagagggtaaccagactcctctacttatataaacccatactcttggagaatgtctggccagggagacagccttgtcctgtggttggtaggtatgctttctttggggcatgaactggggagtgtagaggaatggggggtggggggggggagtcctcttgtttatgctctcccacctgcatacacactgttacaaataacagtgcattttcaaagttcctaaaacctgtgctataaatattcaactcatgcaaatattcttataaacgaaatattcacacaggtgatacaatacctaactactcttatcttctaatacctgagagtcagtttcacactgatcccataggcaacattaataaacaaacaaaacaaacacaaaaaccataataaacataacagaacataataagcataaacaaaatacagaatacttgtcttgcgaagccaataaacaccatggcatcaggtggcatagctgtgtctgttttgaaatgttttagccactgtggacatttttaatctctacttgaaatgcgtcctgcatgtttgcattgggcatgagtctaaaagtctttctgagttcctatgttctcaaccgaagtccctcaagtgacaaacttgatatcaagtcaccaggtgaaacttcaggtatgacatcccactatcagcacacttcatgacttccaggcattccaaacggacagtgctcccactagctcacaagcacacatttcccttccaaggggaggttttctagagttccagagtaaggattactgcctgctgtaatttgtaacgagttcggattgctgtgtgtattttcaatgagctgtacaacctgtcagaaaggaaaacaaactataatgtgctttgactatgtgggggcagggagccagaggacccagggagtggctgtgcgttcagctctagtagcttgcatttcctgtttactggggttaggtgaaaagttgaaaggggaaagactcaacactgccctggacggccagcatcagggatgttcggggaacctcagcccgagtcttgtctctgaaccccacaggaagtttcccatcagtaaaccacaggctcagcaccccaaattccagatgtgtgtctcagttttcctttgccctattctcccttcaaaatgagatgaagttgattatcttgaggagtcataaaaacagaacaaaacaaaacaaacaaaaaccccaaacctcctttctaaatgcccacccctagttatttggacaccaggagcatcggtcacaaatagcattaaagttaccttatgtgtttcccttcttgtcaagatgcccagtaactcagttacctgtgatgtctatttctctctcattgagctgaacctttaatgaattccaaacgacacagttgcaaccttcagagttgaggatcaactttctaaagaatgctagcccaagaagtgcactgcttgctcagatgcctcccattttcaaagcgatgggttcacctcgactctgtcaacgcaaaggctagccaccattacctgtgtgtcactgaagaggaagttagctacccagggaggaagcagaatgcgtctggcctgtgtgactcctgcttgtggtctctgcttctctctctgtttaatgacaatggcagaagatgccttttctaaatttacttctttctaccctgctacaatagcaagaataagtgaaatttgaggaccactccatacctcatgactgaacaggagtctccctgtacctacacctatgctatcattcacacacacacacacacacacacacacacacacacacacacacacacacacacacaaactctaatcaatcagagataaagagaggttcattcctcccctctactttgctggtgaagaaactaaggtcctgacaggctaagagtctcattcaagatcaagagctggtagtggaatagagataacacatcattctggactctagataccaggtcctttccaaggaggccaatgttgtccggtgcattcttggtccacaagcacagtggtcaagaatacgttattcatccacatagttgttacttcaatttcccttttgatcttgccctcttggttagggtaggcagttttaaggcaagatcttaatcatccagctcttggctgtttgaacttgcagggggctcattaggtgtccagagacttttgctgatggatagcatgcactgggcatgagcctgctggctttgacattttcaaactgcacacttcctacagcgacagcgtgccaaagccatgggcctcactgccatcttctcaaaaccaggaaatgaaactggccactaagagcaagtgaccacgagccagggcattggtgcaaaccaagcaaaacacgctgtcggcagcctaggtcacaaggaggaacgcatctcatttgcagcaatctttgaagaaatggtccactcctgctcctcatcctggctcggtccaaccttcctgcatcttaagcaggtttaattgtgtataatactcaagctaagtcacgccttttactctgtggtccttgtatctacacaaacctcagcaaccccaatcacttgagctaaacgtctgcctatgtggtggtactctttactgtgcagcagaacacaattctgtcaatttccttacaggtcttctctcatttttcatgttcgttttttcttccacaacacccaaccctgactctaagtctttgaaccaagtctttgttaaatctctggcaatgatttcaagagttttctccaagtgtgactgctgaggtattttcggggtgcttcagaaagcttcttgcatcttgggcagcaaagcccagtcactgtcatgtgctctgtcacccttctcagtgtgctgatgaaagagcagataggagaagcatgtgggagctgactagtctctggaaatggccacttcatttttaacctttttgaagttctgatgatagaccatgatgagaaaggggggagagagagagaaggacacaggggagggaaacaggaggggggagaagattgaatgcatcaaggtatttttttttcctggacaacactctttgctttgaaagaaaaggaggcagctaaagagatttggttaattacacaaatgtaggtacaggcatcagacagaatgtctactggatattggatttaccaccatgatgttctggccagctatgtccaaaagttatctttgtagcttgacttgggacacccagtaaatttagatctgaatcactttgcatattattattattattattattattattattattattattattattattatttcatctagtctgaatcaataatttggccatgttcactcagggtaaaaaaattcagaggaactagggcaggcccaaaccagcaagcaacaacaaaacccctcaagtgatagagctatgcatagctcctgagatgtagtgtggatgcactgcccagccgcctctgtaagcctgttccccaggttgactgccactaagtcacctaaggtatcgatttcaaatgcaaaattctggaacatgccagagtaagtggtagacacttgggtccagggaaagaagaataaatggtctttttgctcccaaatgacttgtccaggtaggaatttcagagctcctgtggttagtggtaggtgctcggtggaaaaactctttcacaatcaaactgattaagaaaatgctggagactgtgtggctacccatcttctcttgagcaacaagagcacatgcctgagcagagacaggagtctgataaagcctaagccacagagagctcttcattcaactttctcacagcatcccgtttttataaagctccttcaaatacccccagtcacatttggaagcaaaaccacagtttctcagaaccctcgtgacaagtcattgagggattctaccttcccaggtcttatttttaagtcgcttttcctgtcataaatctctattagaaataggaagcgtgatctgccaaaaggggcaccacaaactcaagagatcactggattttcctttttgctagctagccagttcttagaatcacaatttgctttggttatgtgctggaagcaatgaagcatacgcgtcccttcatcttacggatctgggtgtgaacatcttgtcttcagggggacttttctaaaacctccgacctaaattacactcagcctgcttctccttcttggagtgcacaatacgtatcacacttagaaatgagtgtgtgtgtgcgtgtgtgtgtgtgtgtgtgtgtgtgtgtgtgtgtgtgtgtgtgtgtgtgtgatatatgtgtctctctcccattacatgtaactctgtaaaggcagatcctaccctggaatcatgcctaggcaacaggcagccctccatagccacttaccctataaatgaactacacagtgtctgtatggtcagttctcagatgctgtccacatttttttttgagacaggatctctcaccttgtgggtcccaggcatttgtctgtctcagcaccactgacactggtgtcacacttacatgccaccatacctgacgtccttgtggtggctctgaatacggaccccatatccttatgtttgcaaggcaagcacttgactgaccgaaaaaggtgccggtgtgattcagacaatgattctatatggtcatgaggatttcctgaaaaacttgttcagaatgcatggttctggttgtgcacaaagctcagggggagagtgcttgcctgggatgctcaaggtcctggattccaccctcagttctgggaaaaccaagcacctgtgttgttctacccaagatttcagtcctcccgagtgagaggaagggaggtcgggaataaagtgttagtggctggctgagaagaaggagacgggagggcctggagatgtttatctttgcccgtttcctggcttgcaacaggtttctggacaagcttctgtgttcatgtctccttctcactcctcagtaagtggaagtcccacctgccacccactcttctctactccaaaactacactgtgagatgtctactgaaacattctgaaatcctaagatgagaagagatactgaagtaaacacacacacacacacagttgctatttgtcgaatggtggatttctagcacacagccacgaacttcaattttaccaggcagtttttcacataacttcactatgtgagatgtctcttgaggctgccccctttaatacaaaatcgagaaggctgctcactttgctagctaccccttccgacttgacctttgctttgcggtggaaactttacactctcacgactcttcaggcatgcgtgctggccctctcctggatctatctgtagccaggcagtttgcgcacaaggaacggatgggcagacttgcaagcctcctgactcccaggattccctcccctccagggaagcacaagcattagtctggctccagtgtcgagcagtgcaggaagcagagggcacgggctaatatgcatgtcaccatgtggcttctggtcacaggctaaccctactttcgagcctgcgtgagctacaagagcaacaggaaatggcaaggggtatatatagccacattgtgtttatccaaaggtgctgttttgcaccgatgatgaacttcttaggttggaaaggacacagcatcctcctttcccccaagggcctctttccctgagcagcacgtgtggaatgagttcctccccttgggaaggaagagggacattggaccttcttggcatcttcactttcatgtgacagggcttgtccactttcctctcgaaagggtttctggatacattcatcggaggttcatagtaggtgggaaatgacaataggacaattgaggatgagcctctttacacagtacctctggaaaaaacattcattctctgaactgggtcctccccccaaaaacactaattagattctttgtttcttcttgatgcattgcactggcaaataattcatgcacctcttcctggtgtagccgctatatgtcccttggtttggcggctttgagatcctaccataggcatcggcagcagaaagtccatagaatgagatttcagtgaccccaaaccctagacttcctttgtttcctaaggcaccatcagaaggaaaatctgagtcctctgagttcggcctacgctgtgtacagagcccttctttgctgctgtgaaagccagtgaatcagccgggagcctggaatctgctgcaggtcctctgtattggcagagggcttcagcttctcttgttggctctttactcaggcctcctctctactcaatgagctcaggaacaaggcttagggatggtgagattgaggagggactgactcatgtaggtgggcatcggagctttagtctgcatatgcatactgctcacctgaagaacttaagaattttttcccaaggactgtgggatattgaggataaaaggagatgctataagtagagaccatttagatagcacagtgccacacagcgagtgcttagtgcacgctcatcaaaatggagttagggatggagggatcctgtggagaatgggtctgcatttcaacatgtatacaccctaaaatttctcatgctaacttggttggccaactccttcaatagggataagctgtatgttcccataaggaatattttgcagttaagtgtggcaatggcaaaattgtgtgcagagcactttctgatacagcaccacataataaatgagacttctaaaattctcatctcctcctactctgaaaaggcacaggatgcatgttgggaaaataagtgagcgagcgagctcttagcacaaacatttgggaggataagactgaaacttttcccagcttctgagttctgctgagatgccaagctcttcctaagagcccgatttgcagcgcagaggcgagtgcctctatttgagcactttaagaaaaagtgtggggcagtcgtgagaagcagatggctcagtgggtaaagtgcttgctgtgaaagcatggggacatgcatttagaaccccagtgcccacataaaagccagcagtggtggtgactacctgtgtggggctggatagcaggcaagcttcaagttcagtgtgagaccttggctcacaaggtggagcatgataaaggtaagattcccaaagctaacctccaacacacacacacacacacacacacacacacacacacacacacaaacacacacacacacacacacacacgagtgcatctgcacaagtgtgcatccactacacagatacacagacacacacacacaaagaaaacaaacaaaatggtaaagacctctatccagtgtgctttgtacctggtacaagaaagccaaaaacagtaaaagaggacccaggattttctgagccttgtgtgcaggttggaccctctggatggccctgcatcttccacagcaagtttgtatatcccgctagcttccaccctggtctctttctttgccttccccacttatatactgagtcccaaagccattgttcgttctcacttctgaaagctaagcacacagtggcaggccccaaggcctgcggctgtgtgtgcctgagattaagatttttatctgctctctgacaatgtgcagaggaaatcctgttcctaaactcagggccgtgagaggagcgcggccagcagttcttccctcccacctgggagagagatcaggacacctgacctgccaggaacatgggctcattgtttatacatagaaaaagctcttttccggtctcagttaatcaactcctctcctacatttttttctttgagccgcagagcataacagtctcttggcagagctgggttggggtcttaatgtactagcagataaggtccccacggaggaaatgcgaactactgtctagtaagatttaggaaagagcttttccactctccgtgaaccaggaggttcacaggcagccatatcctcactgcatggacccagtgtggctctcaagcactaggagaagactccgtgctaaagggcgggttctctggtggtcagagatgaggttgtgggaagctgtaggctcttctctttccctttatccctagggcttagtgggcagctactctcacagacaagctccgggtgacaattaggggactagtagaaggtccctattttgtatgtatggcttgtcatattcctggctaacgtaggcaatgcaggcgtgcttggtagttggagatgcctgttgctacaggaggacactgaggacacacgctctttcccggacttgaaggaagatatcctaagacagaactgcctgggtgtctacccccaactctgcttttcctatcgctcctttcactgcagagctggagtggatctggatcatctgcaaatctgccaggatgcccagggctatgagcaagaagaagaaggtgtagaacttgctgggggcaggtgcttactcccacagaagcactgcggttatagaagaaatgacgtgagcaaaatatcagtgttaactctcagaaaactgcccagcagcagcagaggtggggtggggtggggaggaggatggggagagaaaggagagagaggagagggaggggagagagaggggagagagaacaccgtctctagaagtgacctgcctgagaccttgccctctggcctcagtaccttcatctttacaagggaacacacagaggactgctgagacctctgtctccagcatcccgccccctgaattagaattgtcattgaactgatgaagtcatactctccctgctgtagcggtaaggggaagctgggagtgtgaagccttggccacctcacctccaggtgcaggtgtggctgagttgtcgctgcctcattcgcaggggcaagagaaagagcagcaacagtatttctgtggaggaagtgtgttggtaaaccccaagacgccagagtatgcacttgggcctgccctgattcatcttaaagctgagctctgacgaaggctcatgggaggaccacttttctgttttgtcttgttttgtttcagctcatggggaaaatggacttgctcatcagtctggaactggacagagaggaagtggctcctgggtgggaagctatacttctgccgagcacaggacagaggagaaagtaggaatgcctcccctcccttccccttcaactcctccggacaggaataaggcaagaaagcctggcctgaagaacaggagcccaccctgctgtgagaggagcttcagccagcttcagggatgggggtatggatgcaggggtgtgcgagagctgagaaagcatctcttcctagctccacagtcagaaacatcatcctggtagcctggcatcagcctcagagcaaccatttgcaccatggaaataggtgaacactacacaaatccagacggtaggttgttccacgtttatcagcacacgtgtggctggaaatttctgcttctcattaactccattcagcgttgagccattcactaaatcttggtagtgagggctcagtctgcagcagactagcctcagaggctgatatttagctctacagacaagcatcaattagatccagcctttgagctgtgtgcagatctgggctgacttcatcacaggaacacatggagacggagaccgattggctgagctcaggatctaggcacccccaagctacactttcccttttgagaacttgaagccgtttcccctagctgtcattctggcctgtgagcagtagaccttgttttcccaaccactcgaacactcaggagcccttctttatcaggtaaggaactaaacactttgtgtccgttatctccctgtatttcatcctcaccagagccttatgaaataatttcctcattttacagttcagggaggtgagacctgtgaggttgaccagattataagtggcctcgctcagaggtgaactcagacttgactggatccagggtgtgctcgttccaaagtgggtgtgcccagaccacacttctgatgtcaatatcgaacatgactcttccttgaaaatttacctcagtccattgatactaactctgaacatgactgtcaagtgagacacagcttccagggccactgtgtagccacagcacccttcccaaagacatgccacctcccccacagtatatagttcctcttccctctgccccagccatggccctgcccctgcttcaacctctactgaaaacttacttcctcccttggagctttctctcattaaccccacccagtgttggtcaattcatccactttgcttttattctaataggtagtatttaaattcaccccagaatgctttttcctgtttttaccactggggtgcattgggattttcttccttaacctgtccctcctattaaagtcctgcaagatctgtacctgagtcacctggctagggctatgtctgtctgtaggcttcctattcagagtggagaagctcttgacctggtcagatgactcaaatatctgtcttgttcttgccaaagaggctcctctcaagaactataagcagaaggagaaatagttcaagccagacctatccagcttatgatattcatatcagaagaagcctttaaggactgccttggtccagcctggggacacataggatctgttctttctaagagggtctttctcattgcatttccctccttaaatgcttggaatgatttgtgcatagaaagggatgatggggtggcaatttgaggtggggtttcaggaggcatctttctgtcttactgtatatgttttagaagggtaaatacgtaggtgagtatagtgagcatctgtggggagatggaagaggataggtctgacccaggagtggaatggtaggtatctctaccaggcatgcctcagaagcgacaggtgatttaggcaggaaggatagacccctctggtcttctggatgaagacagcagcaatgtggcagttacagctgggctgctttgcattcgagaacctgactgtttcagaggtctcaggctgtgccagagccgccaccaccacgaggctaaactcctggccagacctcctcctcctccatctccccccaaccttgtccttagtaccctgctcgcccttgcctagagcagggaacaattcctctttaccctaaagacctgacttagacatcccatgctgcctactgctatgccctgaacgttagcaggcccccatccccccacatggactgccacttttagactggcacacggttttcacaagacagggttgtggtttcagtttttttccttcataagtttgcagctgctagttttgaaaccaccgtccctgaggcaactcagtcaaagagagagaaggagggagggggagagagtaagagtgagcaaatcgaagggatgataagctgtctttctaagcagaatttatctcatttactctgattctcaccaccttggacgaccctgctctacctctgccaggtctcagatggtaaaaggcttcgaacacacttaaggtctgtgggtcagagcgacttaggggaaataagtttaacttgtccatgtgactgtctgaaggtaacaagtgatatgtgaaaagccaggccttatatttctgatctcaagtgagtgtcccatagcctcctggtcctgttgtgtgtgtgtgtgtgtgtgtgtgtgtgtgtgtgtgtgtgcgtgtgcgtgtgcgtgtgcgtgtgcgtgtgcgtgtgcgtgtgtgtgtgtgtgtgtgtagaggggagggagaacataatccacatgtgcattcacggggcagcagaagggaaggctgtggatgcccaggaagaccctgattgatattatgcatgacatatcaatcccattggagcctgtctaatgagtcatttgcatattcaaccactagtagacttgaggtaagaacagaaaccagaaacaaactgaatccagaaaaacaaaaaaccaaaattcacattcaggtctcccctgcctgctcctgccatgttgcccacatttgtggccattagttaaagtttttttctatgagaacacctagagctggagcctagtgtcacaccccaggcatggcatcgagcactgccagcagaccactgaagagtctatgaagggtgtacaccgctttctgactcaaatccatagttgtctgtacccggtaggagtgcttttgccatcagtaagaggaagaatcctggcgatgtttccagggaaaggaaaggagaacagaaaaggtggggcctccaatcaggccagagagggtgaggcagagccatctccacttcctttgtgcgtctcctagaatcacccccctcccattccaatctcctgtggcttttacagataagggtttctctccccctttctcactctccatctctcccaggttcactggaggcctctgagggcttgagataggtttttctttgcataagccaaacttctacttaacccagtgagtgctcttatgcagaaggtacctttaagtgatcacctgactgaagcgaatgtgatgttgcttatccttttatcaaaacatggaccaattcccctgccacttcagagatgcaaaccctctacagcctatgtcaaaaactttctggggtcaaaggtctctggggtaaggtcataacctactgctccaccttcccacccagtgttctgtacttaagtcactcttgctggcatggcatgctcttctcacattcctgcttcccctctttagggctgactgtcccacaaaccctaggtcattcacaataccagttccatggtgcctcttctagagaccatccctagacaggcatcccctgactcttccctagatggacattcattccggtgataggctcatgtgatgcttcacacatcactgttatgaacacacttgtggctttgagcacggtgaccgtccattttctatgagcaatgaatccatcaaaaccagaagaaagcattatactcagttggagtctctggtgctgcccacatggtaggcataacgagtgttcaactgacatttgatgatgaaagtgttgaatagtgcagggtttctgctgcctattctgtaatctcgagaatgatggaacatctctatccttgctcattatatccctgttcttgggcagccatgttggcaaaggccctggttcatgacctacagatatagcgcccgtcccctcctccaaaacaactaagcgaatctaagtctatggaagtttctttttcttctgaatcatcttcaatggtcctgattttgcttccagagcctcatttattgtgttattctccaaagtcccactgttgtgttggtggtctagactaaattttgtgttcccctctgaatttatgttaacgcctaaccctcagtgctttggtgttaggaggggagactttgagagactttgagagggttattggatgggcagaagacaatcattaacagaatgactgctaaaacgtatctcaggaaatatgactcgcttccattatggaagatacagggggacccagtggtctttaaacacaaggagggtggggctcaccggaacctggcatcgctggtaccctaactgtagactctcggcttccataactgtgagaaatggtgtttgttgtctatttgccacccagtctatgacactttgttgtagcaacctgaactaagacatgctccctgattctttagaaatttcccctctctgtggtccccagaacttggtatgaaagaagactacaaagtctgcgattgtgttagccattcctacgtcacagcctgtctgtgtgtgggcattcatccctcgtgctcctgctgtgggaatttctgtactttagctgacatgtagcgcttatgataacaataccaattaacatctcaaacattacaatcctttaagaaatattttaaagattttgtttccttagttttatgagaatgagtattttcacttgcatgcgtgcatgtgtgccacatgggtgcttggtggccctggaggttaggagagtgtgttagattccctgaaactggagctacagatggatgcacgtcatcaggacggtgctgtgagctgaaatcaagtccgctgagagagcaacaggtacagttatctgctaagatgttcctctggctcctacaatccttgttaggaagtaaacctttgataatttacgtagttttgaccacagagttatacttccccgtggaagccatgcaaatcttttggctcaaaaactgttaaaaaaaatttgccaacttctttatggaagacagagctatgttccctggaatctaagcagacatctccccttggattttgctggtgccatggctgtataaaccttgctgtgtgattgaggaatctttggtgtaaggtcaccagactgtctggcttcccatctaagcatcttcctcctgccctctcccttttctggttcaaatgtctcagaggagtgctcgttggtccaggtcagaatctttctctgctttttcttcttctctcttccataccatgtcaacatttgctatagagccttgctaaacaaagatgaaatatttaatgtttttcagatattacagtcttgtcagaggtaatttgagtttcctggatgttcaaaggtaggaagccatggtggagtttggagcagataggagctggcgacagactctgggcaatgggtgtttcggggcattcttattatacctgtgactctaaacctccttagaggggctttggtcactttgggggccctgttcctaagacaggaaggcaaaggcaatgggtccttcaattggtaatacctagcttgaatcaactggcactggtggcactcatacacacatggcacaggcacacgtgtgtgcatgcacacaccctcagagagagggggaagggagagagaatattacttgaaaagaaagttatccaaatgtccttcttcccaaacccaagcttccaaagagccaggagccagccagtttcagataaatctccatcaatgtgtcttgttaatgcagttgagcatctaaccccattttcttagaaacagcaaatcccagtgggctgagagtaaacggatcccagccccaaaaggtttgagtccctttaggaactccctgaccacaagagtctagggggctgagtgctggggctgggcataccctgctgcccataactgatcttgctctcactacagcttggcagctgaatcacggacctgaacctttatggaggctggtagtaatttgagacgtaaaacaaagggtgtcaagcgtctttgataactcggcaggcatttcctctatgatccccgttacagatgcttccatttctgagatgcttttctttctttttctttttaattttttttttgtctcccataagagcagagactgtaaacagtgtctatcttatccctctgtcccatcctcaaattctagtacgggaaagaacaggaagccttacttatgaatccttggaatgaatggatacctactggagagccaccatagagagggaggacagcatgaacggaagctttcctgtccgggctgttggccttcttgcagggtaagcaagcaacactgtcagtcttaaggtgctcacagtgaattccacgcacagggcaggtttctcaggaattcagattctgcaggggccacaggagttccagcctctccagcagtagcgagctgcttagatgaggttggaagagatttcagggttgccttccttggtagagggggaagagcaggggaacctgagggggcttctgctacacagaggtcttgctggctggttcactagacaaagagccctcagaaagctaccttccaagctctgccacacacagagaaggcagagaggcctggcctctttctgacagggcctgctgacctggttcctgggaggggcaggagagtggcagacagctgccctgagatgagagttctgcaggagtcactgtgtagggagtgtgagtctgacaaggacgagcttaagagcaagtcttctgtaattaggagttgcgtgtgttaatccaacagcctatacagagaggcctcctggtcacaggcaattccgagatgctttctactgttgtgctatcagatctggtccagcaagctggcctgcaatctgccctcagcccagcttccatctgggctgcattaaaaaagcacaaggaggtgagtgaaggccccgtctgcctctgcctctcccagaaatggttttatgactcaaggggaacttagtgacttctataacatcaccttttctacagttcacgggactgctttttaaagcctacatggaatattaatacaagaaaaagtctagctccgttgcaaaaaaaaaaaaaaaaactatcctaagtccagaagccagagtagctaagacaacacatgccactcaaaagtccacaaggatgtaactcgggatggagtgcttgcccggtgtctccccggtaatacaaaagaaaaacaaaataaaacctcagggcttttacccactcacttaatagtttcagtgatcagccatcagacaaagtaacatggaatattattcagtaatacggggaaaaaatccataatttaataataagaaaaatgagacttcaaagtaattggttctgaatatattaaaattagacatgtatgttgtatttttgcaatagggagattgcaggtaaatacatcaaaacattaatagattgctaaccgggttctaagaacatggtttttatggttttagggtttttttttccattgtggttttgtttatttttaaaagtgtatacagaattttatggaatcaatgaaattgtattttggagataaatatcttttaaaagttctttaaaataaaaaacacaattcggagcttgtttgcatgtttttaagtaagcgaggacagccaagacactctgggtccagcatatccaaaatcaatttatttaagagtgttctcagcagccggggtcacatctaggtacttcaccttccttatgtctgcctctgcctctgcctctctgcctctctgcctctgcctctctgcctctctgcctctctgcctctctgcctctctgcctctctgcctctctgcctctctgcctctctgcctctctgcctctctgcctctctgcctctctgcctctctgcctctctgcctctctgcctctgcctctgcctctctgcctctctgcctctctgcctctgcctctgcctctctgcctctctgcctctctgcctctgcctctctgcctctctgcctctctgcctctctgcctctgcctctgcctctgcctctgcctctctgcctctgcccctcctccttgctcctcccagccccgcccatttcagttggtgactgttgggcactctgctctagcacctggctttccaactctcctatttgcctggcgttatttcccaggaacaagggccagtgcagatgtggttcccctatcaaaatttattgtaagactcgcttgtcactagatactacccctatgtccccaacccttgagctctcagtccagaaggaggccacaccatcggttagatttcagcaacttctaaatgtcccagtatcagaaactggcaactagagattaccaaggggacatatccaagctataaataagctgaaaaatatttaggatatgtctatctagttcctatatacagatatgtgtgcatgcttcaacacacacatacacacacatacaagaaaacaaagtacatacaacacgtggactgcgcacagccagaagccactacatttcctctactggactgatggagaacgaaggctctgagctattaagtcacatgctagaaatgacatggccagcatctctacattgccccgaaggtctccaagcccagccttttaaaaagcaaaatgctgttctccatcccgcccgcaatgcaagcaggcaggctgctgtggtagtagtgaattctaaaactccataattaccgggttcaacttggtctccagaatacccatgacagaatttgtggaaatgttcacaacagctctctacttccaggttctgagatcagaaacggaagtttcaaaataccgaaagttcgtttatgtcgaacacactggttaagctaaaagcaggaagttcaagaaagcctgaactcaggaggtttttcagcccaatttggatccacatctgcacttctggattttccactgagtcgacccacccgccctcagctgctccgagcttgatgagtctccactgttgtggtgctgggtaccggataaataaatgcgatctgacatcaacccagctagtggccagttgcaaggtagtgagccttactggcaaaggagaggaacaattcaaatatggaagtttcttttcagagggcaaaacaaaacaaacaaaagcactaaacaataggccatcagaagaatggcctctgttcttgcctccaggtgcaggaaatgaatgggaatcttgccaccccttccttcccccccccctccatccccccacagacctggtcttcccactaggcatattctggcaatagagggaaagggaaggacatggtactccagtgggctggggatgccagcttttgtgggcacctccgaacattctagagagtaatttccgcaagtacacgtccacggcttgaggaactgtggaaattgaaggctttgcttgggccacacaatccttgggcatatggtaggcgctagaatagagatgctaacccatcccttcagactgtccagtcacagcatctcaacatgatagaacgttcaaagtacatgttagctgctgtagatttaagtatttctgagcggctggtcctatgtttaactgaagctttctccactgaaaatacagttttctgggatccctactctacatgcaggatggccccaaggctcccatgcacactgctctggaatccccagcactctttcacacatctccatagggacatcttttagggacatcttttagacaataagcaggtgcacctgagctcctcatgagctagacctcagttttttctttgaagctcaacttctaatcagccacacccagttgaacccccccccccgcaccccccccccgcacccccccccccagaggcatcagaccgtatcccagggtaccctcttgtcagcttgaagagatgaggcccacaaggggacggaacatgccacatgtagaggccgaatggcctcgagtcaaccatttaacctttccaatccccagcttcatcaccagaaagcaaacattgtaacaagtccctctaaggcaggcaactgaagcggtagggatcctcctcagctgcccgggcagtgcccattgctctcctcagcctcactcttctcttgggggtaaactcttgtggttctaatctaagtgtcctggaagtttcatacctgagctataagagaacttcctgaattaggaaaagcaagtccttcaactgtgaggtacactttctgtgatgggggtggggtggtggtaggggtggtggtggtggtagtggcggcggctggtttttagttagcaaacactaaataaaaggggggcactgttgatttgctttcatatcagaaaattcttctggacctttctgctggccatgcccaggtccgggaccagctccttagccatatcacaggtgtccattcctgactgggctcttgcctttgggggggggggtacagtcacagcaggggtgaagaaggtaatctcttaggtgacttgaagttgaagtgggaggaaacagggcctttcatgtggtggaactgggccttctttgaggagctgtttgtttcccggaagccaaactctgggcagaggcagaagccccaccactgcttcctcccaccttggaaaatcacacagcgcacctctttgcctagcggaggaatggctgctcaggctacccgactggagctgtctgtcctatcccttcaggatgaaaagcaacagcgtgctggagcccacagcgagcccctgcccacagggagcactcaccctgtcctctttctcctccctgtcctggaaaaagcacacgcaatggtaaacaagtcattagattcaagatcctgcccaatttagacgctttgtctccgttttctccagagtaaacccatggtcacacccaccccaaacccagctaagaccagaaggaatgcagggccctgtggccaggctaaccgcagctgacccggagatgcccagggctggacattctcctgggctgggtgagcggagctgagaggccggagtttaccatcctggcccagatggtgggttcaacccccaccctacagcttttagtcttggaattgctaccccaaactctcaagagtgaaaactccacaacctttgaagtctggcaagaaagcccaagatttgcttctcccttattcctgggcttctgcacaggcgggcttctagaaaacagaggttggagaaaatgaaaatcaatgccaaatcctaaccagacagaagagtaactgcggctccctacggccgcccacccccagctctggcacgatggactggggaagtagtgggcccctctcccgctgttgaagatctgtttattttgcactccataaagggaaaccaggccctttctgtcattttggcttggaggggggcggggcaagaaaaggtcctgaatttaaagtcaaaaccagatcaacttctcaaagtctcctggagcttttgctatgactcccgaacagcctgcattttctatcctatcaagtgtgagcctctttctaacaggctgactctcaagccctccgcacaccatcagccccagtgacctcttcctacctcccaaccatgcaaatgctccccagatggcactcggagcagcctggcggtcctttcctgccccagtctacccccagccaaccttgcctttgctctcatccacagcttattacccaaccgtgctctcctgtgtggacagtgggttcttctaagcaataaaccagagaatgtcctttgtcctggaaatgtgccacttgccctccatgttatccttatcagcagaccacagtgcagcgaggggaggtcccagtgtgctcaggacgtacgggatatcagcgcaaaatgttttcttcacttttgcctcctgccttgaattcaaagcatgacctttgcgggtggaattcaatcaggtcatctcttagattccctagtgggaatccgagggaagtggcacccgccaagcctattgttcccacagcaaggataccggtagagatgctattttctccctagatcatacagcagaacgaggtgggacggtgataggggaggtaaaaagacccccgtgattgtgtaagatgctgttgataaaacatagtcaggggcctgtcacacttacaaccaccccccacccctccccgccatagcagcttttcagcaaacggcacaactcagctctggcccttcacggtggatttcactacttttagtgcaaatcattttctacttggacaggtatgaatatggttttttcctcccaactttaaacaccaggagagcgatactattaggaaagtggagaagggatgtggaaacagcagaaggccggagagattgcaaaattaaactcctgtgagtgttaacactcatatattccaaggctgggaaattaatggtagacatttcatcacggagcaagtccaagctcttattctgagaagctcaaacggtttcatacatgccgtgagcaaagacgttgggatccgacagaccctactagctgcaaactgttgcgtcagtttcttcagttttttatacctcagctcctgtcatcaggaaagcgggcatcctaaagcaagccatgcagccttgacgagaacacggtgctaagaggcttctcagcaccatcctaacgaacaccagcacagtacagaccaacaccagcatcatccaaaacatcggcaccatccaaacaccaccatcatcaccagcagcatggctgagtcttcctaccaatgttgttttaggtaatactgaggtaaagggcacagaaattccagaaagaaaaagccagcgtcagtcctgtgcctgtgtttctttagagtcttagatcagagagtttcctctgaaattctaacagacacagagatagcatgcttcatgcttgttaagaagggttttttttttttttttttttttttgatcttgcaaaatacttttactgccatcttcattacgacaccactttgaggtaaaaatatcattggtagaatctccatgatctgcagttgagaaaacctaaggcaggggagatccaggccccgtcagagagtgtttcatatcaaagtctgcgagtgaagttcgagacctctggctgtccaggaaaggcctggctttaccagtgggaagttacagcaagctgaaacaaggctggcgccttccaagacagaaagaagtcagctttcaggaggcatcttacccgtggggtctctggatgcactacatgttagaggggtatgattgatagcctaaacaccctcttcatgtactcagtgaatgctagtctgataacacatgcaaggataattgtcttttcatattattcttcattacactctacttgcctttatcaaataagaaagtggcagagaggatgactttgcagccacacagatcgtgccttcaaggaccatggttagaatgactaagcttctgacacctaatttagcaaggccctggagtgacttaccatggagtgaagcagacatatcagctatccactcactagcagagacttatcacaagtctgttctctttcatacattctctcacttatcactcagggttcagcctgaatgttacttccttagggaagcctttgacctctgagactaggttaggtccccatggcagactctcaaaaggcactccccagttcccgtttcacacagaactctttggactgaatacctgcttgctcagctacagcttcacttctgccaaagcaggagccgcagctatctttcttactcctgcaccttggtccctggcctctggaactgatcagtccatccatgaacatatgccatgtgctgactgtacaaagaaaaactggagaagtccgagccctcagagctcagggcaagccttgcaaaacagcattcggatcctgaaagccaggcagccccttcaccccatgcagcatgcgatctgaaggaaccgagggaaagtattttgaggtgggagaagttgtgaaggttcacagctacagaactacagtacattctacagttaaccaggatgagacggttgggcactggacactcatggtggcctgtgggtaggtgtatattttattcttcctgcaggcttgttttcgtatgaatcagaaccacaatagtctgccaccctaaaaactgttaggtagagtttagacctcaggtgaacttgacctcattttcttggaagaggctatccatctcagtttcaaataacccaactcacaagtccgtgttagagattcagtggtagatacagaattgaattccacaatgatatgcagcagaaaaaccaccgtatgtctcatcatgagagaatttactaatgaaggcagatgttcccaggagaaggatttagtacttattccaatgattccatagctgtagtaggtacagtatgtcatatacactgatatccacaggacagggcatgaagcaatagttaagttgctttatgttttgagatactaagaatatacaccttttgaactgaggtacaacaaaccaatataagtagagaaagcatactccagagggagattggctttcctggaccatccagctagttacttgcccaattaagttgctttgttcacattcatagctaaggagaaaccatctcacaaagagttacagagatctggaaactaaagaaacaaaccatctgttaagagtatggagccctacgcaataggaaatcatattttcatggtggcataaagcagaaagcattagagctgaaaacaaccttcagaagaatttgggtctgtgccagtattttccaaagaggaaaccaaagtcactgtgttggataaggactactctttggtcaactttattttcccaacaagagggtatgtatcaaaggcccatattgttcttcaacaaatctagtaagcattcaatcatgatatgtaaatatccatttgttcaatttttattgcctccactagtagagaaggggaaaaataagtattatattcttagtggtcagcacagatttggttgttgaagggggacattgctatgctaatccaaagctccgaccccagaccagcatggtaacctagcaacactgagcacagttactttactttggaattctccacagagtaatggaggtagttgggtgtggtggttcatgactgtaacaggagatgttgataaaagaacaaggacttcaaggtccacatcattacatagtgtggctgaggcctgtctgagcaacaggagactttgtctcagaaagaaaaccaaggtgacaatgaaaggatgaatggaagccctggtctccatgcatacaacaaacccactgctgacttgtgaaaagaatgcatgtgagttcatccttccgcctcagtcgagactttaaggtgatggctttgaccataattttattggtattatttaaaattaaatttaattggattaaaaggtgcttcctttcatttcaatttcatcactgaacacgccgaggcaagaaatagccaacactttaaggctatatcttgggctctatggcaaaaactacttctgtctcaaaaataatccttctttgtactggtgacatctcacatctcaacatcttggctgtggccatcatattgaacaatgacaacaggacattttcttttttttgcacaaggttcatttggacatagttatgataaagacaattgtcttaatcttccctagccttgacctctgacacagaggcaagaaggtttagaagaactaataaagtttctcaactctcttctttcttttaaaaaaaaatgtatggttcatgcctttaatccaagagctcaggaagtaggtggatatctgagtttgaggtcagcctgatctatatagcaagttcagaccagccagggctacagagagagacttcatctcaattcacctccctctcataaggggtaaaggcatcagccacggctctaggaaaatttcttaaccatgaataacttaaagagatgtgtttgacctttctgtagcccaaaaagtagtattgtgccctgtttcaagtcaactactatatgtgccaccagtcccatgaacttgtgttttgaatgcgcatttccccagctgatggtgatatttgtagacaacagggaaactttaggaggtagacaatgggtctaggaagtaggtccccagggacaggtcttcaaaagctaacgtcctatttctgcctatggaacgttttcggtttcttagtccattgtgaagtaaggaggaatcaccacacatttctaatgacaggaactctctgaagctacaaatacaaagaattctttgcccttacaagtctgttctctcaagaactgggccactaccacacagaactaacaaacatacgctctttacctaaataaaacccaggaatatagggttatctgaaaacaccagaaagcattatgtattagttatttgaatatttctaattgtctgtacacaacgtgggctacggtaaagatctagggtgttgtgattgtccggaaactgtccacaagcaagacttaaaaaaaaaaaaacctgttgatagcaacaaataggtgaactctgaaaggctgcctttgcttccattttgtgatgtggtttttacaagttgtgaggggggacagtgttgggggggtattcactaatgtctttacctttgctctcaggcttcgggagaaaatgcagaatgctcgttcagtgaagcatatagatttggagaatagcttcgttttgttttcttagagaaagatacagcagacctatatcattctatagttgtagtctctaacaattacagggcatgttgtctgaacaactcaatctccagctccaggaattttttttgaagtctcatttcaggtggttaggaataaaaccaaagtatgtagttcaacctacctagaaaaagaactgaaggagtttttcatctcagtcctaaatacacacacagcccttgaaatggaaacagcgagctccattttctgtgtcttcattccattaatccagttcaaaagaatagaggcaaaagtccttcttcacaccagttctatcacattggcatatttggttgcttagtgcaaccccagggctgaggcacaaccaccttcttcttcttcttcttcttcttcttcttcttcttcttcttcttcttcttcttcttcttcttcttcttcttcttcttcttcttcttcttcttcttttttgatttttgagaaagggtttctctatgtagccctggctgtcctggaactcactctgagttctggctggtcttgaagtcagaaatctacctgcctctgcctcccaagtgctgggataaaaggcgtgtgccaccactgcctggcgagacataatctccttaatgttccagaaggcagtgagagtaaaaaaagctctccctgggctcattaggtgagggccaccgtttttctgacattaaccatccccaacacccatcttcaaggcagactgctccttctgctcgataggtacttccttcattctctgtgcttagtgatagaaccagagttgaagacagacaatgacaaccttgcatgggaacaagagaatcaactctgctgcagacactcatctctccagaagagaaagaaaggtaaagcccggagcagatgggccgtcatgttaggttccctgtgaattggccaacatcttgcctaagacatgataaaagaccaaaaggaattagggttgtggagactctgaagaaacagccgaagagatgcccctggtgaatgagataaggcacctagaaagtatctggccagacacacgggaatttcaaagctattcacacgggaatgctgtggaaaggtcatgggttttatagcaaggatacactttataaaggcgacataaacctgaacacaatgggtctaagtggtgcaggttggacggaatatttctctgatggtctttactcttgtttgtttgacatgaatctctttatcaacagcacaagcctggaattcctgagtccacagtcacatcctgccatctctttatgctttttacgtaaaatcccattgattgagttgggagttttacaactaaaacaatagccggatacaagggaaggaagagaggagtatgggacatttgatctgtggggtgcattgctagaaatgaagcctgggtgggcaaagagatacaaataaatgggctaattgactgatgtaactaacttcaaccatttttggaaatcttagtgcctgggggaaaaagcaccatttgttatctgttacatttaagcactggccaggaggcgaaaaaatagtaataatttgcatggcccattacacttataatgtgctttttgtttgttttgttctatcggtctatctgtctatctacctatctatttatctatctatctttcttcctttctttttttttgagacaagaccttgctatgcagctcatcctggtctggaacatagttctcctgcctcagtttccccagtgctgggattactggtgcatactgcaatgcccagtatacagttaccaaataccttttttgtaaggaaacatatattttttgtgtttctggtacttaataaggcaaatggaaacattatgatagcaattattatcataatcacttttattttgcagttaggagagaaaagttagtatctggcctatgatcacacagttgaaaatgagtggtatcgaattaggtattcaagtttaaaacttacaaatctctctctgtatatgtgtgtgtgtgtgtgtgtgtgtgtgtgtgagagagagagagagagagagagagagagagagagagagagagagagagtgttcaggaccctgttttacacagggcgtcctcttatttgctcctctgtatgacaggctaccaggcccacaagcttggggccattcatgtctcagtcttccctatcactgggaatgtggaggtgaccgagatactcccccatgcagctttatgtggaatctgaggctctgagttcagaccctcgcacttggatggcaaacactttgtctccctgcctccaccttcaaactttcacaaagtcattttgccaccaccatggtatctggcaaaacactaccaacttcacagagaattttcatcacctttcttaggcaagaagtactccacattgcattgtgtgcacataaaattacattttcacactttaaccgacagaataataatagtgacttcctcacagtaaagagacctgggcaggttctctctctgaagagttcaactgggattctgaatctgaaatgctgcctgaattatcccctaaatctgccatccagtggttattctgactatagttattaataaatgcttttgttcaagaagcccaaacatctccgtagtccaggctgttagcaaatctatggggtaagaagtacatattgctaagtctcaattcttttgtgtggatagaaaagctgaggttaagaaagacggaataggatgtccaatgccacccagctggcctaagcaagagcaggcacagaacttggatgacccaacctgggggtcacttccgttctttagagcggtaacgcaaagactatggaaaggtctacgagagccctttgtacagagctaggatagaggtatatctagacaggcttgccatcaaagtgtccaatgaccaacaaggaggcagagaatggggcttatggtgataacagtcccctaactccctctgatcagaagaaattaaaaaacgctgttcatttctcaaaacatccaggctacctattccctctcagatgaggacttctacccaaataaataattgtgggctccagatgaatggagcaggagacactcatgtgtcttacaatacctctgtctctcttccagaaaatatgagccctgagcccccactagatcttattgttgggaatccacctctgcccttattttttccagttcatctctgagatgttttctctctccccactccataaatgctcttgtattgtgcacagaagaagaaaaaactccactgttttcaattattttgtaacaattaagcatgcaaatgtgggagcaacatttaataaacttctatggacatttaggaggaaagaaagaatgaaccaacaaaaatcagaatcatcaaaggactcttacaaaaccagtattttgagcctttaattgaaaatgaatcagaaacaggcgtgtgaaatttcccatgaaatacacacagagttttcaaaaattttagagggtgctctgggcagagaagactctgggtcaaacccagtccacactgaaaggaagaaaaaaaattaattgcagtgaagtcaagcagggcctcactgcccatgatggctgatccataagacgttttggggacaagagcagggaatgcaaggagggatgccctggtgattccctgactaccacgatctacacagatctgtgaatctccagaaggaacagcttagcaaccaagagcagcaaacccaaaccacagggtccattccccagagcactctgggaaaatggtctgcatgcccgtttcctgcaacaaaggagccagctggctcattctcttctggaaaatgaaggaagtgcaggtgtcccagaggccttgcaccctgtagaactgtcttgtgttctactaatgatcctagttgagtgacactttattatgggatctgtgggttctattatggaggaagacatggtcatgtctgagcagttacttctttacagagtgtcagggcaaaagggaattttgtaagaaatttctggggtcttttttccagaatacctgatagtaacacgcctgggtgcaaagctggtggtagactacggtgtcagaaagctaatgatacacattgatgattctgtcacttccacttggtgtcaccaacgttggttacccgagaaaaccagatgcacaccctcatccacgcttctcattccagatagtatatatttgaattattttgttctttgaagaacacctcttttgactatttcattctagagctgttgaccttagagaactggactaaaagaacacgctatctatcacttaaccgcaatgaattgctcttttagcgatgaccatgccaaagagtagattccaatgttattatttttctattccaaatcagtgatgattacaaacaaaaagcctcagtaatattattgcttagctcctcaagtggcacgtacagaacatgcctcttcggttccttaggtggacgatgacaatggtcaggaaagaggatgaaggctcaaagtccttgtgagttgagtaagccttggtgcctttgacctgagaaacacatttactatgggaatgtcttttggggcacatggatccttcatcagtgctggtggtatccttgcccacttctctcctcctaattcactggatcatgaaacctaatctgtttttttttttcctgtccaatgccctcttactctgtaaaaatgtggaagaatgacatattaagttgactctgtgtgacaattgctttaagaggcatcctaaacagtcatacaaacagttgccttcattctccatttctgaatgaaactaaactacaggcaggatatgtgcaagtgggtcctcaggatctcacaggggtctccttgcacgctaagagaatacggtgggaagaaaacgcaagggtgagcacctagccttatgtagagagaatgaaaaccttcaaataatgaactcttcagtgctaagttatgtttgctcccaacgatcctgagagctatggttttctttgttctaccaaagggaaaaggaaacatatcaggaagctgggccagtccacaggaagtctcacttgggctgataaaaggaactgatgtgcagtggcttgggatgcagttataagtcaatctgccttgaaattacaagaaatgctgttcaggagaaactgtagcctgaagtcagccttgctcgggtctttcctttacctgtggcagaacatgcccttctttgtggttctcataactgtccgaatcctttctcttatttaaagtttatgtgtagttctgtaagcagatgagtgtaagaggagggacagaggagcaggagttaaaggaagaggggacaaaggcaacaatgagggaggcagaagagaaagcattgtccagtcacagtatcctcttgttctctattgagttgtggaacatattttgaatgacctctgtagatcgtgatagtgaaacagagcctgtcaatttcccagtctacctcttgcccacctctcagtccacttgctaacaaagccgggctgtctttttcctggatacacagggaaggcttaggtcttcgtgcgtaattagtggtggagtatgaacaatttaatgaatgcgaccagcacatgctgtgctcaggagtcatggcaactagaaacagcaaaatctatgtatttctcacaagctgggttagagctgagccttgtgatgcaggcaggaggactgcaaaatctatgactgcctaggctagacatcaagttgaggttcaacctggacaacttcacaagagcctggctaaaaacatacagtaaattaaaaacaaaacaaaacaaaaacaaaaataaaaacctcaccaaccttcttttgactattgctacgtaggaaagcacttgtttagaacttatgcacagcccagggttcaacttccaataccagtaggctaaaaaagtgaggaagagttatgctttgactctcaaactacatggagacatgtgtatcaatttggtgatttttaatcgtgatgaggctccattaactttggaggtgataggattgggtctggataattgcctcccctttcttgaagaaattacttaattgcttcaaaatggaaccaagacatctatcttaggatcgatataaggaccaaggtaaatatatcttaagagccagacatcagtgccgaaaacaagattaataactaggttttaaagttttttctgaaaacaagattaataactaggttttaaagttttttcttatgactctgatcatccaagttttaataccccttagatgaatggtgaataatgcagccagtcttaggtaaggactagatgaaaagaagtcttagttggaccactgggtccacacacatggctcatgatactatttcacaccgaattggggccttctggggcagaccatgtttgcccatagcactgcaccacttcctgttttaagaagcagaaagaaataaaaagccttccagaaaactcattaagaggctcaacattctttttagacatcaaataagtcctcaaaatattgttttcttaagagttaagtgtaaatgaataaaaaccagacaaattcaatttcccttcaattaaataggatttttttaaaagtccagggtaaaggctcttggagccaactgtgttttggtttttaaatgcgacttgacttttagaaaagagcctaagaccctggtgtacagttggaccctattcttagatggtgtcaacacacagggatcaacaccactgcaccatgagttgccagtggagacaattgggcttccaaaagctcagaatgcacaccctcagagctcagccgatggctggtcttaagagtcacccaatcacacaagatcttagagcagccacaccagatagaaagaatgtcaaagagttcagtcacccacgctccaaaatcagacccaggagtacacagcctggtcagaatgaatttaggattagaagagaatgttgctactgtaactcagtttgcacatgaaatgattaaagagcgaaatgtcatgtgagcaacaggagtcaggtgacttgcctaggatccaacggttgagatagagtctgagttagactggtgtgtgactccttggccacacaatttatcaaaatgagatctcaagtctctcggatccatgcagtttgattagaatggcttcaataaatctctaacagaccatttttatttttgcttctttttaaattttgaaagtagtaggtagtaatgtttaaagaataagatattccctgaatttataatatgaaaggtagatgtctgcttttcctattcagaggcacctagttttaaccacgtaatgcatgtacttctagaaattatttggacataaataatcatacacatacatttgcttaaatctcttctgtaaatggactaggcagtttggaatttttttatgtgataatattccactgagaacttcctacattagtgtctatagaaattattttattccacgtaacattagcatggcaacctcttacatatatattttccccaactgtttatctagtgttttactgatgattaaattaaacaatttttcatctttgccattataaagatgctacaataagcatcttgctcatgtccttagtatctgaataaatacagatgaggacaaggcaggcaatcaccctttctaacatggcacattaatgaatcttttcacttttgttgtcctcttaggtcataatggtagaattctactcttttcatttgaatctctttatgtgcgcataggcttgagattcttaagttgattgtccatttgtatttctccttctggtatctttgtccatttcccatcgagtagtccttttcttattgatctgtaaatagtccttgtacctgacagaaggagaaagtctccaagctttcttgattatcttttcagtcggcttgtttcttttttgtggtgctggcaggcaaacccagcaccttggccatgctgctctgtcactgagctccagggcagtgccatcttatttacttcatgtgttttgtttgtctccatgttaatatacacattgaagacctggaggaagagagaaggtggaggagtttcctgggctctgggcttctgaaactgtgacataaagggccactgtcacctaagatgaagggggcatggagctcttggggcactatgcctaatgtgtccataacgttggcttatgcataaatagtgcccccaaacagattttgccttctttggaatcatggattatcagagctcaaaataaggaagctgagaaacttctactctttagaaatctgaaagagagagagagggggggggggaagaaagagagagaaaaagaaagaaagaaagaaagaaagaaagaaagaaagaaagaaaaaaagaaaggaaggaaggaaggaaggaaggaagaaggaaagaaagaaagaaagaaagaaagaaagaaagaaagaaagaaagaaagaaagaaagaaggaaagagagtggagacatctttttctcattcaaggatgtggaccatctctggtacactgtgcctactgtgcctattcaatatgagtgaatgaataaatgattatgaattaaagaataaatgtctaaatacagaatgacttcatagacatataaattccaggatattgagaggaggattccaacagagtcagtataaagatgacttaaaagctgaattatctacaatatcaaagatttttttcatcctttagctgcataaatagtagtgtacaattagttgctttcagactagatgcctttccacataaaatcaatgaacgcacgcctactcagaatgaacaaattcgcttctggtctgttagattccagtagatatgtgaaagccacacatgtctagaaacaccgggttaaagctctcttgccacctgtaattcgggcttcttgcatgtgtgcactgaaatgtgacataagtctttcatgaccttggatgctaagctctggctgaataactgggcctgcttttgggaaaatcattccacgggactagagtctgtgtcttcctggagagtttgaaaccttttggactctgagattctgaacataaaataaatggcagggtgttgttttctagagataggaaatgccttatagacttcaggtgtgagaaattttgaagctgccgtaaagttggtctgaactactgaaagtgagctataccttctgtctctgatccaacaggaacgaggcacaaaagaatgtgtgtcttggtttgatcagatgaaatgtgagtgctagtaatggagacacctggcccaacctacacatgagagaatgtcacacttctctgaatttccatagaaattgggtttgagtttcagggaaacaaccttcccttctgcatggtttcttaccacctgctgactcattcttaaaaagagctgaagttgtcaccgaggagagaccctcccaatcacagacacacctcacggtgagcttgctcagaacactgggcaaagagtcacatgtgaaggagcaaacggaacaatcaacattctaaaacatttctcatcgttctggggatcagatccagccttgtgcagacgaggcgcatgcttgaccactaaactgaattgacagcccttggctcttggaaaccgggttttggcatgtggcgcagcctgactttgaaatcactaagtgtcccagactgtccttgggcttgggattctcctgtctctatattttaagtgctgggaatgcaggcatgcgcctcgctcttgtgtaaccacatttttataacagcagaagagatggaattttccctcccttgcttagtgcctacttagtaagcactgtcgggtggacctttctgttttcccaaactcatctctactgtcttgtccttacggctcaccagaagtttctagtaaagtttctaataagccactgtcattcctattgactaggcagcaagaagacagtggtaggacagtcactaagggatttgtacggctatgtagactaccataaatttaaacattgattatttctgattatatattttataagactcaatcttttatcacaatatttaaggaattctataatctacttctatctaatctttccgttccttctccaatgcatttcctttccaaatcctttgaccttagtaccacatataagtctatccatacctcaaggctcaacttccaggttcacttatgtcagaaagtagcatgaaaggtgtgtgcagaagcatcaggcatcctgcaatcagaaagactaagcttgaaaaacccaactctgccacctattagctgtaatcttgggcaagcaatctcaccaatgtgaacttccacttcttttgtgtgaatcggagctatggcagtataaacttccataggtctgcagcaaggatgaatgccaagggaacaaggactaagaaactacccatgtaccttttcattagctactccttggtgccattcagatttttctttccttgcacagggctgtcatggcacttggtaaaccccattagaataaacagctcatcttctagttgagaatataagccaggtcaccaggtctggctctcaagagcagccagacagttgtattaatatggctggtcaacatacagtctccacttcatacagaagactgttattctagcctgcctcattttaaagatgctaggcccaggggtagcagcatggtgaggggatggtgattctttttgttacctctggagaaacaatctgagtgtatcactttgtaacgtggcagaaataaaaacaacagaaaatgaaacagggtgtagccttctgcagagaaaaacacctgcagaaccttgagacaaccaaaaaaagaaaaagtattataggccagcatggagcatcttcctgtggtcccagctcccaggaggtgaaacaggaggctcagaagtttgtgatcgtccttaagcacattgtgagtttaagacaagccaatgaaactcagactgtttttctcaaacaagcaaaaggatgctggggagatggctcagtgggtaaagggcttgccacacaagattgggggcctgagtttgaatgcccagagtcacatgaaaacagacagaagtaacacaggccactacccccagggtttctgctgtgagataagaggtctaaacaggagattcttcagaagatcctgggccagctagaccctggcacacagcagctgacagcaaagaggcactatcgaaaacaaggtggaagatgaatgccaattcctcaggtcatcctgttagcttcatgtgctggtcatgcttacacacactcacacacactcacactcacacacacacacactcacacacacacacacacacacacacacacactcacacacacacacacacagagacatagacagacagagagacagagcgagacagacacacacacacacacacacacacagagagacagagacagacagagagacagagggagacagacacacacacacacacacacacacacacacacacacatactgaacaaaagatagacaggtttttaaatccagtcttcaaaatttcatgttattcacaacaaaaaatattctatgccaacattatacagccaatcatctagatgaaatagagcagaggatttcccattctaagccaataaatgtagatggcttaatctgaaagcctatatatcaagctttaggttgaatgagactttagtttggggatattttgtgaggtttaggaagaataaagggaagtttattaacggcaaaaacacattgccaagatttttgtctttatttatttacttatttatgtattctttttgctgggaattagactaatgctacatttctagagggaaaagggttttatttcagccaaacaatttttaaaaccaatgccaacttagtgctcaacctcaaactaaagaagacattgaaattttaaatcttatttaacggggctgttaccaaagaccttcttgcttcactgttcagaaaatagatccactaggtttctcctaatacatccgagagtgttttatttaaagaggcaaaacctcattttttttacacctgcccaccatcaataaaagggcccactgattatttaagtaatagaatattttggatagaattttttggtaatggcaactttgtttatgatgcatagaatcaaagcagatttattctggaaaagagttgtgttttccaaacctgtctgaaaattttgactgtccctcctccccagcccaccgtgtgtgtgtgtgtgtgtgtgtgtgtgtgtgtgtgtgtgtgtgtgtacagatgtaattcaagatagtgggaatatgtttgtcactaaatttcagaaggtgccagatatttcatggtttcttttttaaaggtctctttctgcagtattctataattttacatgatgtgacaagtgacatcttcatgttagagtagtaagagcactattctatctcctaggtcccctgaattctcatgttttttcgtctgtgatcatgaactttgtattcagcatgccggaccttgattttcccataggtgagagctaataaatagtttctacagctttaaaaactgcacacccatgaatgtgaatagtatgaagagaaagcttttaagtggcaacagttcatttggaagtcacttcagagatcaatcgcgtggtcatagggacagacaaagtaaccatctagtttgcctggtgtccttgtgaatttaggtgacttcccctccttcccaatttctctgcccagagagagtagcagcctcccctctatctggcatattgctcctctctggttcacaggggagcttctctctctcctctaccatcctttagtgcttgtttagaagtgctctctctactcaagcccctttgcaccttattagcagtgccctccctacctggtccagtgtcatgggtgagcactaatcacgttcgtctctatgcacatccatcactagatgactttcaactgctgattatcccacatacacaaaacagagccttagaacatgagaggtacaccacaaatacataccaaagtcatgaaattcgcagaatgttaaactcagacctatgtcctgttaactgtgagcaacagatcttcatcagtacgaaggcaagaatgcactaagttcaacgagtgagcatccacctaaagcagcagatcttatctcaccctctcttcggcttatctaaagaagctgctttagacctactttacagatgagaaaactgagacccaggagttaagagccttgccttaacacacacacacacacacacacacacacacacacacacacacacacacacacacacacacaagtagtacaaatgaaaatgaagctaggttttctcccaggccttcctctctttccgtattccccaggttcatgcacacaggttctaaaactcttctctggttgatttccaatctttgatggtgcactttaccttcgtagttctacagatggcatcaatctgatcaaagaaaacctgcctagaactcagatgcagtttgaaaccaggtcatttcttcaagcagcaagcagtatcacgtgccttctaacactgataatatcgctgtggcgagcaggggtggggtagggtgttgtttaatatgtcaggttaacttgtctatagctaaagaagagcaaacaaactgaggctttccatatgagttctcccatcagacattcttggaaaagcaggggccctaacttggaaaggcagcatgactggacatttacaactcccaaagatagatgctaaacaaaacaggaggctactgtaaagaaagccagagttccctggcaccctgaaccatgtacaccctgggcatcaagacccacaggtattttcagattgagattgaggaagatgcaggcaggtgcataagatcacatcccagaatcactcagtgctgattgtcccaggctgttcaaactggcgagctaagtgctctaggtctgtatctacagatttacatttgattgatagtatcctctgacctttgtccatgtagggcaggatagtggtttagtacacaagcaactgggacaccagtgtaaagtagtcccatgggatttttatgaagattatgaaggtcaaagatgtcctatagctgtaaattcatataataagatcacaagttggttgacattccttccaattcagtgcctttcagtatctacaccaagcatggcattaaaccatcatgtaagtggggtctaggaccccccaaatcagaaggtcacatataaacaagaacctatggcttctacatagctaaaaggctaaaggatacacgaaagactcaatcttccagaacctttggtatccagaagatggcttgaaaagcgattgatctataggtagccttggagttaagtctcccaggtgagaaacaaggtattccttgggaggtctggggggggggctcatgagctcctgttagttattgaccctaaaagagccctgacccccatctttggtatggagtggcagcctcctggtctaaggttgcccttgaggcctgtcatgcccatcccattgtgcacagtgtggggttaacacatcctgggtacacagaccacagcttcctccagagctcagggcctgtgcttagaggtctgaacactgcgcagatattgcttcacttcttctcagagtgtccacattaagcctctggagccacattaccaccctttaggacctaggggagtttgggggggggggttgtgagtagatagtgttctgaatgggggtgtgaagattttcgaaggaccatctggttactgaacctgagggatgtaggcacttgcaggaacataccaacaggaagcagagaagcagggcccagggacctgcactgtcaggtctccagagcacaccccttaggaacactctcaagtcaggtttgaaaaacctgtggctaggtggttgtgttaaaaccccattacaatcggctatctcatctgtctttgagttccttcagttggtgccttttacctaagtcagcatgtttcagagaaggagggagggagagagaaggagggagggagggagggagggagggagggagagagagagagagagagagagagagagagagagagagagagagagaagagactcttagaaaataaaaacactctgaccccacccagaagataaaaatctgttaaattctctaaagccaacaacaccttcacctcctcttcatcaagccatgagagggaagtggattcctctgggttctggagaatggcggctctgccagtccccacctcaccagcctgatagtttttccagagcaattcctgcttgatatgcagccttgaagctaacgtctgctctcattcattctcctaagtcctcttaggctagtcacgttagggggtgtccctcgtctctgctcctggccctacttccccctttcggagggagcactcggcctttctgaagcgtgacagggaacccagactcacaggtctgctggtctgcactttgcaacctagacccaagctgggccggcgcgggtggcgggtgggggtgggggtgcaatcggcaagccccaggccatagactctgaaccagccaccgcagggggacagctgttgaaggagtttaattcttactgagaggacagctcctggatcccttgctctaaagcaggcgcacgcacagtgtgcgggatctgaggcactgaggagccggagagcaaggagattcctaacccgaggaactgcgaggcgggcccgttagctccaggcagccggcgtccgcaactgccgggcagcagcagtgagaaggggggaagagaaaccggtctggctgacaagtaaacagggtcttccatctggacccgccggctcagccggatcctcagacaccctcccttgcaccccttgccctcccgcaactactcctccaactcgctcggagggtcgggggaccccagccagaggcgaacgctgctcctgcccgcgcagatctcggcctctggcgtgaggaagctggccgccagactagtgcctggcgccggggccaggtcgtctgggtgccgggtgggaaccgacccggcgatctcccgcccgagactctgctccgcgccccgggtccccaggtttcagctgccgggtctcgcagccccttcgggcggcacagtgggagcctgcgggattccacagtggcgcaaggagtgaggggtagatcgccctgggcgggaaggctggccggcctcctcggaatgggggactcgccacccggaggagaccgcgcgaagccggggcgcggaaggaagggagagcggccacgtcttccgggaccccggcgcccagccctcccgccgccccggtcggccctctccccgcgcccactgcccagccgcttaccttaatagtcccgtccatttggccaagtctgcagccgagccccccaatattccacacattgacccggttacagcctgacctcgtagccccttcagattagcccggcgcggcctctttggcgccctgggccctctctgagtgccccctgcgagcgccctgccctcgctcccctgtgcacgtttgttgttgtagcggatcgaaaaagagacagttaaccggatgaaactttttttcagctaattttgggaagtgacttcactttgcgatcggggaggaagtcctatctctctctctctctctctctctctctctctctctctctctctctctctctctctcatctcgccctctccactctctgctctctcttgtcttccctcccccacaccccctcgtcctctcctcgccctgcttttcgcatcactcgctatataaatatacgcgggatgcccagttacattcatgcactgcgcacacaggatacttgctcctgggagataagagctggccaggaacaatgacggggtccacgcccagtatccgctccctgattcctgaagtctgcaactcccccatcaccttccccccaaatccaaagccaaacgcctctggcctctttcctttcccttgggcctttggccgaaggtggccctcctgactcattcactttccgtttcttcccacagatacattcattaatgctttttccagccggagtcaaacttttttggggatgggaggaagacggcggaagagtttgttagaacaggggataacctggcgatgctgaccgccaggggagattcggatgcagatcaaggcaaacctactatttttaaaaaggaaggaaggaaggaaggaaggaaggaaggaaggaaggaaggaaggaagaaagaaagaaagaaagaaagaaagaaagaaagaaagaaagaaagaaagaaagaaagagaggagccgaagagagtttttgcatctaagcgctggtctccggataggctcaaagcgaattctgggtcccgcggacctgacctgtcaagggctcaatacctcaagctttgttagcagagagatgcccatgctttggcgcgcctcgactccgggctccacagcccgctaaggaggtagaccagccacaacctaggctttttgagttaaattctctcacctatcaggacccgacggcccaagttcttcaataccatcgcagcccccaaggaactgacaccagggcgagcttgccctccacactacgcagcaggacccaggagcgcggcgagccgcggctcagcagagaccccaccttggatgagaacgggcagtctaagggtccaagctagggactgtcattcccaaccagcggcgtggcccgctttaccggctcggttctttctgctatcccccgcgcctcccctgctggacccaggagctctcttgttaaggcttctctggggtatcggcgctggcggcctgactcccatctcccagactttgaaaacaggttacctttttccacgctcttcagaccacgctgtggactttctcactattatttaagagtcctcccgggaaaagaggggaaaaattccagagcagatccgaataaattggaaaggaaaaaaaaatcaagagggtgtccacggcggcaagaaggtgacttattaattctttatttcttcaggagcaattgcgctcgctcgctcgcctccctccctccccccttccccctctccaaattagtctcatcaattcagctccaatttggggttcgaatacagacacgggtctgaacgtgaccagacctggagtggcggtgcagcctgccagcaattgagactcggtttactgtggggggtggggtgggggccgggcccactccccctcctcctgtctgcttctcaatccaggggtctgctccggggctcccctgggaccgccacatctggttaccgctagcggggtcagtcccccccctttgcctggggccaccagttctggagttcaattaaaagaaatcaggcttaaccctttcctgcctgcggccgggctgcccgccctcttgctcttcccttcagcgtttccacatgctttccagagaggaaagaggttaaagggaaagaagaatgaattacatcctttcaaaccccaaattgtttccttttcagcccagacattcaaacgacaacgtagctttcaggagggtgcacccaggctatactgagcctctttctgtccgaaaggagtgtttacgtctccccgcagagggtctccttccaggcactggacagttacaaaggccacaaaatagccaatccacatttaatcaccacgccccccgccccgccccgccctgccccaagggccaagtggcagacaatcaccaggttttcctttcggcttctgctgatctggcaaacgacagtcacgtccattgctgaataacactcactggaataattcacttggaatatccccgaacttcattgagcccaattccttctcaacaagaattcttgttcaacaagaatccggataaaaatgaagacttgaacccccacctcagctagggagtatttttttgtttgtctctgcctgcaaaccggacactgaagcaatttcacaattttggggcgtaggggcgctggcataggctcccccgggcatgacaggcttaggcatcattgcaatctattgacattttaccaccgacccctccatcggaacctcctctcattcacagggttctccacacagaagaaggcactgtcccccagttttgaacagatctgggatagaatgtcgggttcctcccatcccttgctgttgctctggtgggcgagtttgcccgcttatgtaactctggggatggtgctccactggatcctcctgactctcttttaaatcccgaaggggggaaaagccctaaccaaacacaacagtaaacaagtctgccctgtttaatgtggttaccaccagacatctggaaagatggtttgatcctggcagctcacattgttttcatgagcagccaaagagaatattttgaatgtttgcattgagacaaattgatagagagcctgcggtgaggcctgctgcaaatgaaaactgtcttgtgctggagagggcaggtccctccccttctctcgcttctcactccccttccctttcctacccccccccccttttggctctcactggctcttcccttccctgtgtacccgtccagctcaggaatggcagcccctgcccacacagtggtgcacaccctctttcctggcgctctaaggactgtgggcttcactctttcccagactgggcagggctgggggctggaggttgggagatggtaccagtacctttgctgctgttccaccagcccattcttgattttcaaatcaggggaagctcatagctcaagaagccaggctaaatatattttttttaaaggtacaatctggaaaagaaaattccaacaacaaagcatcctgacacacgtttctaagttgtatacacttaggtgactagttaagaaacatttgaatttagcgttttcattaaagcactgaggagacgacttgctttatatacacttgacaatttcaaagatgcggaagttctgcttccccagggagggaaacggccgacaaaacgtgtcttggctcgctcaatgtcagcccttttgaccgggtcaagactttccagacgcaagcttcccgggctcctttggtcctagactgggacgggagtgggaggacaggacaatcggagcccaatccctggggtgccttcggaccagatgacatctgggtcatttgaagttcctaaagatgccaggtctggcaaagagtctgtggcagagctttcccccttgcgttctcttctcccaccgattcagagggtatctaactggcaaagcaggaggggaagaggtggaggagggggtgggggaaggggaaggggttggcaggcgaacgccaaaactccagactgcacaactgcagcttcaagtgtctggcctctcgctcgaggccataattaatttgagatttatttttattggagaactcgagtctcgtctgaccttagccaaacaaggcagcttgagccgcccctggatgcgcttgaatgctggggaatatttctgcaggaaggctctgcaggagcgcctgctttgaatttgtttctcagacttcatccactcacagattgaaggaagatttagagcctctgtacgccctgcccgctccccacgctagttcttgccttagcaccgaccctgttcaaaactctacgtgggaggccgcagcgcctgcagagccgcgcagggggccaggccaggagggtctcagagacccgagccccagacaattggaaggcgaacccccagaccactaggcgtcgtcgagaaaaccccaagggagtcggagactgaccagagagcacaggatgacaggaggtggagaccagcccggtgtcgcgaccctcatccagtggcggcgccataatggggactatggaggtcgcgggtgggttcagcttctggaatctcagccaacccgacctcccagtagccccatacaatattctctccaaatacggaccagtatccttgaagcgcagcttcaggacctacatgccagaaacttatgggcagtatcactgtgcaggttcaggacctagcagcctccctttgagtgagtcaagggagaaggaggatgtcacccccaaaagcagcatgggcaaaatcctcaggctgatagagtggaggacagaaagaagagaaccctatcaggtttgtgcaggtgtatgtgtgtgtatcagatttcaaggaaacgccccatttgatggaataggaatgtaagtactgtgctattattggaccgcattattgcactgggtctctggtcttctccatccacctcctaactcagattccgcgtgtgtgaaagtttaggctggaccactggattcctctggactcttaacctctctgaattagtgtccctctctgcgcaatggccacagactgggatgcatctaaaagggctatgatggacatgaatgttagaacttctttggcagtcagtatactctccttagtgtctgtgtcttgaacttgctctcttacaaacacgcacaatgatcagaacagggcctggcaaagggaggcagctgtcaatagctaggcatctaggactgcatatcagcatctttaactgtcaccgaggttcctctgtctttttctctaattccttcaatccccaccctgaaaagggctctcctgcaggaccaggtctgagccctcagtctgtagtaagctgcatccagagactgggtggagaggtctccttgttccttagggcagggctctcagctcctgattcccggggccaggtcacctgggctccccttgtttatcaacaactctgagctggtgcagacagagaacagcaagggcttggcagtttgtgcccctctggcaaatggtcggtgatggaagcctgcagaatagaccgaagattgtcctgccacgcagaactttgaccaacatcaatgagctcctttgtgcaacaatacaaactttgtggctgctgaaaaatccattttcccccttgaaaagagctcctgtggcaagcggctcctgcggcagcccacagctctcccagggcctctttgcccaccccaggctggtttgctactctgtcctggaccagcttgttttctccatgacccttaaccctgggtcagaccctgggtttcccccttgccctttggagagttattatccctgagattctgggacctggtgtctgagctggaaagaggctgcagcccaggatgaaggccatttagaacattgcatgtaaggctggaagagcccctgggcttggcttctttgcagggagaggtgaagggtaggagctatacctctgtaaaactggaacccagagccctgcctggcccagtctgatctcatcgtttactgtggtagcacctcttgggagccatccatccatctctgcaagggctaattattgacacggttttactccagttcctcccccacccctcccatccttgtttagtgactactcctcccagagcaatcctcctggactcctcctgaagagaacaccattgcttcagacagcaagcagaaggagggagatgctttccactgccaacaagttcctgaggtgttaaacaagtgctcccttcttagacctaagaaacctataccgaagatgttttggcagatgggcccatgccctgccatccctttttctggaagcaggaggatgctgggccagggtgtgtgggcagggcacttggggtgggtcttaggaaggagcccagttctaaaggaaacacctttgccctccacccggttcttggctgtgcagagtgaggcccagtttctactctgggcaaggccattcagtgtacattccccaccccacccgccagggatttttcactgaacgtgtaacccagatgtcccagtctgggtttgtttacattcttgggaacggttgtggaaaggggaaaacaaccccttagatgagctgtcaaatacagcaatctgagcttttgagggatgggccctctaggtgagtttgaaggctgagcaggtccatccagtaaaagaaaccattgggtccactgtacttgcacatagtcacacacatgtccatgtgcacacaccagtcacattgagcatgcaatacacaccctgtctccccaaagtgctgccctgatgacagaaaagccaagacttcactctttcttttctttttttttctttttcctggataaagaaagaccagatcaaaggtcttcaggagaggtgggagttatgcagagatcactgcctgtttaaagatgctgtctactcttaccttgatgtaagaggacatgtcagggactgtctgaaacatcttgtgctaaagaggaagcgcctcaaggctccagaagcaacctaagtaggaaaaatataagtatctcaaaagtgtagtaaaggtgagacaagctccatatagagaaggcaatgggggctgggctggtcccttgagaagcctctagggactctctgcctctgcctatagaatttcaggccaggagaccctgaggcctgaaccagctttctctttgtacaaaccagacattgcaggcttcacaagggctcaagaggtttcactcctggggttttgaagagtgcaccctggttagaggacagaaaggattggtagtccttgggaagtggagagctatccttttcaagctgacagtcaccagagaacagatcataagagagtaaccataggccctggggcagagatcttcttggctctcccacctccctaccactaagtcaggctggtggcagacactctttccttccagggtatggttacctcagggagaaagactaggttctgacgtttgtggaggcccctttccgatgatctaacatctccctcttttgaaagaaaacacatctgcagcacagcccaggatggtgggcgccgggcacttgttttcaggggcagagaaggtggtttattaggtcagagtccatgggctggagaagcaacgccactcaccaccacctacggtgtcaggtgcctctgcctgtgcaggtctgtcctctgctttaagactggggggctgcctccatctccctcctttcctcccttctccgaaaccacctttaacaaggcaatcccacagcttctccagcagccaatgtgtttctgataaagtacttttctccctactaacaaattccagcttttttgactcctgaagccacaacacaggcactcactacttcagggactaggtacttgttctctggcacatgcgtttcccttgctgattcagacctctttcttcactctccccattttctctgaacaccagtgcagggagggtaaaagaaatgaacaggaggaagagatccccaaccagggcaccagggcagtcaagggagggagggagggagggagggagggagggagggagggagggagggagggagggagggactctcagaagggcaggagccagtagatgccagaggacactcaccttaaaagacacccttaccaacaaagccgagagagctctaggatgtcctggctgtggatgcaacagtattctatgacccagctctgtggaactttgacaatgaagaattaaacctgatggttcttctttgctcaaagctcagatgcagcctctgctcaggcacaccggaacctctgctgcagccgccagaattttcacagcagccttcctagcttgccgtggtggtccgtggtccagtcagctctgtgcatcccccctacctcttcctcctttggctttcccctctggtaatttgatttccggtttcttatcaatatttcaactgctgtctgacagaattgttctaaaaagacagccacccatctgtccccagctgcctttccagaaacctcctgttgttaccaggaaatctctaggaatacttagaaaccacacagcatcacacacagacacacagactaaagagcccaggctgaacacttctgggaaagtttgaatgtattgctatgtaaataatggctctccagacttggccttctagtagcacacacactcatgcccattcaggctcctgttttcccactttccccttatctgatcctctcaggaatacattctccggctaccttctctttcagagctgggcaaaatacagccaccagggagatatctctatgttgagtcttttctcaggagctcaggcattgaaaagcactcactaacaagttgttttggcctcaacttctgttttcttgggatttaaaatgttactcgtttcttctctttccccttgtagaagggccttggacagggctcaggtttcagagaccttggtctgatcagatgccttcccctgcccccaacaggctattccccaaggatgcctggcaatgtggtccagttgccttttgtataatgggctgggcagatttcacatttttacactccccttcaagagtctccaggggaaactgctcacctggcctgcctggatctctctcttagggaccacagtagtgagtcttagatttttagttaggtatctgggcaaaggcaggggcaacagaaagtggagatggaggcatagtaatttgtaaaaatagcagcaggcgcacacttttgtgctgttccttcccttccttctggagtgcccagattcctgggtgctttggttctggaatctttacaaagctagtttagcatcattcccctgaactccctgctttccctacagactctggacatttctaaccaaaaggcatgggacagaattccatatcaggagaaagcatactttatctgcccagatctgcccgcgtggggggctctgctcaagactggagggcgttattcattatttccttctcaacaatatcccgattttctctcccgtccctcccccaaagcgccacatattgaaacattttgctccttaataagagcagacccaagagctagaaggtgaaaggccaggctgggactggtgactggagcagcccgggatctttgcccacaaccacgttgcccctccctacacattcctgactgtagcttaggaaaacaagacctcagaggaagggagggggctaacagtccggagccagggtccctggaattctgctcttaggattcttggggagatgtcgtctttcccaaagggacagcatactatttcaaacaatggtcaatagaaattactgtctacatgtacatcccgtgttcttaaagataagctttctttaggaaagtagagaggtctgaagggcttcaggtattctagaggaaatgagagccaaacaaattgtttagtgccttaccatccctggtcggtcccccccccccaaccccagccctccgtcttccgtcttcctatttatttatctatttctatatttttcaggattgatagtaggggttggaccaatggctgggcaagtgctctatatcaaagccttcttttcacttttaattttgagacaggttctcattaagttgtccaggccagtcttgaacttgagctcctccaatgcaagcctcccaagatcacaggtttgttaccagctcctgcctttttaaaagggagactagtaagaggccaccgacttactgttcagcagtcctcaaccttcctcatgctgtgaccctttaatacagttccctatgatgttctgactccaactgtaaaataatttcaatttactttatagctgcaattttgctacagttatgaattgtaatgtaaatatcttctatgtaggatatttgatatgcaacctctgtgaaagggttgtttacccccacccgagggatctcaactcacaggttgagaaccgcagctctaagctcttccttctttgtgttttttgtatagtcctgagactgtagtcatttgcagaaatatctcttggatgtttttttctccttattctcttatgtgcatcctgaaggcaggcccagagctaattttattcgaagatgagtagctagtagccacacaaatgcaaacaggtatagaaaaggcaacaattacccttaactaattatctttctcttaaccaataactaaagagaagaatgggaaatgacccagatcatcacatttgtcccaacagcaaagctttacctgagtggttctgtttcatagtctgctttgcagcaagagtgcctggtagcaatggtcacttgcttcatttgtgcacaggtggcttaaccatggccctgcgatggacccatatctaagctgatggaggtgctgcctgttcgaggctctggaacaaagccttgatgtttgtgacttagttccttctgtacctgtgattgcctcgagtggctattcattctcacggtagcaagaagaaaatctgtggtctaagaaaacatatgagcaggtaatgaacagagagttttatagagctccctttagataggcttttggacatgagtgtgcacatgtgcctgaagcctggtgtacatttgattgtgtgtgtgtgtgtgtgtgtgtgtgtgtgtgtgtgtgtgtgtttatctgtacacaaatacgtacacaaatttgtagtagctgccagaagccggaacaagtgggaagggtggacaggaaggactcattaaagccagctggtactttcagtgtcgtataaagaaggtcatagagttgtcactggccactcatcttctatcaagactgggcttgtagactttctacccagagtctagaaagcaatgctgacacagaggtcaggagaggaaggggagtagaagactgtcagcaggggaaaggagaggaaatccgggtggtacgctgtggtccatccaacagtctgtgattctgagcaaggcaattaggactcggattccttacctggcaagtgatgctgatgtgtttacacaatcgtgcaatgtgggccaatctgaatacactatgttctctgtgagagtgttgaacctggagaaggctatgtacggatgatcggcaaaatcaacattctgaggtcttaagacatttacaatccagtcttgattctgctcctaatcctggtgttcttgatgaagttgtgtcatttcagaatttacatagtgatccctgtagatatttaaaggactccagagtgtgaaggtctttagtagacagggcctttaaaggggtcagatagtaaaaactaaagtcatgcaggtgggctttaatccaatatgatcagtcttttctaagaagaggaacctaagccgggcgctggtggcgcactcctttaatcccagcactcgggaggcagaggcaggcagatttctgagttcgaggccagcctggtctacaaagtgagttccaagacagccagggctacacagagaaaccctgtcttgaaaaaaccaaaaccaaaaccaaaaccaaaaaaaaaaaaaaaacaaaaaaaaaaaacaaaccaaaaaaggagaggaacctagaacccggggaagacagaacctagagaaaagactttgggatgatgcagaaagatgatgccattttctagccaaggaaagagacctaacagatccttgatcttgggtttctactgcctagaagggtgaccaaatatatgtatctgttgcttaacca

SEQ ID NO: 17 - DNA, 63179 bp, Homo sapiens
atctctcatcctgtcatggccatgaattcagctttcaaggtttctctgcagttcccctggccaagaggggctctgttcattcagatgaaggcttagaattttacttttatttctcagatccatctgtgcagctcagggaaactactaaggctcccacctccttaaaaattgccattttctcatgctactggtcactgacgccttggtttaatgctttttccttttttttttttcctttcttaaactttttttagagacggagtcttattttgttgcccaagctggggtgcagtggcctgatcgtagctcactgtagcctcaaactcctggccagaagtgatcctccaacctcagcctcctaagtaactgagactataggcatgcaccaccatgccaggctaattttcttactttcttgtagagtggtggggggtgcgggggggaagtctcactatgttgtccaggcttggctcaaactcctggcctcaagcaatcttctcaacttggcctcccactgggattacaggaatgaaactggcactttgagtttacagagacaacatcccctccacatttcatgtgacatatgtgcataacaaatggcaaccagcaaaactttagtacttggaatttcaacaatgttgagactgatctttgctttagttctttgaatgggtgggcctcaacatgactcattgtagccaagttgactcctgctcctcatagttgttatctattagtctggttgtttggttttgtacctcagattccatataggttaggtgctctatcagaaatgcatatggctgcaagttattgaaaagccactttagcaacacctaatcaaacagaggtttatttttctcacataagtctggtggtggctggacacagtggctcatgcctgtaatcccagcactttgggaggccaaggcgagtggatcgcttgagctcaggagttcgagaccagcttgggcaacatggtgaaaccccggctctacagaaaaatacaaaattagttgggtgtggtgacgaacacctgtagtcccagctactcaagaggctgaggtgggaggatagcttgcgattctcttaaccgcagcctcaaggtttccctaactttaggtgtcacatccataaccaaggcaggcattacaaaagaagataaaacatcagccaaatttgtccccttttctcaaaaaagcaaaagcttttctagaaacttccctgtaaacttatgtttagatcacatttgcaaaaaaacaaaaatagtcacgtggccactatggtttcagggttggctggaaacttgcatatttaggttttccactctctaggttagaggcaggcaagagaaaataaggctgggcatggaagtcaagttagccaaaccagtgactgtgacagattgcatgctatttattctcaatggataaagagaaaataatgtgattatctcataatgaaatcaatactaaaatgaccttgagggtcaatacttctacttgtaccggcttcttggtgatgtttgggctatgaatatcagtcctgacactcgactccaagccaagaaagaaattccaacgcaaatgtctaatattgagctctgacatgtacagagcttggaaactggcactcctttcaacaacaacaaaacattgaacaaacagaaaagcaatgacttatcttagaccaagagatttaaggccccagggcaacctgccagcaccaaatttggagcgataggtgaatacagagaatcagagcagaacttagatttcctgaagcagcagccactggagccaattaggtaggaaaacttaagtggtggttttggtgaattgcttgaggctgggtgtgggctagtttgaaagttgaaaattcctaggggacaaatcggaggcaaaggctacactttcatggcttttgccttcaggaaccccaccagtttctgacagtatatatcagagaatttctgcttcctgtttcctgaaggaggagcaggaagcaaccactttgaaatatattcagtatattctttgtaacaaatgcttgccctacgagggaaactacctttccagaaccattcctgacctaggaagggattattagccagtgctagtcctttttagccttcttatctcatctaaagggagaaaaaaagctaagaaataattctgaagattacagcccaggaactcaactaaaaatctgaaatttaatcataaaattatagaacatttcccttccctaacaccatgccactgcatcaacagtgctccagtataatagcaatagattacaatgggagagctgagaaacccagaccatttaagaagaagttgatagggaaacgcaaagacagcaaaggagacaaaaacaaagatactgaactaaagcatctggcacctacagctacagcaaacattaaacaccccaactcctaactgattaacataaaaagtcaaactaaaacctaattacctcagttcctattacccaatacattatacctgactttcaacaaaaaattgcaaggaatgcagaaaggcaagaaaaaacacagtctgtaaagataaagcgagcaaaggaaccagacttaaatataacagtgattttagaattatcagaaagtaaatttaaaataattataattaatatgtttagagcactaatggaaaaagtagacaacatgtaagaacaaatgggtaatgtaagcagagagagagaaagaaaatctccaagaaagaattgtaaaaatgatagaaatttttaaaaaaacaactgttacggaaacacaaatacctttgatgggctcaccagtagactggaaacagctgcgggaagaatcagcggaaagaaccaatgagattgaagatatgttaatagaaacttctgttaatcaagtttatcctaaagttgcctccttacatatttaagttcggcctaaaggtttttctgcacatcttgaactataacaagtggaggtataaaccaaccatagcccgcacctgtgccaatgactgaattttgactaatcaaatgtagccaactgtttgaaccctgtttaaataaagctaacaccaagctgtaaccaatccagttgtttctgtacttgacttctgatttctgtatgtcatttcctttttttgtctataaatcttcttccatcacatggctgcactggagtctctgtgaatttgctgtgattttgggagctgcccgattcaccaatcgttcattgctcaattaaactcctttaaatttaatttgcatgaagtttttcttttaacatttcccaaactgaaatgcaaaaattagatataaaaaaagaaacaaaatatccaggaactgtagacaattactaaaggtataatatgcttatatgagaatactagaagtaggagagaaagaagcagaagaaatatatgaaataataaaggctgataattttccaaaatcagtgacagacaccaaaccacacatccaggaggcttaaaagacaccaagcaggataaaatttaaaaaaaaaaaagtccacacctagtcatattatgttcaaatcacagaaaactaaaacaaccagaaaacatgaaagaagctacagaagaggagaaatttacctaaggagggacaaagataagaattacatcagaaatctcattggcaaccatgcaagaaagaagaaggtagcgtgaaatgtttaaagtgttgaaaggataaaactagaattctggatacagtgaaattatccttcaaaagcaaagaagaaatgctttctcagacaaaggctgaatctgtcaccagtagacctgccttgaaataaatgttaaaagaaatttttcggacagaaatgaaatgacataggtcaaaaactgaaatctacataaagaaaagagctttcaagaaggaataaatgagcataaaataaactctttaatgttccttaaccttaattgatctaataaatataactattttttcaaaataattatgttttgggtgattatagtatacggataagtgaagtgaataatagcaaaattttaagggacataacggaggaattgggaatactctgtaataaggtacctgtactacccatgaagcactatagtgttatttgaaagtggacttaattagatataaatatatactgcaaattctagggaaactactacatttttaaaagtataatcaatatctaagatctcttttattagagaataatataaaatgctcaattaaaaccagagaaggcagtaaaagaggaaaagttaaaaaagaaaccaagaacaagtgaaataaatggaaaacagttaaaacatggtatatatgaatctaactatattattatcataatcaatttaaatgtgaatggtctaaatacataaattaaaaaatgaataatgtcagaatgaattattttaaaagacccaattatgtattgtctgcaagaagcccaatttaaacataaagatatacctagattaaaagtaaagggatagaaaaagatataccatgctaacactaatcaaaagaaagctgaagtagctatattaatttcagacaaagcaaacttcagggcaaggacattatcaggaataaagaggggcattacataccgataaaggtgttaattctgcaagaaaacataaaattccttattgtatatccatctagcaacagtgtcaaaacatatgaggcaaaagcagacagagctgcaaagagaaacagacaaatgcactgtcatatttggagacttcaacacctctctgtcagtaatttacagatatagccaaaaacatcagtaaggatatagttgatgctgaacatccttatcgatcaacttgatctaatcaacatctatagactttattgtgtgtgtgtgtgtgtgtgtgtgtgtatgtgtgtgtcagtctcactctgtcactcaggcttggagtgcagtgggcaatctctgctcactgcaacctctgcctcccagcttcaagtgactctcatcatgcctcagcctcctgagtagctgggattacaggcatgcaccaccacacccagctaattttttgcatttttagtagagtcggcatttcactatgttggccaggctggtctcgaacttctggcctcaagtgatcctcccaccttagccttgcaaagtactgggattacaggcatcagccactgtgcctggcctgatatttatagactatttgatccaacagagacagaatacacatttctttcatgttcacatggaacattaatcaagatagaccacattctgtttcataaaattcaccttaaaaattaaaaaaacagaaatcaaacaagatattttcacagattacaataaaattaaactagatatttttagaaacctagaaatatgctaggcaatgccctcaaatatttggagattaaacaacacacttctaaataatatatggatcaaagaagatgtttcaagagatattaaaaatattttgaactaaatgaaaaaataaactttttaaaatttatgggatgcagcaaaagcagtgatgagagggaaatttatatatcagcaatgaacaattggaatttgaaattaaaaacataccattcaaaccagcactgaaaaacaaaatatttaggtataaatctaataaaatatgtacagaatctagttcaacaccttatgaaagaaatgaaaaatctaaataaattgagaaatatcccatgttcataaatagcaagactaatgttgttaaactgtcacttcttccctacttgatctatagattcaatgctgtctgaatcaaaatcctagcaagttattttgtgaatattgacaaactgactgtaaagtctatatggaaagacagaagatccagaataggcagtataatattgaggaagaacaaagttggaagacagacactatcttacttcaaagcttattacaaagttacagtagtcaagacagtagggtattgatgaaagaaaagagaaatactgttgttcctcagtatcatggggggaactggttgcaggatgtctgaggataccaaaacctgtggattctcaagtttcttatataatacgacgtagtgtttgcatataacctatgcacatcctcctcctgtatactttaaatcatctctagattatatataatacctaacacaatgtaaatgctatgtaacagttatactttattgattttttatttgtattatttttattgttatattgttatttttaggggattttctttttgagactgagtcttgcactgtcgtcagggctggagtgcagtggtgcggtcttggctcagtgcaacctctgcctcctgggttcaagtgattctcctgcctcaccttcctgagcagcttggattacaggtgcccgccaccatgctcagctaattttttgtatttttagtagagacggggcttcactatgttggccaggccggtctcgaactcctgacctgataatccccccaccttggcctcccaaagtaccaaaattacaggcatgagccacccctcctggccatttttaggggatttttaaagaatatttttgatctgtcattggttgaatctgttgatgcagaacccatggatacagagggccaactgtagataaatggaacaaaataaagatgccagaattagatccatacaaatacagtcaactgatcattgacaaaggagcaaataattcaatggagaaacaatggtcttttcaacaaacggtgctggaataactggacattcatatgcaaaaaacaatctagacacagaccttatatctttcacaaaaatttactcaaaatggatcatagacctaaatgcaaaacacaaaactgtaaaacttctggaagataacataggagaaaatctaggtgaacttgtgtttggtgatgactttttgggtacaatgctaaaagcacgatccctgaaaaaaactgaacagtcgaaattttttcattacaaatgtctgctcaatgaaagacattgttaaatgaatgaaaagacaagccactgtctgggagaaaatatctgcaaaatacataatctgataaagggctgatatctaaaatatataaagaacactgaaaaatcatcaataaaaaaaacccaatgggtaacagatctgagcagacaccttatcaaagaagatacatacgtgacaaacaagcataagatgcccaatgccatatgtcattaggaaattgcaaactaaaacaataagattctactatgcacctattaaaatacccaaaattcaaaatactggcaacaccaaatgttggcaaggatgtggagtaacaggaagtctcactcattgctggtgaaaatgcaaactgttacagccactttggaagatcatctggtaatttttgataaagcaaaacatagtcttaccatatgatccagcaatcatgctccttggtatttacctaaatgagttgaaaacttatgtccatacaaaaatctgtacaagaaagtttacaggagccttattcataattttaaaagactgaaagcaaccaagatgtctttcaataaataaatggataaacaaaccatggtatatacatacagtggaatactgtgcacaataaaagaaaataaactatcaagccatgaaaagacacagaggaatgttaaatgtatattgctaagtaaaaaaaaaaaagcagtatgaaaagactacatactatatgattccaactctatgacattacggaaaaggcaaaattctgcagaaagtaaaaacatcagtgattgccaagggttggttgcaggtagaccagatgaataggtggaacacaaggaattttttaatgcagtgtaattgttctgctgacactgtaatggtggatatgttatgcttttttcaaaacccacagagctatgcaacacaaagagtgaatcttaatgtaaactatagactttagttagtaataatgcatcagttgtaataaatgtacaatgcgaatgcaagatgttaataacaggaggaactgtaggggaggagggagattaggaagtacatagaaactctctccactatctgcttaatttttccataaatgtaaaactgttctaaaaaataaagccaattaattattctttttctaatatctcatttgaatgagaggtcatggttaaaggaaattgtcagagaaagtgtcaagaaagaagtgtgactttagctgggtcctgaagggtacataagatttgagagtcggaaagggcagaaggcatttcagctgggtttgagccatggaaaagactcagagggctcaaattgcgaaggagcaggaaatagcacagaataaatcaatgcaaagacaacaggcagcaatttaatggaaaccaagggccaaggcagggctagaaacactgaagcatcattccaatatcagataaatataggcatgagagctgactcaacctcggccgggtcctcaacacatattcgttcattcatgtaatatttagtaaacattcactatgttccagacactgtggtaggcactggggacaagcagtgaataaaacaaatggaaatctttgttctcactgagcttacactctagtgaggggagagagacagaacctgtctgctattttcaagaaacaacaaagaaaacattatggctggaatgagaaacaatggccttttcaataaacagtgctggaataactggacattcatatgcaaaaaataatctagatacagaccttatatcttttgaaaaaaatttactcaaaatggatcatagacctaaatgcaaaacacaaaactgtaaaacttctgaaagataacataggagaaaatctaggtgaactagatagatttcatgcactggaatgaagtgaagggggaaagtagaaggtgagatagcggagataacagaagtcagagtatatagggcactgaagccagaataaataatgactctggcttttactctgagagatgtagggagtcactgggggattgtgagtggcagagtgacttgattgacacctcaacagggtcattctgtcttctgtgctgagaactgtcagagagggtacaacagtggacagtgactgcagggataccagcgaagaagttgctgccataatgcaggtaagagaatggaagcttggactatggttttagctgagcaaatgatcagaaacagagtctggattctacaatgatttgctgatggatctgatgtgtgaaagagggtcaaaatgtctcagttttaggcttgagcaacgaactggaaggcaggagctgcctgtaacgagagacaggagagaaagagagagagagagagaggactttggaagagcaggctcatgatcaggcctgagctcagtgtctgaattcaggtaagctatcttgaaaggggaaatatcaaaagctagagatcagagtaaggctgagactcagagtcaagtggggaagactaagttgcagtatgtactggcagtgaagataagtatttattcattcattgaacataccttgaaatcaaccacttttaatgtgccagggacacaaagatagaaaagacatttgccctgtctggaaggtactaataatccaataaggaaaacagaaatataaataaattattctagtacactaaccatcatagtagaggtattcaacatttgttgagtctctgctatatgccaagcagtgtaatgaggaagcagagggtatgcacaaagttctacaagagcacaaaataagttctggcaaaggtttgtaaagacattcacaagggttttcaccacagtatgacttcagggagttggcagtaacctagatgcccgatcagtagggatatgtatgaataaaatttctggcatactcggtagcaaactaggtgtacacacagcaatgtgggtatagctcaaaaacagactgttgagtaaaacagtgggaaatagagatttacagtccaataccatctctgtaaatgcaagaggcataaacaaaacattatctgtgttaaattatcaaggatctctatcgaacatattgcagcttgtgtctagaagaatgagagtggggatcgagaaagatgaggaaaaaataatataaacactataaaataatgtaaacaaggaccctgtagggactgatatgacaatgtgctgaaaattgaggagcaaagttaactctctgtacctgagataaaataactagctaataggaatccagctgaaaaccttaaggtgcagggcctctatggggcccaggaaggatgtgtagagacatgaacggatgaaagtgcatcacaggttcagggaacaacacaggttgagtgtggcttgtagtaaaaatggttgtgaagagttgacatatttttaagccctgggtaaattgaacaacagcttacacttggaggggtataatcattctaatcaatgtgtccccttttactataatacattggagttgcagctaatgctctgctcccattcagcctatgatgagattctctttcagccctattgggttcttggcctcatgtgactactccaaagaccctagtccaaaaggtctttcctgtttgctatggccttgaggaatgtggccctagatccaccgctttaaagctggagttccaccagcagcaacatcctctcattctggggcacctgcctggggcaggtcatcctgcctctgccaactcagtgctattagttaactctcacctgccatattccagctggaatcatctccccttctccaccccagactaggtcatgttccgccatcatggaagcgcctattcttcataccccttatcacagctgcaactactcatttacttgtctgacaatttgatttatgtccacctactttgctaggtactaagttcaatgctggcagtcgtttcttctttttttttcttttctgttttgctcaccgatttctcgttagcacttagcacagtgtctggcacacgatagatgctccgtcaacttctcagttggataccagcatcccgaagggaacatggattaaggcagctataagcacggtgtaaaaacaggaataagaaaaagttgaggtttgtttcacagtggaatgtaaagggttgcaaggaggtgcatcggcccctgtggacaggacgcatgactgctacacacgtgttcaccccaccctctggcacagggtgcacatacagtaggggcagaaatgaacctcaagtgcttaacacaatttttaaaaaatatatagtcaagtgaaagtatgaaaatgagttgaggaaaggcgagtacgtgggtcaaagctgggtctgaggaaaggctcacattttgagatcccgactcaatccatgtcccttaaagggcacagggtgtctccacagggccgcccaaaatctggtgagagagggcgtagacgcctcaccttctgcctctacgggtcacaaaagcctgggtcaccctggttgccactgttcctagttcaaagtcttcttctgtctaatccttcacccctattctcgccttccactccacctcccgctcagtcagactgcgctactttgaaccggaccaaaccaaaccaaaccaaaccaaaccaaaccagaccagacaccccctcccgcggaatcccagagaggccgaactgggataaccggatgcatttgatttcccacgccactgagtgcacctctgcagaaatgggcgttctggccctcgcgaggcagtgcgacctgtcaccgcccttcagccttcccgccctccaccaagcccgcgcacgcccggcccgcgcgtctgtctttcgacccggcaccccggccggttcccagcagcgcgcatgcgcgcgctcccaggccacttgaagagagagggcggggccgaggggctgagcccgcggggggagggaacagcgttgatcacgtgacgtggtttcagtgtttacacccgcagcgggccgggggttcggcctcagtcaggcgctcagctccgtttcggtttcacttccggtggagggccgcctctgagcgggcggcgggccgacggcgagcgcgggcggcggcggtgacggaggcgccgctgccagggggcgtgcggcagcgcggcggcggcggcggcggcggcggcggcggaggcggcggcggcggcggcggcggcggcggctgggcctcgagcgcccgcagcccacctctcgggggcgggctcccggcgctagcagggctgaagagaagatggaggagctggtggtggaagtgcggggctccaatggcgctttctacaaggtacttggctctagggcaggccccatcttcgcccttccttccctcccttttcttcttggtgtcggcgggaggcaggcccggggccctcttcccgagcaccgcgcctgggtgccagggcacgctcggcgggatgttgttgggagggaaggactggacttggggcctgttggaagcccctctccgactccgagaggccctagcgcctatcgaaatgagagaccagcgaggagagggttctctttcggcgccgagccccgccggggtgagctggggatgggcgagggccggcggcaggtactagagccgggcgggaagggccgaaatcggcgctaagtgacggcgatggcttattccccctttcctaaacatcatctcccagcgggatccgggcctgtcgtgtgggtagttgtggaggagcggggggcgcttcagccgggccgcctcctgcagcgccaagagggcttcaggtctcctttggcttctcttttccggtctagcattgggacttcggagagctccactgttctgggcgagggctgtgaagaaagagtagtaagaagcggtagtcggcaccaaatcacaatggcaactgatttttagtggcttctctttgtggatttcggaggagattttagatccaaaagtttcaggaagaccctaacatggcccagcagtgcattgaagaagttgatcatcgtgaatattcgcgtccccctttttgttaaacggggtaaattcaggaatgcacatgcttcagcgtctaaaaccattagcagcgctgctacttaaaaattgtgtgtgtgtgtttaagtttccaaagacctaaatatatgccatgaaacttcaggtaattaactgagagtatattattactagggcattttttttttaactgagcgaaaatatttttgtgcccctaagaacttgaccacatttcctttgaatttgtggtgttgcagtggactgaattgttgaggctttatataggcattcatgggtttactgtgctttttaaagttacaccattgcagatcaactaacacctttcagttttaaaaggaagatttacaaatttgatgtagcagtagtgcgtttgttggtatgtaggtgctgtataaattcatctataaattctcatttccttttgaatgtctataacctctttcaataatatcccaccttactacagtattttggcaatagaaggtgcgtgtggaaggaaggctggaaaatagctattagcagtgtccaacacaattcttaaatgtattgtagaatggcttgaatgtttcagacaggacacgtttggctataggaaaataaacaattgactttattctgtgtttaccaattttatgaagacatttggagatcagtatatttcataaatgagtaaagtatgtaaactgttccatactttgagcacaaagataaagccttttgctgtaaaaggaggcaaaaggtaaccccgcgtttatgttcttaacagtctcatgaatatgaaattgtttcagttgactctgcagtcaaaattttaatttcattgattttattgatccataatttcttctggtgagtttgcgtagaatcgttcacggtcctagattagtggttttggtcactagatttctggcactaataactataatacatatacatatatatgtgtgagtaacggctaatggttaggcaagattttgattgacctgtgatataaacttagattggatgccactaaagtttgcttatcacagagggcaagtagcacattatggccttgaagtacttattgttctcttccagcaacttatgatttgctccagtgattttgcttgcacactgactggaatataagaaatgccttctatttttgctattaattccctccttttttgttttgttttgtaacgaagttgtttaacttgaaggtgaatgaagaataggttggttgccccttagttccctgaggagaaatgttaatacttgaacaagtgtgtgtcagacaaattgctgttatgtttatttaattaagtttgatttctaagaaaatctcaaatggtctgcactgatggaagaacagtttctgtaacaaaaaagcttgaaatttttatatgacttataatactgctgtgagttttaaaagtaaagcaaaagtaaactgagttgcttgtccagtgggatggacaggaaagatgtgaaataaaaaccaatgaaaaatgaactgctgtggagaagtgttacatttatggaaaaagaaataggaaccttgttcatcaaattgatagaaaagcttttaaaactaaacaaatcaaacaacttgagtataatggaattcagactttgatttgcctaacataaccaccatatttgcaaggacagctctctatcttctggtgtttattcttaaaaacttaaaagttagatttagcgatcaccagagccactacttttatgcttaggtatttgtttgacttagaaaaaattggtcacgtgtaccactttatagtgccctgcaggtgttaagatatgaaggcactttgacttacacctcataaaatctttacaaagtattttctaaatgaataatgatgaaataaagtctttattctaggtgcatctgccccacataatttgttttctttggactagaagttttgatgtgttgagaatggtaatgaattaactccattttaaatgtagaatgcgtatcactccaatatgaatgccctaatgaatcctaagatttgtaggttttgtgtactagtatgaaaattactaaagatggaaaaatcacatgttggagacataagatacaaacctttttgttttctgaaaatacaacctctgatttctgattccttgttgtaatatggtgtaattatactagattgtaattttgttgttagattatacttttttaagttcagtgtttgaggacagactttcatttggttagtagtattatggcagctagcagctaaatatgataaagtgtacaatcaaaaggatatttttaatgaagatattagtggtctaacatgtcatttcagatacatagctgaaatgtagtaaaatcagttttactacaaataaacttgcataaggtttataaatttataagtttataaatcaacttgggtaaagtgtaaataaacttgcactcgtggtttctctgaagtctcctgagctaactttgcataaaggtgttattctgtacttcgaggaagtgaattattggggtcaaccacattttttttccttcctacagtctgattgccctttttagtttttaggatctttgtggctgcatcatttttccccttttgaactgtgcattttctaaccccatacttaaatattctcataacctccaaattattaattagatgcaacattcagtggtatattactggagtttctgatttctgcccactataggaatgtgcttcctgagaagattgggatcgtgattataataatagttaacaggggatgagtactttctaggtgccaggcactgttctctctgatactttatttgatgtattgttgttattcccattctttaaatgatgcacagagaggttaggtaagtgacttactaccaagtgtcagggccattaagggtcaggattctgaattcctgaaatgatgaaatttagcttgaagaaattggtttgatttcctgcttagttttcaatttcatggtggtctttgattgtattttgtgctataacactgccttagcatcctataactatagttacagtgttatattaccattttttattgttaatacaaagccatcatgaaataattcagtttatgtgccagctttttttgttactaattcttgaaccttggcgctgtacttcttcatgtggatgcctgttaaggaaagataaagttagaaatctttgaccctgctaggaaatttgtctttgttatattgggagctcataaaactgaagtattcaaaagttagaatacatacacacaagaaaaattagtaactaatttaataatgttttctttgcacatgtctctgttgtcttttggtcagagtgaagctaaatgtgtttttcacataatttgtagcctatatgaagtcctggacatgtggtatggttggaaggactgttgatgaggtttattgtctctctttattcttttatgttgttagtgtccccatacaacggggcggggggagtggggacaaaatgataacttgctttatatatgaagccttgggtttgaatcatactgttatcacatttcctatgtccctatcctgtctcctgcaggttttctttcttggttttcttttttggttttctttcttcctttcttcctttcttttcctttctttcctttcttccttttttctttccttttcttttttcctttctttccttcatttctctcctttgctcctttagtttgtttctttgtttctttggtttgtttctttgtttctttggtttgtttctttgtttctttagtttgtttctttgtttctttgtttctttcaacaggtctcactgtcgcccaggttggagtgcagtggtgggatctcagctcactgcaacctccacctctcgggttcaagccagtctcatgcttcagccttccgggtagctgagattacaggcatgtgccaccattcctggctattttttgcatttttagtagagatgaggtttcgccatgttggccaggctgatctcaagttatctgcctgcctcagccctccaaagtgctggaattacaggcatgagacaccgggtccagcttccagcaggttttctttaggagggatattttacaatgctgtaagtttttcctaacgagaattatcatagcactacatgttctgtcttcagtaagtgatacaagcttactgatgatgttgtagttatgttcattggtggtcgggtgtacattgaaactttaacacataatagcctctcctgtgagcagtggttcctgttggtaagatactttactaagggaaggaatgtgaggtgtcgctggggagagtttacccaaataaggatggactttctgtctttgtttcatcagtcctggtaatagaatgtttgaatagatagctctaggcattacatactttcataaatatgattattgtaattacctctttggcccagttgctagtaaattagggaccccttaatgatttatttcctgtttattcaccctgatgaagaacttgtatctcttttaaactgtactttatcgcctttctcaaattccaagattctcatcacattttttttcttcccaaactctaaataaccttttaatattaagtatctttgtggaaacattgttttctttttctatcccaatttttaaagcttttttaaaaaaaagagtgcttttgttgggatgtacattttccaaatgcaaaaacatttatgattctgtgtctcttataaaatatgacactctctacttttctctcatttatttagtgccacctatgtgtgtaatttcattacccacagcagtcttaggaggctggtcgagttccttatttgcagatgaggaatctgaggtccagagatcacttcttggtgagagtctcacagctattaagtattagagccaagattttgaacgtaggtctgattcacagcaaaaccgttaaccactaagtacactgactccagtaagagccctagtcctcacccaatacactttaattcccctgtgcattcattcaaattcattgaatttgctgcctttggaaacctctcaggaacctcctcaacctctcttctctacagacatcagctttgcctgataggtagggatcatagcaaaacacagttttccaaggtggtgataggtggagtgatagtgctctggagatggccaaagaaggaaggtatgagtgtatctgtgggtgggtgagtggtggataaggggaaggacagagccaaaagcgacggctattggaaaaactatgatgagaaacaggaagatggaaccttgttggaattagtgaaagaccttagaattcacaggaggtatttgtccttcacgcgagtgtagaccaaacgtaacctatgagtttcttttattccacttattaaagcagcaaccaaaggtattatataccttctgtattcacttaaaatgactgattttgaaaaagtcatgcaaacatccatttacagataagcctcattaactcaaaggcagtggccctgttgggctctgatgattactcaaaccatttctgacactctgacactacatccggaaatcatccggaaatgcattcagagcctgcaaaagctttttttttttttttttttttttttgaatagctacagcacttgcagatcttcctcctttgagagaatatttgattttaggaaataagcaaatgtagataagtatgattcaactgggcaataacttttaggcaaagagaaaaaaacaaaatatagcaatgtagtaataaggctgatattatagtgcttttatgatgagtctgaaaacagtctccaacatttgtaaatgttttaaatcgggtctgtctactacagtagcccttaagccatatgtagctattgagcacttgacatgttgcaagagtgaattggagactgattttaattttatttaattttaatgtaagtagtcgcacatgacccgtggctactatggtagatggcatagttttagacaagggcagtagtcttgggtagatacttgatttacttagaacatttctttacctagctgtaacaaggttctaatagctgattaaaggacaacatttttagcatgtaatatacagtaaggaactaatgttaattactgccaagatgtataaacattatgaaaccttaaacaaggatgaacacagaagcagtggcccttctttgtaaataaggggtcagttacttcctaataggtgtcttagttttagttaataatctaatagcacccccaaaaagcaaactgttaatttgttattagccatcctgtaaagacaagggagaaatcggggccaggagagtcctctttcccattctccataatttttacgacctatagaaataagagcctaagagtgaccagttcctgcaacctaactcaaaattaggcctctctgttgaagtaatagtgaggcaaacaatcccttgaagcactggggcatgcacccttatgaaatctaataattctaaaatatcattggcagtattaagctagagttctcaaaatatgctgtagaaaatattggtcatttaaatatagctgagtaaaaataagcaagatcaaaatgataagaaaatgttgatttctccccttttgaaccagtaactaactataagggtatatacccatgcttaacttaaaaataattatttagccaccttgggtatagcacaacatatggatgccattatagtccaccttgatcttacaaggaagctttcttttagcgtagctttacttttatttaagcattattgaagaagcttggtatctctgtttaagttgcttctgtatcagtgttttccagggccctgtctcagcttccatagttttccttaagagcagctaattaatgcttcactccatatgctttaatttgatattttgggaagtttcattttttaaaataatctttttatatcataggcctttgaagacatatttgtttacaaagacatctgcattgaaccatttgtttttaaaaacatgtatcgggcatgtcctatataccagaaactatgccatttactgaggacaccgaagttagagaatggtcttaatccgaactagttattgtctcactatccaatatggatatcaaacattcagcgtcatgaggatttactactgtgttttctcccaagagttttataattttagctcttatatttaggtctttgatgcatattcattgatttttttttgtatgcagtatgaggtaaaggttgaaacgtattctttttgcatgtgggtgtccacttgtcccagcttcattttttgaaaacactatactttccccattgaattgtcttggcttctttgttgacaaaggatttattatttctgccacaacccagctgtttctcactgtctaaacctttatgcctgctgccccgtaggcttagtggaatgcctctccatcctccactctcttttgtttagctagtacttccttatcctttaaggggtcagtaggaacctcaccttcttcagtatgttttcctttgtcttatcaacctaccaccatcacccacacacataccttttccctaaggctgggataggaacctcttaggcaatgatctatttgataagtactcactgagttcatactagacactctgcagtatatccgtaaatgaagtaaaacctgacaccaccctcagaaaacttactgttagtgagaaaatgggctataataatagagtggggtaagtttattgtagggataagcataggatgctatgagaatgcagaggacaggaatttaacctagacttctcagttctcccgttgaagttgacatctgaactgaaatctggaagaccagtaagagatagctatgtaaaaagaggggaaggacaataggaaagaaggaatggagagaggcccagaaactacagagtatggcacaagtagtttagcattgttgggtcacaaattctaaggatatgaaagataaagttgaagaagtggtggggctggggaggacagctcctgtagagccttttacagcgggagaaggagtttggctatggtcctgcaggcagggagaaaccactgaaggggagaaacatacagaataaatttgagtaagaagcttaaatctccccaagcccttttaaaataaattaagatataaagcctttgggtttctttatgctttgtcctattcttctaattgtccaaaacaaaacaaaaaccttccttttctgtacctattaaaaggttaattttataaagttacagacagcatgctgattaaagaattcttgataattagctattttgtctgtctttgtgtagattactaacaattgtgtcatcagatttaaaagatctaaacctctggactttatatattttttctacaagtactgtgagattgagaacttaattcaactctagtaactggactttttagtgttgtttgcagcatatgattgttaaagaaagtttagtatatttgtgtgtgcgtatatatatatatatagatagatagatagatttgaggttatatttaatcattgactattggtattctaagattttaaggagagaaaggtaggttacaatatatggctgatatatggttctggaacaattttcttagttttcagtaattctacctaaaatgtacgtccagctttgcactcactaccacattgtaatttccagtatacttgtctatttttcgagatgttgaaatctgtggagaattttttctcatgtttagtgttttagctatgtttatctctagggtatagcacatacaaggtggcaatatagatgtgcttaatgaataaaatgatcttcaaaaactgaccttcatttgaagttctattttattcataaacacataaaacgtttggtatcactgtaaaatttaactaaaaacaaaaactatctttaagctcacaagttaatttaacgttttttcttacacaggcatttgtaaaggatgttcatgaagattcaataacagttgcatttgaaaacaagtaagtgtctcgttatataattttaatgatgaggttctttaatattttatgctaattctattcttcattttttaaaaattcaagtccagtttgagtgcttttcaggaatggatcttcatgttactgactgagaagtttctgaacaactcagtattaaactaatggaatgactgtttctgctaatgtcctggaggtcccttattgtatggtattgatccttacgtcttaattcccttgaatgtgaagaaagaaaccagagagtcttgtgtattagtaactggaagttcgcataggagtatttgtaaattttaaaaagatagtaatgaaaagattcatgggtattgctaaaaagttgtatgtgagttctttaacattaaatctaaaactgatggttttagttgtctagtatattttatggaaacagtcatgtttacctattatctgattttttttaatgtttcatatgttcagcaatagcagtagctgatcttttctgttctcttttgctagatgaagaaataaaaacagtcataggcctaggaatattaactgtatgaaagcatcaatagtatagatgttaacattttattggagaacacaagtctcttgactaaatgttttgaatgctaataaaggctattttcagggtagctgttggtaagattgtaaagtacatataaactccttagtcaaagtgtagatgtggctatgatcttaggattttactaaactctgatggatggttaacagttatcatttttttggctcttatataccaagaaaattaataatatatcaaaagcaggctgcaaatctatagagacagaaagtagattagtgattgcttgtgctggggctggtggggagaacatagctaaagagtacaggatttttgtgtgtgtggcaatgaaaatgttgtaaaattgactggtaattattgcacataactgtaaaccttctataaaccattgaattgtacatttaaattgatgaattataatgatatgtggattatgtctgctaaaatgtagtatgtgacccaggcatactgagcaataaatacacacatcttgcttctaaagtttaaaaccaggcctgtgtttcagtgtctagaaaatatatttcataattgaacttagcagattcttttggctagcaacaggacaaagtagtatccttagatgcctgaaacacgtgtagggggacagagataaaaggattaaaagcatctaaccctatttctggctctggactaataatcgcagaccaaaatacaagtttgaatagtagaatacctttccctgaatacataaagccaaaagttttagtatttgtctcttcgctgtttcatatatccatggctatgcaatagacaacagcatcacaccaacagaggaatctttgataacttggagggtatttttttcttacaattatacactttatctacttacttacatcactaggtaaatgctgtttcccataaagggagagttgtctttatttgctactcttttagtttttcctgtagtctataatctaaagtgttaagcaaacactcatttcctctatgcatttaagaatttgtctagtttatacattgatttattagatcacttctttttaattttcaatcagatttctaccataaacttaaaattatttcatctttggaccttccaattatttatctcctgtaccatatctgcatgaaagtttctcttcaagctctttgtcatcctgggagtttgaaatagatcattgattttcccttgtgttcatggagtatgtttgcaatacaacactgggtttgagcacatcaataggatttaataggtctccaccaaagtaatctctttgcccttccttgtgtgtttcctttttggttttctgttagaaacaaaacgaaaacagtgttttgtaaaacaccagattgtatttaccctttctttcctttcaatcaggaagaagctcctgttactgatagcagattgttttaggtgctttgtttttaggtgcttcctaaaccttccataaagcataaaggtgttttcatatttcacattttttaataaggaatttgaatttttatctgtatacacttaaaatcattattttttccttggaaccattgagttatatattattatatgctttaaaatcaaatttagcaatgaatgtataacatctattaggtgtgtataataactcagaggagggttcagttaatttaggccctaatcagatttccacaaattctgacttaatatttgcccgcttatataacagctcttctttaacaaaaacaagtacttttctcaatagaattttactaagaaagctctttagtaaaacatcgacattatacatacaacatatctcagtatctgctgatgaagaacaccaaaaagaacccagatgtgactgctccggaagttgaatcctcagtatttttgcaaagtttgtctttcagtattttatttgtgtgtgtgtgtgtgtgtgtgtgtgtgtgtgtctatatatatatatatttttttttttttaaagacaggatctcactctgtcacctaggctggagtgcagtggcatgatcatggctcactgtaaccttgaactcctgagcttgagctatcctcccacctcagcctcccgagtagctgggactataggcacataccactgcacctaatttttttttttttttaataatttgttgtaaagatcaggtcttaccttgttgcccaggctgctcttgaagtcctggcctgaagcagtgctcccacctcagcctcccaaagctctgggattataggcttgagccaccgcatcctaatattttatatttttatggatataaaaaataatttggtatctttcagagttgtttaatatcattttaaatttaaaaacataggcaacttaaactcctataggctgtctccatcgggtttctgtggtttaggagaccccaccatcccagtgcatgctgataacgtcatactgatcagcatccagctacccacagcaagaattgaccacctcgtgggatctaaaatttaaagggggaaaagtgagttgtgaattgctaatgtgctgatagccccattttgcttgggaattagagggcagtttttgtggtccttggaatgtggttaaaattcttctgcaagtggaagcatatttatattactaacaattactggtactaatattcaaatattgaaggaaatttctgttgtggacttatgtttaaagctcttagaagttgaaattattggaaagaagacttgttttgaaaatcataatgttgctgtattgtgtttagagaaatattccaaacgggagtaggctgctgtgctgcatgcagactttgctgaaatgttactatattgccgttatgtcccactcagcaaaaactgatgattttaaagcttttgcttcttgaaactagaaaaagaggggtcagccttaaccaaaagttgatggcagagtggtcattatttcagttaaacatgaaaagcatgttaaataattgtatgtttgcttatttacagctggcagcctgataggcagattccatttcatgatgtcagattcccacctcctgtaggttataataaagatataaatgaaagtgatgaagttgaggtgagttttccctgccataaagtcatttagcactgaaagagtggggttaatttatctgtgtttttttttaatactttgtctttaacactgtttaaattactttgagaattacagctggaatggacacgtgcttttgactaactcatcttattaataattcaaaatgatacatgatgcttacatttggctatttgagcagtactcagagcatgtatttgaaagtcactgccgcaagttcctttgcccactagtaattcttttctccttctctcaatttctgaatctttgaatagtatgttgtttgtttacaactgtgtccccattgtaagcaaaatggattatgaaaattaattttacacaggaaagaaatcatgctttattacaaaatagtatactagaatttctttaagtagcagtgaatcttcttggtatatttttaaaaacctacaagctttagtttatacatattggtaaaatctctttttcacaggttataccgtgaactacctgcttatctcccgttgagctctttgaccaaaatgtgctatggagatctaacatgtgaacagaaatgttgtgtttgtgatttctttctccattagaaattggttttgtatttaaggcgcttacagtgcctcatatagtttgtgtggtatcttctctcctttgtatcctttcacatactccattttgagctgcttctcttctttttctacaataataagcataatgccttactattagttaataatagttgccgttccatgaatatttgtagtatgaaggatgtcgctaagtagacatttgtgcaggtgaggcagagtggttctaggtcctgtccttcagttctttatttatttatttatttattttttgagatggagtctcactcttgtcatccaggagtgcaatggcgcgatcttggctccctgcaacctccgcctcccgggttctagcgattcttctgcctcagcctcctgagtagctgggattacagtcgcccaccaccacgcccagataatttttatatttttagtagagacggggtttcaccatgttggtcaggctagtctcgaactcctgacctcaggtgatccactcgcctcggcctcccaaagtgctgggattacagatgtgagccaccatgcccagctggtccttgaattcttatttgctgcactaggtagtaaaggtgtagcaaaaacaggacagaatcttctgcctttgatgaaatcacattccagtaaggatagctaatatgacagatgtgagtcttaaagaaaaaaaaagggagaggatgaaaggtgatttagggacaggattgctgtttcagagagtagtcagggaagatctctcaatgtccaggcctgtgtttttctctctacagttttaaagtggacataggatatagtgttatttattttccaaaaatgtaaccaatctctactaggtgtaagcagctgggcttggttttgcaagggatcttaatagggaacagaaacactgtgtatgcttagctgtccacttccccagaagactgtaagctctctgaaggcaagacccaggtctttggtctgtattaggagtacccagaatagtgtttgatggagggatgaaagggactttttctccccagcttggtcacttgacagatcgggaccaatgagataccattgctaggatgacctcactgtcttacacaccgattcgttgaggtaatttctctggctagagtagttgagaaagatggaagcaagagggaaaggtatgttaagttgtattcagtcactgtattgtgtgatcattaactttggttgtaaaagggagacaagttcgagcttttactctacttgtcagccctagactttgtacctctcttggcctcatgtctttatcccccttgtctttcttatttctcttttctgcttctgagtatccctgtctctctgtccatatatactctgttgtctcttttcctattaaccttgatttgctagggtcttcatgaaaggttccatgctgtacatcttaagtgaactttgaagtggtcatcaaagagatcagttagaagaactgatctgcagtgtgtgacagaccaggaaagtgatatccagaggattgccaccatgaagttgtcatttttagtggagaggaagcaggagaccagaaagtgaccaaggatctgtccatttagttccaggagatatgactgccagagtggtatccttagtgggctgaatgttcagtggtcttactttagtgaccaagcaacaagacagtagggcatggtcagtaactttcagtcaatttttgcttactaggataaagcaaaaataagcttatacatttttagatacattttttgtaacttgctgagtacccaaggaaagtgtgcttgtatttatgggcgtctattttcagagcactaattattgctgaattagaacagaaatataggaaaactgatttttacaaggagcttcaaagcaatctcaggtagtttctgattatgtatctctgcctacctcggggtacatagacagggttacaatttggttgaggatatatgacatgtggtttttaaagacacctaggggcattttaagaaaatttcctcgatatctgaaaatctgtagatttcaaaattatgttaatcatgaaatattctgtgttgtaatttttgtgtaggtgtattccagagcaaatgaaaaagagccttgctgttggtggttagctaaagtgaggatgataaagggtgaggtaggaaaatgcctatttaaatttttttcttatattgtttcctttttttaaacccaggttgtacattcccgtgtggatttctattttgaagtaatatctaattttgagtaatttaattaaaatgttttcactatgtgttcagtatgtttctgttggtcataaattttttcacatagattatttattttaaaataactgaatagggagaacttcttattcttactttaaaaattgtgattagaagtgacttttatttatttctcagttttatgtgatagaatatgcagcatgtgatgcaacttacaatgaaattgtcacaattgaacgtctaagatctgttaatcccaacaaacctgccacaaaagatactttccataagatcaagctggatgtgccagaagacttacggcaaatgtaagttgatacacaagaaatgctgagaacttggaagtgatatgcaattagtttagaagaatttctagtagtttaaaattttttaaactactagaaattgattttaaatttggtggactttggcaaaaatggtttggtttgcaagagcaatggagaaaaaacttatttaacttttcctacttatagaatcaaggcagccttgcgcttgtttaaacttacttggctatacacgtgtctgatgtacataatgtacatttgttttctaaactaactttgttcattctaagatttaaaaactgatcaaacaaatgtgataattctgtcataagtcacaaactataaacgatttctccgtttttttctcttttacctaaaatgttttcagataaatgtgtaataagtagagccaaagaagctttaaaaagtcatctcatcttacaatccttgatctggaataatgcttaaagactatagaagagacgcatttttattttttacagattttattaagtgaatacagtacgtttgatttggacatgttgttgaacattaaattgcagttcagaatacatagaaatcctcccttttctagagattgtgtatgtgtgtaaatttttgtgccttctggttcatgtacgtttccttctctccctcaaatcgtttagcagtttcttaccccattctccgtgatgtgcttatttcatattgcatgcctgtatcaaaacatctcatatgccccataaatatatatacctactatgtacccacaaaactaaaaattaaaaaaaaaggaaaaaaaaaggcctgcaacaagagaagaagaaagaaatcagataccctgtaggtagctatctcccaaaagttttcaatagttgacttaagaaaactactgacttgtatgtaactgaaatcaggaaacctgtagtgtagagtggttcccctgaatatgtctcttttggtaatctaagctgtatttcagaaatgtacagaaaaggagctaagcttctaaatggatatagcatattttgcataaatcaaatttaatatgaatccatgattcttgtatgtgtaaatctgcctgcatttatttatgtcagtagttggtaattattcatcttaatttttttttttaaatttctaggtgtgccaaagaggcggcacataaggattttaaaaaggcagttggtgccttttctgtaacttatgatccagaaaattatcagcttgtcattttggtgagcatttttgagttgtttatttttagtttaattcatctggggcaattgccttgataataatgttgttaatttaaatcatttagtccatcaatgaagtcacctcaaagcgagcacatatgctgattgacatgcactttcggagtctgcgcactaagttgtctctgataatgagaaatgaagaagctagtaagcagctggaggtatgtcactttccctagcactgcttgtaagggtacctaggaacgattaactgtatcattccacaacttgaatatggggagcttgtcatttatttactgcttcttaacaattccttaggttctatagttggaaaattgtacaaagcataatcatactaaagtttccatgcctgaggtttcaaaattaaacagcagcttatgtatattaagggacttctggtactttcacttttactagaagtttatcaaagttgctaataaaatgcggcaatgcttcttccatataacatgttgtcattaaaaatactagagaatatttaaatatctaatcatattcctctcattatgtatgtttatctttgtttaaaagggtatagaacttcttcattctaattggttgtcattctttaaaactcctgtcttcagattcccgccagaggctatttccctaacttactattttgtctcttaaggtgcattttatctacttttattaatcctccaataattttcatcaccatatatttgttttcattgataactatcaagtacgtccatccattactatagaaactaagtggatcttagatgaatgtgccagctctactatattcctgtcaaattccagagttcgtcatcattattcattagaaggaaaacaccacacatttgaaatagtaaagaaaaaaaggagttccaaactgcattttaggagaaaaggtagtcaagactgtgttcttataaaaaccctgtgaaatttgccacctgtcaacttgatgtatgatgctgaactcttagcagaaggggaaaagtttaatctccttttgccactttgttttttcttaaggccatggaggtctgtttaattggtctttgctctcattctttcttgatgtccctgtgttcatgattttgtggttccttcagtgattctctcataacttttagcccagagctgcctccttactttgattgtgagtattatgaaaatatactcatatgcctcttaaacatcgaattattcttaaatgatctatcatacttttggctaaccatttatcagtgaattatcaatgaaaaagaacgaaccagattaatgaaccaggactcaaaaaacatgacttcttgaaaagtcctagaattattttatagattttattactctagtctaaaaaaaatgggtattgcacttttaaattatttatgctagttgtattcattcattcaaattatcaggtctgttgaacaatgagaaactagtatgcatgcctatctttcttcactactaatattaaagagatttacatgttcctataagaaattcccatttttcaacatgagccactaatacgtttggttttcattaatggcatgctagaactgaacactaaattttgataatggtatttaaagacagtggttatccacaagtttgggatgtcagtgtaacttagtttcgtcatcactggatatttacaagtgctcatcataattgtggatccagatcacaaggtcttacggactctggtctcatgttagctttcagatgcttactaagtttttaatttttgacattttttgattattcagtttaactactgtaccaacaatttttgattccttaggttttgagggaggtgtcattttaatgtcatttcaacagaggaatgtttagaccacagtacctaatgatgttataaaaaatggcactgtttccagaaaatatatactgataccttttaataaaaatgaagcgaataaaattttctataaagatgatatttaaacatttttttacctaaataagtaacattgagtttgtcagaccgagtgagctggtttttactggggaacatttgacctgcttcttagttattatattgctgatgtcattggttaactaaggcagccttgtgataagttttcagcagttaccttggaaaatgtcaacaagttctttcctattaacaaaaacatataaaatgtcatagacctttagtaacctaaaaagtacttaggctgtgagaggtattttctaaaacctgttagttttaacctaaaactattaataatttatggacccctcatatacagggtcaagataatttacatggctggcctaaatacagttgtcgtaatagttgataaagtgtattcatcagacgtccatttctcttcagagttcaaggcagcttgcctcgagatttcatgaacagtttatcgtaagagaagatctgatgggtctagctattggtactcatggtgctaatattcagcaagctagaaaagtacctggggtcactgctattgatctagatgaagatacctgcacatttcatatttatggagaggtaaatattttactgcatagtttttttttccccaaacaagtatttcagctggctaatcttttgtcttaaaatgtttccccttttattaggatcaggatgcagtgaaaaaagctagaagctttctcgaatttgctgaagatgtaatacaagttccaaggaacttagtaggtaagtcagaagtatctgttgacatatagtacaacaactaagtttaggtaaacagtttatttatagtgatagaattccattttttcttactggagggtatcatttaattgaaacatagtctttgaaatatgatctgttctttttttttattatttaagttttagggtacatgtgcacaatgtgcaggttagttacatatgtatacacgtgacatgctggtgcgctgcacccactaacttgtcatctagcattaggtatatctcccaacgctatccctcccccctccccccaccccacaacagtccccagagtgtgatgttccccttcctgtgtccatgtgttctcattgttcaatcgatctgttcttacagcatacaaaaaaatatttgttaagtatgatgctcaaaggttacattttcagaaggtattcaaaagagattgcttttctagttcaaacctactaatacctgaaaggataaatcttgcccagccctcctgactgtataccttttatatcttaaaattaaataatttttcaaaatgaatgatatttggggactttatgatttgaaatagatttgtatttgatctttcttatgggactataaaatgatagcattcattttaattatctcagggttgaagatctgaacataggttacttaaatctaaaaagtcccaaagctagaagaaacttcagatgtctctgggactttctgcaaagtcaatagtaattctccattttgacttgagtagtgttttatcaccatcaccatcgtgagtatcagcaaatatttaggagctcttcaccaatactcctaaatgctgcagatatctttagtagaacatatcaaaaccaggtgcagttttatcaagaaagctacatatgtttttaatttgtaaataaaattgggacatactgcctatatgttttttatcttttaaacttgagatcatggccattttatataaagtaatacatgttctttggaaactttaaagaagaaagcaaggacttctcatacattctgtttacgtagtttcaatgctaatttagcctgcttttttgtcagcatagactcataaacatcttccttgtcattaacaaacactagaaatgataaatgtatctcccaaagaaaattagcttgaagataaagtgcaaatagtaggaaaataatgcagaagtgttagctcaactgtgtactacagacaactggagaaatgtgtttgtaatgttactaaggtaacttgcataccaattgtatgtgtacagaatgtatgcatagcgcaagataaagtgctaatctcaagacagttgggtgatgaataatatttattttcttctttacagcttgtcaagcaattgcataccttttgtagttagaaaggttattgtaaatttaggaattcttatggaaaaagagctggtagttgttttgttttttttttttaatagcaaatgagtagagaattatgtgtcagattcattaaagttggttttgaagatggcatgatggtagtggggaaagtgcttgggcattggagttggatctggatttcagtcctactttattctttggtggcaatgtgagcgtgggtcactgtcttagcccccctgagaattatttttcttacctatcaaatgtgataataggatccacctcatagagttgatgtgataattaaattggaagatatagtaggggacaattctggacacagtaggggactctgttcttcaccttattcaaaacaactccatttcagtagaacagaatcacagtaaattgctctttgggatttggaaataagtgtaatgtagaattggattatttgctattaaatattaaaagtagattctacctgtggttacctggaaagaagaggatctcagaaataaccagaaagactgctaaaagtaaatcagccttgtttttgttttgttgtttctagttagtaaaatgagataattctgttttagagatggtccactgcaacactgggaacgttggaacttttcagaaagcatttttgtgtaagattctgcaaggcagatctttagagaggtgtcataatcagttttgcatgtgttttgtttgagtcaaccaacgttatttgtgatctctatttttcacaaactctctttggtatgtgcactaatttatcttttcattaaaattggattcttcactcactaagaatgaattggtatgactattcagtcagctatagttaacacacagtacttaggataattaagatattatcttaataaaaacatccccaaatctcatttttcattttgttaactcacttagatctttattaaagtcaacattaattcatgaaaatgtaagtgttgcagtttaaaatcaaactgtgtgaagactccaagtagcttctctcacctcacctttccccttttcgttatagaagaacagaaataattgacagaaggacctagaccaagaatcctgatttaatggtgtcagatctgttctatgaccagtcaaagagtttctaggggtgaatgaggcagccacacacagcaagaatgtcaaagctatgctctgattacaagagccacaagaattttttgtgagaaggcttttcactgagttcttatctagcattggctcaaagcaaatttttgcttccatcttttcccccaactttgccttgagctttgcctttaaaggcgaaaaggaaaaaatggaagatgagatggtgagggcaagcacatggtggatgtggccaatgtaagggtacttaggtaccttgggtgagccctcagaatcagatgtagttcacatgtacatttccagaattagtaattcttaagtttgtaatgtcttgctttaccactcgtgtcatgatgcaaatgaaagcagtcattttccagtaatgtatatgattgtaaaataaataaggaaatgatcaagtacctattttttactggtacttgaaatcccaagttttaatagatgttactgaaaaatacttaaattggtttaaagctttttcattgtggttttgagttatcttaaagtgggttttcttaatcttttactctgtgactaatcccttcactttttaatacattgctaaagtttgtaagtaatgcacaggagtgatactctgttaacacattgaccttgaagaatttgtattccttttggatgtatgtatagctgcttaagccactttcagacttagattatcttttataaatgtgccttccatacagaattctgaaaatatttaccatggacaaagaagcagatttaaatcaggtacagacaagaattgaaagtgttgaataagtgaatatatttcccattctctctacttttttcttaattcttatagaactttgcagaaagaatgatacataccacagtaccagcaagtttaaagcgtacccttttgtgcaaaaataagaggttatctttgaactgccttaaaaatccaaaattaccctatcagtttgcaagtattaatcaactctggtacctgaccaaaggagtttaaacaatgatgtcctaattaaacagaaaaccagattaaccatcttgttgaaaagagtctctactttggttttgaaatcttacaattcaatacatacacatacacataaaaatatctatctatatgaatgtaatagtttacagtagggctgtgcttactgctttgaggtatgtgtttttaaaaccaaacttgatttatttatttcttaggcaaagtaataggaaaaaatggaaagctgattcaggagattgtggacaagtcaggagttgtgagggtgaggattgaggctgaaaatgagaaaaatgttccacaagaagaggtatgttacagtgcgaatattttgtggcacatataataaaagtaaaagttttttatgtgatatgttgaggacctctaatatgtgcataaagtgaatgcaaatattctgattatcaagcatgcctgctgtaattaatgttataattgtagataatggcccttctctgtcctctaatgcagtgagtttggattagtcactttattgaattcttttttcctgatctttaaaatgggtagttataaatttttaaatatgagacatacatcactgggtcgagtgttaatggcaatttaataaaataatatatatgtaaatgcttcgtaaagcactttgtaaatgttaatgttgctgacaaaagcaaaattggaacacaggttttctggctttcatcttttcacttttttagtgtggggattgtgtagtatgtgtgtttattctgtgtgctttaaatttatttctgtgcttaatatctcttccccatcctccttacctttaaattctgtaacccttttatcttcataaatatatgctttttgtagcagcttttaaagtatttgcatggggtagagaggtgaggatgcacctttctgtgcaatagtactcttaagatactgtctcatcaaagagccgtaattttcacatattgtctagctttctttttgaaagattcttttagctaaagttaaatcttttttttctgcgtacaatttgtattcggtaattttataaaccaaaactgtttataataacttacattttttaaaaatatgatgattgataacactaatagagctaaataaagtcttaaattggtcctttttttctcttttgtgttttctgttttttaccaaggaaattatgccaccaaattcccttccttccaataattcaagggttggacctaatgccccagaagaaaaaaaacatttagatataaaggaaaacagcacccatttttctcaacctaacagtacaaaagtccagagggtaagaattacttgtcactttgaattacaatacaagtaatttgtctcagatgtcacaattggtattttggatgttttctctggttagacttgtaggctacttatgttctattttttttccaaatgtaattgccagcttatgagatactacaaattagtgtgatacatacttttcaatttattcacagtaacaactcttatgccataaacacaaaataatggggttgcatttagtggtcacatttttcttttgacagtggactctcttttttccatgccttctctctttaaattttgcaggtatcgtagctcaaaatacaccttctgttagttgcattagttactacttgaaccatattttagaaactaattttctctgtttgaactaatctgtttagaaatgggtttaaaagtcctgcagtgaaagtcctgcgttcaggcttctgtgtatcgtttgttatagttaatgacatcccttgcattccttatactgctttaggtgttagtggcttcatcagttgtagcaggggaatcccagaaacctgaactcaaggcttggcaggtaggaaaacattccttgagaaatacactttcagtttatattttaatgtttattccccttgttaacaaagattacaaatgatcctcaggattagggactggagggaggagtgtttgtgggtatgtggatccattgccctggagttaaagcttaaacaccttcatgccgcttgtaaggcttttcctaattacttgtctagttatcatctttaaattatcttctcccttgcactctagagaaccttaagccatactgaagtactttgagttctctgaacattctcgtgcttattttgcttctagacatatgtacaggtttactctgcctggaatgctttttctcctccacatgtcacctcattttgaccttattccttacaaagctttccttgtgtacttgccgaagatccccacccccttgactggttcaagagccttccccttctgttttgcaatgtgctcacccctagcatagcacttaaacatagatgtttatttgttgatctcctcaaccacattgtaagttctttgagggcagggagagctggtgagaactgtttatggaaaaaaatgttgtggactcatggattaaaagcaaaggtgccattttacaaagaggactataacggcaagtggattggatatgtctcattgccgggcagcccattattccagaacacagagtaacttttttctggggtccgtactaaaggccatcattccattcttgcctttcttcattttaatttactattcaggtctactcgtgaagtgcttaaattagagtggcccttggggtactccagcagtttagacatgttgcaagaaaagatattcgtaaataatttgctccgaagtcaatctaactaaatctgttacataggattttaaagctattttggtgatatttgacccagagggaagggtgtagcattcattccatcacatggtattttgggaaataatacagttaaaggcttttgtaacaaataaagcttgttggagaaaaacccaacatgcagaaatgaattgccagttattaatttgcacaattgtttctaggtttccctataacttgtgacaagaagtagttgttttttttttccctcttaatatatatatatatgggctaggagtacagacatttagcatatgccttttaaaaatctgttcttatgttaagtagtgtccatagagagaagttcaaactttccttgtgattcagccttttaaaattttcagagtacattattgaaatgtgtatgggcttgataaaacttaatgcttgtcaatgtacctatttttttgtctcacagattattcagtgcatttttatcctgatgtttttgtttgtattttgtgtgtactctatttacttggttagcagaaatgatttactttttacttttgtacccttggtatttcattttgattttttttttaagaatttgatcggccaggcgcgatggctcatgcctgtagtcccgacactttgggaggccaaggcaggcagatcgcctgagcccaggaattcgagaccagcctgggcaatgtggcgaaaccccgtctctacagaaagtacaaaaatttagctgggtatgatggcatgcacgtgttgtcccagctatccaggaggctgaggtgggaggaacacctagggcctggggaggtcgaggctacagcgagccattatcatgccactgcactccagcctggataacagaataaaaagaccctgtctcaaaaaaaaaaaaaaaaaaagaggcggaggcgggcggatcacgaggtcaggagatcgagaccatcccagctaaaacagtgaaaccctgtctctactaaaaaaacaaaacattagccgggcgtagtggcgggtgcctgtagtcccagctacttgggaggctgaggcaggagaatggcgtgaacccgggaggtggagcttgcagtgagccgagatcccgccactgcactccagcctgggcgacagagcgagactccgtctcaaaaaaaaaaaaaaaaaaacaaaaaagaaaaaaaaaaaagaaaaaattttgatcaggataaagcctttcataaatgaattagagcatcttatactactcattttgtttatacatctcatggtaaagcttgtataattttgaattatacattttgtgattttgctgatactgaatactagtctttataataatctgatacgtttaaaaggttgctattgatctattcgtattcacagtagatgtgtaaagtagtatatcaactacttttgttttcatatattgatttatatttacagcaaacatttgtatacctgctgttcaccagatcctgtgctagggaattagtcgttatttgcatttttcagattaatctatcattacttttataggatcattgttgcaatttctttttcagggtatggtaccatttgtttttgtgggaacaaaggacagcatcgctaatgccactgttcttttggattatcacctgaactatttaaaggtgagaacagaaagaactttaacttctaatccttttgtactaaaatatacaaactttatagtagatctttcagcagttaggactcattctagcctgtgcaaaacactgtatgacttgtcaaaggtaatagagaaaatacgttgtttggcttataatttttttaaaaatggaagtctttataaatttaagtaccaatataccagttttcaataaaattttatacttccctttattcttctcttaaacccttacactcagtttaggcaatcctgtacatagcctgttaatccatttgatcctttctagcattttggttttttccagacaaaaatctgtgtctataactcttgcctttattgttccttttatgtcatttatcaaggaaatctaagcatttcatgaagttctttgtttaaatgtttaccctatttttctctttactgttattcaaaatacaaactatttgtgtcttctcataaatgttcagtttagttagtgtgatgcggttatgcctccttaaaatttcaaactggaagataggaacgaggaggctacaaggtgtagtggagcaagcactggatgggcaatgcagcaatttacttataagacttcagcaaatgaactagctgtgtgactttaggcaagtcacttccctacactagatgcttcttgaaattccttttggccaaaatgttctatactttaatgaaatggaaactgatctacttcattttcataatgttttatttgtatccatacatatcaaaattataatgtagctggtattaaatgtttttaaaaagcatttcaactctatttatggcattaagaatttttttgctgatttcttgaaagaaataaaaagtacatgatttctgcttgtgtgtaaataagaatgaaaggaagaaaaagtgtaatactgggcatgccattcattcttatggtggccagttaattaaaagtggaaaggtttcatccagcaaggtttacatgggtaggatacctctttgatttttttttaagtatgtttatgtgtaatctctctgtgtgtgtgtctctctcgtaattagcttaaatcatcatgaaggcctggagagttaggattgcattgtatcaaatcccttgttcttttgactaatgttctttcttagatcctttgatttattctcaagaatatcttctttggttatcagcagctgccctgttgccattctttccatcaccagaacttccctcgtttgggcctggcatctctcaccaaaaggtgactgctttgccccagtgggataacctggactactcttctgttttgcaagatattcctattccatgagctattactatacctttggaggaagtcactcactcagctgcagtctctcctttgctcaaattctatgtaaaacagattctggtgtaactatgtaaattgctaatgatggcagagcacagatgaaacggaccaaatccttacctgacctttcttttccagaagctgccacaaccaagattttagaaacttagctttacaggagcttctccaatgactgttcatgtagacagtctctatgataacctctgcttcactgagacgcctactactactatagttatgaatctgattccccgtagccagtaaatgagatgtttatgagtggattggaaggacagtggttagaaatgaggtttcatctggttttaacagaacccaacatactggaagtgctttttgtaagggtctgtcattggaccccaggtgtatatttctatcaactaaatgtatactgtttctcgtacttgttgtagcagagttgtagtctttaggaagttttcaaggcatgatgtaagacctagctgtctggtcagctattaaatagttttgttttcccctcatgaggaatagtcagcattttcagttgatgaaaaaatcattgttccttaaccatagtatatgttcttttaaaacaaaagatggcccaaactcaatgctttgtaaattaagatattaactggcaaatctattttaatcaagattatttacaatgtgtgattttttaaggttagctggttataccttgaatgtcatttatctatattcatacattttagcatgttttatttaatatcctatcatgaagaagtccccaaaatagcatatctgtgccttagcagtagaataattggataatagtgccaaattagacaactttaaattttattcagtataattttactgctgagtgtttttgttatatctctaattcttgacatcaataatctgttatctgtagtaattttctttttaaggagatcattcaatttcctgataattctgtgtaacagtgtttactgtaaatttagaactgaaattgaaatattccagtatatttttatctgatgaaaaggagaaaggttttattaagtaaaatgtcaaattatttttactgttatcttgtatattttaaataggaagtagaccagttgcgtttggagagattacaaattgatgagcagttgcgacagattggagctagttctagaccaccaccaaatcgtacagataaggaaaaaagctatgtgactgatgatggtcaaggaatgggtcgaggtagtagaccttacagaaatagggggcacggcagacgcggtcctggatatacttcaggtacaaactaagcattttactcagtaactttatctgttcctagacttatagctgctaatctctaatattcattagaaccccattataacaatttgccgctacatggtttccaattcacagtgggttaaattgtgttacaggagacatagagtaaaaacctgatgataaacacgtagagttcacagggccggtgcaagttctgttcatgctctgattgggggtaaatctgcaaagcccttgtgtgttgatgattttcttaaggcctctcctgattttataactgtatagtcaaaacttttttcatttgtgtactgtggctcatttttattttgtcaggtatgtgctggtcatacttgctggatggactgtgtaaatcaggggtctgcctcttgtggctcataaggtgattttgagtgacatggccaaagtcagccctaggcacagtcaagaagtaggcgaagtttctctttgccttcccagcttttctgtccgtgcttctttcttctctcccagtacctttcagtgaacctgatccccacctgccagtgcctactgtctttcttgctcaacagtgtatctcctttgtaacttgctaatgatggtataaggtataatccatttcacgcatatttgcatttcaaaaaggaactctttaagatggaaaagccttcaagatccacaggaatgaagctataatggtgaagctataattggtcattagctccaacagaggaagagagaggtagtagagctgatattctggagttggggagagttacctactcctaaggccaaccttgaacctaacccctaacccctctcccaacagtctgttctttttactcatgaatttctgcctcaccgtggagctctttttctccgctcctgtcctctaagtcgttaaccccttcaggcataatgaatttattatagtaattctttattaatgatcaattattgtaatgggagtgggagggcaggttgtggaccaaacatcaggcaagcatgtatctgccttcagctagatccaatccatgacccacaagagacccttccctgaagcagttgccatggtggcctcctttgccaccctctcagaaatgaccaaaatatatacattcccctctgtcctgggccaaatcttgctaaaaggagctctctttttagaggttttgtttatcagggtatcacacttaactgtcgtggataatcttttcctccagagagtatagatgtttaaaggaacacagctatttaatgatatggcacatcaaggtttgaacttaggtggctaataacatacctttttaaaaatgagaatgaaacatgtttataaccaaaattaacctcaaatattgcaaagcccttcattttgagtttaaaattttgttttatgaaatggaaagtgataatactcttggtgggcttataaattgggaagagttttggattacccctgaaacgtctctggaagcttctgttaaccctcttttttttttttttaaagtcagacaatggtatataacttttaactctcgataggaactaattctgaagcatcaaatgcttctgaaacagaatctgaccacagagacgaactcagtgattggtcattagctccaacagaggaagagagggagagcttcctgcgcagaggagacggacggcggcgtggagggggaggaagaggacaaggaggaagaggacgtggaggaggcttcaaaggtatggagatcttcattaagaaatcaaagtgaattgtaacagctgtcttgaagttccatgagaaatcctattgatgcaatgaactgttaccaagatcccatctctcccgttttgtgctgataccataggaaaggatcagccttccacttgtgtagaaagaaagaatattaggcagccttccttatggttcatacagatatatgaataaatgctgataactaattcagcatcttggtgggtctaaacagcatcccttcattaactcacattgacctgtagatgcagaattataataactgtgaaatattttctgttacttagcagcaggctagattattagccattgtgtaactggaatcactggggtattgattacatttcagattctgtggttggtttaaatagagggtgtgggaataaagaacttccagtaagcatttcagaatcagtaactgttgaaccttttgaaaatattctcataggaaacgacgatcactcccgaacagataatcgtccacgtaatccaagagaggctaaaggaagaacaacagatggatcccttcaggtaaaacctgtctgcctcttttcatcttaattgtttgaatatggtagtttgagatttatgagtttattttactttattaaaaacatgttcaaagattacaaatccagtttatgtgaaatattttaccttcaacattacaattgtagtcaatcttagttctttgtgacaagtatacaaataagaggatttctctagagaatatgcagtctgagtatttgtgaagaccttgacagccacactatgattttattatttattatttatttttatttttttgagacgggagtttcgcttttgttgcccaggctggagtgcaatggcgcaatctcggctcagagcaacctctgcctcccgggttcaagtgattctcctgcctcagcctcctgagtagctggaattacaggcatccactaccatgcccagctaatttttgtatttttagtagagacggggtttcaccatgttggtcaggctggtcttgaactcccaacctcaggtgatctgcccaccttggcctcccagtgtgctgggattacaggcgtgagcactgtgcccagccacactatgattttaataccacattggtagacctgcaatcccccagagaaggaacatcctgggatgtacttagagacctcagtaaaccttatgtgtctttgctcccccaaattaacagggatagggtattctctttgaatagaaaataaggaaaagaaggtgtctgtcttacaactaataatcatgatagacagagctgatgatattcagctagtctccatgcttggtcagtcatctgcttatttacagccaggacctagtccgaggatctcttctcaattggctgtcaccagtgctaaaccaattgttaaataattttaaaattatctcctgagcacatccaggcacctttgctaagtgctttgtgtatgttttatctcatttaatcttacagcaacccactgaggtagttttattattccactttataggtgagtgcactgtagcttcagtcctttgcccacagtcacatagctagcatatgtccaaatgatagtcaaaccttagtgtctgattctctgaatctatgttgtcgtctactttttctgtaacttttaattattaagtagttagggttccttcctgactatggattcatttgggaccatcacccaagattagtgagagatactttttaagacaaagtttatgatggaatatttcttggaattcatagcagctcaaagtaagtgttaactattggtgggttcttaaggaccagcatgtccaagggatagatagattggtaaattactgtatgtacctgtcttttacaaagctataagatatttaagtacccgttttgtaattttccacttaaactgatatgtttgatgaacttggcagtctaactgcattggttaaaaggatgcacatttatatttctaaatgaaatggaatactgaatttaaaaggtgatgttttctctattaagtatgaaaatagatacaaatctggccaggcgcggtgctcacgcctgtagtcccagcgctttgggaggccaaggtggtcagatcacctgaggtcaggagttcgagaccagcctggctaacatggtgaaaccccatttctactaaaaatacaaaaaattagccagacgtgttggcgggcacctgtaatctcagctactcgggaggctgaggcaggagaatcgcttgaacccaggtggcagaggttgcagtgagccaagatcttgccattgcactccagcctgagcaacaagagcaaaacaccatctcaaaaaaaaaaaaaaagggccaggcacggtggcgcacgcctgtaatcccagcactttgggaggccaaggcgggtggatcacaaggtcaggagatcgagaccatcctggctaacatggtgaaaccccatctctactaaaaatacaaaaaattagccgggcatggtggcgggcacctatagtcccagctactcaggaggctgaggcaggaggatggcgtgaacctgggaggcggagcttgcagtgagccaagatcgcgccactgcactccagcctgggcgacagagcgagactgtctgggaaaaaaaaaaaaaaagatacaaatcaaagtactgaatccttggtaacgagacatttaaaacacatgcacatacccactacttaaacatactttgaaattacaaccatttggggatgtttttagcatttgtgcttgaagtagatcaatatttgtagttgttttagttccatttgtcactgttaactttcatttgtacctctggaattagcagtgctgtattcagcattggcacttaaaatattttatagctcttagaacactattttttaaattacattgatctttatactctcctaggattccagtccttccacaaattattatatgcagttttctttatactgttccattcttcagacagagttcaggttgtaggatcatctgaattttcttagtgaaatacaagccagtagaaaccaaagctcgtgtttttctactgtatgactatgggagctctcagtatagagaaacttgatcatacctgtgatagatataaagatgtaaattaaagtctagttagtgagttatttgagggtaaagccagaataggaaaacattttgtttctcttttcctgggcttcacaatctttggagaataactaattttattttaactctagtgttagaggcatgtatgtcttctggtaatcagtaatagtaattcattttacctgtttgtttctcactgttttattctacttagaagaagacatgataggattgtgagtttttctctaactttggatgcagtgagatgaccagtgtgttccagttaaagaagaagagtgttttaaaatcataaaccaaataaagaatcctaccttacattaatttcttgcacttcttctgttctcatctccatttctctttttaacatgtggaatttacacttcaggtttaaatttcttgtcaggccaattacagattacagtaggatatggtctgtgtatataacaactataacttgttttagatcagagttgactgcaataatgaaaggagtgtccacactaaaacattacagaatacctccagtgaaggtagtcggctgcgcacgggtaaagatcgtaaccagaagaaagagaagccagacagcgtggatggtcagcaaccactcgtgaatggagtaccctaaactgcataattctgaagttatatttcctataccatttccgtaattcttattccatattagaaaactttgttaggccaaagacaaatagtaggcaagatggcacagggcatgaaatgaacacaaattatgctaagaattttttattttttggtattggccataagcaacaattttcagatttgcacaaaaagataccttaaaatttgaaacattgcttttaaaactacttagcacttcagggcagattttagttttattttctaaagtactgagcagtgatattctttgttaatttggaccattttcctgcattgggtgatcattcaccagtacattctcagtttttcttaatatatagcatttatggtaatcatattagacttctgttttcaatctcgtatagaagtcttcatgaaatgctatgtcatttcatgtcctgtgtcagtttatgttttggtccacttttccagtattttagtggaccctgaaatgtgtgtgatgtgacatttgtcattttcattagcaaaaaaagttgtatgatctgtgccttttttatatcttggcaggtaggaatattatatttggatgcagagttcagggaagataagttggaaacactaaatgttaaagatgtagcaaaccctgtcaaacattagtactttatagaagaatgcatgctttccatatttttttccttacataaacatcaggttaggcagtataaagaataggacttgtttttgtttttgttttgttgcactgaagtttgataaatagtgttattgagagagatgtgtaatttttctgtatagacaggagaagaaagaactatcttcatctgagagaggctaaaatgttttcagctaggaacaaatcttcctggtcgaaagttagtaggatatgcctgctctttggcctgatgaccaattttaacttagagctttttttttttaattttgtctgccccaagttttgtgaaatttttcatattttaatttcaagcttattttggagagataggaaggtcatttccatgtatgcataataatcctgcaaagtacaggtactttgtctaagaaacattggaagcaggttaaatgttttgtaaactttgaaatatatggtctaatgtttaagcagaattggaaaagactaagatcggttaacaaataacaacttttttttctttttttcttttgttttttgaagtgttggggtttggttttgttttttgagtcttttttttttaagtgaaatttattgaggaaaaatatgtgaaggaccttcactctaagatgttatatttttcttaaaaagtaactcctagtaggggtaccactgaatctgtacagagccgtaaaaactgaagttctgcctctgatgtattttgtgagtttgtttctttgaattttcattttacagttacttttccttgcatacaaacaagcatataaaatggcaacaaactgcacatgatttcacaaatattaaaaagtcttttaaaaagtattgccaaacattaatgttgatttctagttatttattctgggaatgtatagtatttgaaaacagaaattggtaccttgcacacatcatctgtaagctgtttggttttaaaatactgtagataattaaccaaggtagaatgaccttgtaatgtaactgctcttgggcaatattctctgtacatattagcgacaacagattggattttatgttgacatttgtttggttatagtgcaatatattttgtatgcaagcagtttcaataaagtttgatcttcctctgctaaattgatgttgatgcaatccttacaaatgattgcttttaaaattttaagctaggaaaagaaatctatagaaagtgttctgttacaaaatgtaactgttaccattggaaatttcacgtcataggaagttagcctttatctaccaactttcaagaacttgtttaataaagcgaaaaactcaaccaaatggtacaaaaccacagtgtaccattaaaatatgcactaagtctcttttttacaaaggctgtattcagcaaggcgctaacttgcttaaatgtgaattactaacttctaaaactgtactttgattcacatgttttcaaatggagttggagttcattcatattacaatatttgtgtgctaaacgtgtatgtttttcagttcaaagtcatgatgtttttaaaatcttattaaagtttcaaaaatctgaagattgtttatctagatgtaaatttttattaaaaagttgcacttatgaaaaagcaaaaaattagtctgacagatgtttgctcctggttttaaatttctacatttgacaaaaactaatgatatgtggggggaaagttgtgcaaagtaaatgtatgttgcaaataatcttttatgagcccttaaaaggcaaaaacgaagacacttgaaaataattctccatattcccagacataaaatttcaacacatttattacatagggtgccactaaaccatattaaacatatactcctatttgtgcacacatgaacataccctgccctttggaaaaaagtatgtctatgaagtaaaaaaaaaaaattgatttaaacgtctcagtaataaaataaatgagaggtttgtaggtagaatgtgcctgggaattgactactgtaatcacttcaaggaactctggcacagcctacccgcctaaaaggtacaaatggagaggtgacagtgtcagtgttctacccagggttagaatccaaaatgatgctagacagcctcctctgcattgatgagtttttttccccagaaaaataactattttctgcttttcttgtttttcattctgatgcttttgtggttctttgctacccattctgtctaactgggcatcattagtggtgggtaggctgaaaccatactcaagtaacttgtttggattttccttgtttcacagtagttttcagcactacacatgaacagcctgttggaggcagccagcttaacactcaacttggctctctcagagccatctctctcatctgatgatggtcttagaattcctggtggctcggaatatacgtcttttagaggcagcaaaatgattctgacccttttgagccagtttcagtttcatggccataaacagccttgtgaacctctatgcctctgataaccagttattctgaaatagtcattaccatgtgctagtcttgattgttcataaggcttaatgtaccagaatttaaatcttgagcatcttgttttctctgtttatctgaggtcatttaaaaagttttatttcaatttctctctatgtaccataatgaaactgggaaaatccattttattttaattttttttagtatactaaggggttttctgttagtgagagaggcttgctctgtgttaaactcacagggaagaattatccttcccctggaatacagacccagggtgcagctagcagtgctctggcctttgcatgagagaataatatccatgtgtctcttcctgaccttttgctgacaagtttccctcattaaaaccactttcttctgtgtggctttgtgcagtttgccataacccattacctcaaaaatggtgcccaacatgaggtaaaatccgcttatttcacctctggctttttggaaactgcaaaagggatcaactaagctatactagggatggacagcatccctgctggggctggtgatgggaaacccagccaagctaacatctgcaaagcatgctagtgtggtgcttattggtgttcatgtgccacagaggtcctgggaagtttgtgtaagggagattgagacaattaaatcctttggcactccaagtctggcagcctctgtgagacctaaggaaaaagaagttgggagaaaaccctcagcacctaagtgccattagaatagttgatgcagtctaaacgtttttttgtttgttttggtttttttttttttttgagacagggtctctgtcacccaggctggagtgcagtggcatgatctcagctcactgtggcctccgcctcccaggttcaagcgattcctgtgcctcagcctccctagtagctgggactacaggcacctgtcaccatgcccaactaatttttgtatttttttgtagagatgcagtttcgccatgttggccaggctggtcttaaactcctaacctcaggtgatctgtctgccttggcctcccaaagtgctgggattacaggcctgagccactgcacacagccacaacttttagatttgagacttgtcattgtgcagtgtgccacccaggggcctttggtaggaattgaggtatatcctgtgggatttcaaagacactaacagggaattggactcccagcaatggtcacaagagtaacctgaggctttaattgtttatatgatgacgaggctacacctacaaagtagtgaagctgaatggcaagcactttgggtttatcacgggattctcttctgccagatgaatttgctaggctgaccaatggggagggagcaaatggacctgccttgttcttgaattggatgttcagggcaatcagattcacataaccaccaagaggagacttcctgagaaactgagtgccaagtgaaccattctactgaggttaaagctgttttgagacaacttggcatttttgcatacttgcatgaaaatcctaggcatctaggataagtagtaaccaaatgaccttaattcagagaatgctggaaaagttgatggtttcttatacggagacatccctaactttgctccttctgccagagtgtaaaggatgaaataatcctttggagctgatatatgccccacccaaagtgggggtaatgagataaggggccctggaaagaatatgtctcagcaaaaatgaaaagtcaagggaagagcatcaactctagacttttcctaggcttgcacaggcagtacatcatgactcttggtctgcaacaaagtgatgactagctaaggagatagataggaaaggtagaatcactctaaggagcttgcagagagaaggatgcaggaaacaacactgatattagagtaggcattaagaacccccctatggagagctgatgcaaggaggttctggatgggagggttccctttggagatggaggcagttagctttccccactgcttggccagcaaagctccaatgcctcctgcgtccttgtagaagggtttagaggaagctaagcagttggccacatcttaacactgctgaaacaagactctcagacactccctacccccagaggcctctgtgccacctgagagattgattttctaggccgattgctggggagctcttcaagtccatttaaaccaaaagcaagcttggcccagggccagttcctctgccctcttcaaggagatgctaacttcatgtcctaatccatgtagcctggaacatagataggggaaggacttaacagacctagacttaataaaacacaggagcccaagaagctgttattcttggacctgatcaagtccacagtaaatttccctggctggagttgggtttggttttacttagaaccaggagactcagcataattactgcagatgctgttggctgctttcataagaccatgctcactcaccatccctttgtcagactccacagttgatatggacatgctgagtcccctcagcccagcaaagcagaacatctgaatggatgcaaacatggcaatgtctcttagtgaatactataaatcagtcttattgagtttgcagaaccccctgcacttccaaagcctgtcggaattgtgcagttgaagctggcacataccaaagatgagaaagaaaacattcccctcatacaagatttactgccattgccaggagggaatggtaggctacactaccttccaattccacaaccctgttaggccagtgagcaaatccagtgtctttggccccagattacagatcattatggatcattgtgattttaacagtggccaccatggcactcacagtgcctgatacaccaacagatgactgaactgattgcagccattactggcaacgtggtatgtcctagagctacgctgtccagttcttaagccactaagccatatacggctgttgagtacttgaaatgtgctggtctgaattaagacgtgctgaatgtgtagaatacacgagattttgaagacttggtttgaaaagatgaatgaaaaatgtctcctttttatatttagctgttgaaatataaatattttaaatctcttgggttaactaaaatatgccatgaaaattcattatacctatctcttttttaccctttttaataatgaccactagataagttaaaattgcatatgtggctcacattatatttcaattggacagaattactctagatactactaatgttctccaaatttctccagaaacagaagaaatattttgctttcacctgacagaacattaatttctggtttgttgtgggaatttcacactcctccagcaaataagtgcaatttatcagtaatgggttgggcaagcccattccattatattgatgacattttggtagtgcccctcacagaggaaactgtcctcactgtaatgcatgctctctaatctaagcacaagtgtccacaggtggcctggcccttgaatgaggatagatgccagagccaggccacccaagtacatatcttgggggctgtattagcaacagcctgaggagacattccatagcataataaggaaagtctattggccttacagacactaccaaaaaaaaaaaaaaagaaaaagaaaaagcctatgatctgttcggcctctttgggtattagaggcagcacatctcacatttcaaaatgtcattcaagcatctgtacctagtcaccagactggtagccaaatttaagtggagacccctacagcaagaagcctcagaagcaatacaataaaatataacctgattcccatggagttttatgtatctatgacaggtcttacatctgatacacctggcaacaagactctgccaatactggggtgggaaatctctccactgctgaatggtacgtgccttttaaacgacaattatttgtccattataaatctctggcagggactgttgtctcactaaagggaagtgattgtcagatctaacatccccactctacaatgggttcactgaaccaaatttcataagattagtgtatcagtgagtgtatccaccagtgaggaaaacagaaatcacaccactaattttaacagagagtttgatgtacggattggttaaacagatattaaagggctgaaaatgcagaacaagaacattaaggtaatagaggtaggatctgcaggaagcatctaccatcctgaggcctggtggaatgaagggatgaagctagtatgatgagaacccaaagctcaaaggaggggcccatggaattaaaactccagacctttaggaaagggaaactgcttagttagtactggtatcttggaggcagaacctcatggggcttggacttagaccactgaggagagggtgccagccaactgactgatgctggtgtctgaggaggcatgacgatgctggctcagagagtgtggaaggaaaaatctggcaactggattcaagtgctgctactggaacaaactgtttctaccagagtgaagaactaacatcttcaagtctccttctagagccccttgttgtcagaacctaacaggaagcagctggtgaaggagaaatgtgatgtgcagagtctcagccccagcatcacagagcagattatagaaggatagtttggaactgagagacaataatttaataattggcagtgtgtgacaagccacagaaatgtgaaatggaaatagtacatccaattgagagtcaagcccactgcaaggataagtggttgcctatgcagtaggtacggagaaagtttcactcctgctttgcctgagcaactggctcaatgatggcatcaatttcaatggaaactaagccattggttataatgatgataagtgttgatgtcccatggcactggctgctctgcacaattaatagaagtacttcaagtggtgcttttgagcaataaaacattctgcttcttgaatgaaaatgtctttacacagacatgggctgcgctaccggccttgctcttaggtcaggatgttggaccacccaggatgagaccattaaagtcatacgtatgtgctgctccttatggaaagagatgcacctcatccacaggctcaattaataagtcacatatttatttgtctcttaaaaaaggccacatcctgagaaaagcaaaacatttggaatgagaaagtcaactgagcctctgagccatcctatttatggtgacctactagatccagatttagacccaccacagaaacaaaaccatcatgaagggctgtcatacagaagtcagaactaactcatactggcagatttactttataggtccccctgcccctatgtaggtccgtatagtgggtcctgactgctttagacacactctagatatggggttgcactccacctgccccagtcagatagcacacatagattaaagtgtgtgactgactttactacctttgtcatgtgttgacatgttctcacatgatacaatatgacaactcatttatggccagtgtcaaacaacaatgggccaatgagtctgtcagcatggaattcactggcactcctatgcttctttccactctcattcagcaggtgaaataaagtgctcgaatggccagcttaaggaacaatcacactggccactttaagaacaaattctgtaaggctgactagcacaattctcattagctgtatacactgccatgttccatgtgttagttcaggtcctctgagaagcagatgtcaagacagaattaaatgtgcaagatattttggggtgagagtccatgacagattaaaggggagggagccagagaacatcaagagagagtttagaccatgatacagatctgacattgatgaaggatagggaagaaagaaggactgagtaaggagatcctcaactatagtgcagtttcaagtacgtttcaaccaggttgatgaggagtgcttgatctgaagtcatctgttaaaaaaagttctacttgcaagaatggttctgtatttgcattagtacccccactgtgctcaattagtggctaattattggctgaaagtagcctgaaggaagcacaaccttggtgcatacacagtggtggatccagaagggtagcatctggggctgtcagtcaattatgctctccacaataggagattgaagtggtacactttggtggccaccacattatgtaataataatttccctcttttttgtttggttttagaaatgaggtctcactctgttgctcaggctggtcttgaactcctgagcttaagtgattctccaccttggcctcccaaagtgctagaattacaggcataagccaccacacccggccaaattccttttttggtcccacattaaccatgatgaatagctgggaggattgtactgcatggatcacagaaatgtggatgaacataaatttagaggctcttttcttttttcttttttcattgaaatggcatctggtgacctttcccctgccccccacatccccagacaactctgaatctggggttgccacatgcctcctttgcaatttgagaacactgctgtggttctcatgctcatatcattagtcacctctgtgctgtaaaaatcttcctggatctcaagaggttgtctttgataaagggattgttatccccatggtctctgcagagattttcattctaggaaataaaagaaagtctggttctttcctgagggtagctgacagaccctgactggttgggctcgggcgaattcaaccctgagaagcatgtagaggatcaaggggcaaaaaacctctctgttttcctattccagatagggacagactatacccatctgaggcagtgacctctagtgccaattatcacaaagctatatatgtcactcccaactggatttggctatgggggatcatattagcatcccactatcaaatgatgcctcaagtattgctcctataggcaaggggcctcagccaccattttcctgggccttctgcactcatgtgtctatcccctgtgatgtccataccaaacgaatgcagagtatcatcttggacccaactcaaagtagcatttgtgtacccctcgcccgctttcaggattagtttttctgtgcagttaagatagcttcctttgcctcccctgcctttcccttcaaagagtcgtccacttcctgagggtagtcatacaactcttcaaaaaacaaagaaccagtgggcacagactatatcctcagcttctggcaccatcagtaggctctccttgggagcattatggacacagtttattgttattttacatgggtttttctctcatcaggaggtgtttgtaaggctcactaggggagattaccgatgagacagctggggatctcactatcaaagatgttgactccctaactcagattgtgttagacaactgcataactttggattatttactaactacgcaatgtgcattgtggtcaacccgattctggatgaatacttcaatacaagtagagctatcactcagcaactggtggagttagccatatggctccaaaacactcccaatcaaagccttggatctttttctcatagtttggcctgggctccatgattagaggtctcagggaactctacagatttttattttaaactttgtacttttaggaccttccttattttacaaaatttccttggcatagtcacatactccagaaaccccactgaaaaatccaatttatgtttagtcccagtgggcaggcacatctcccagaagaacaggagcccatgtatttcgtcttactaacactttggcttgcacgttacccccaattaaacctattcttatgcccattctacataacacaatagtgtattcttccactcacctttcaaagacagactaaatgggcaaaactagaggcagaaagatcaggctgttgaaattatgagccaatgctaaggtagtgagaatggaaaagaatcatgggattcttatgacatttaggagatgggatcagtgagacttgctgattattatgtggggagaaaggggaagggaagaagctagggttatgatttacaatttcttttggagaaatagatttattcattcaactgatgtttattcactgtataccatgagtcaggcagcatgtttgatgatgaggatacagaagaaaaatacactgggagacaaaaattaacataaaataaaagaacaattacagagacaaatagatataatgtgcctcctcatatgatgcactgagaaggatacaacctcacttctgtagtgttcctgctaaaaaatgaataagctgaaattaatcatatgaaaacatcagacaagtccaaatagatgaacgttttacaaaataaactgcttgcactcttcataattattgaagtcataaaagacaaagaaatactgggaaagtatttcagaccaaaggatactaaaaagacatggtaattaaatgtaacatgatcctggattggactttgaaccagaaaatgttgtcttttgtcataaatgacattattggaatgattggctaaatatgaataaagtctgcagattacacaatgcgacaaagctgacttactaatttcaaagattgtactgtggttatgtaagagaatgttcttgtttttaggaaatacacactaaagtgtttagaaggaaaaggctgagctattggctgaaagaaggcgtaagcagtagcagagcaacaaagcatgcttaggctctggagttaaactacctgggttctaaccccagcacagcaatttgctacctatgaaactttgggcaagttatttaagcattctacaaatgaaattttctcatgagtaaaacggacgatgcttataatagcccctactccatagaggtgatatgagggtgaaattagtgagcatatgtgaagcacttaggctcatgcctggcatgtatgtgtcatcaatgctggctgtacttaagctatatttcactctgtgtcctgtgaatacagaaggaaatgtgacacagcctccttcttcaaggagacacagtgtagtaggaaaaataacaaggttaacagataataataaaaccatgtgatgagtaccctgatctggacttgagctgagagcagctgagctagagcagtaaattctgtggggggatgtcaggaggggtttcacggagggcttaggatttaaattggatcgagagatgtgaacagaagtttgcccaaaatatgcatctctcacttctgccaggccaagggcatcatacaaaactctgtataagcacagagttccagaaggttattgcgtactatagtgtatgcataggatatgcagtaatgtagcataggatatgtaatagaagggccagactcaccttccaggtgtgtggagagcattgactgccagtctgttgacacaggttcagatcccagcttaaatatcaatggttgctttgagcaactcatgaaacctctctgaacctgtttcctttccaaaatggagatactagtgtttacctcagagttcctgtgaggattaatgtaaagtgcttagcacaatgctcagtacatggcctgtgttcaataacggatagcaattagtaataatactggtattagacatttctagggctccccaaatttcctggttctccttttcttccaggtacatgcttccctgaacagggcctgagtgaacatggccctgtaccttcctttggataacaaagtggaagtggaaaggatacatgtcctttctgactggagccattgaagaggcagtatggtttgattctctacatactcttcccctgatacaacaatttggaagttcaagttgggatggcagcatcataagatggtgatatctctgtcagcaaaggtcttggggatgatcagcagtgtccctgccaacctgtgttgggcatgtatcatgcgcaagcaacaaacctttgctgctttaaggcactgagattttagagtttcatcagctttagccacacttggaaaccccgaagaatcagggactattctaaacacgttgatgtcccatgccaatctccagataagggaaaatgggcactcttcacctctcccaccttgtcgatgggatgacaaaattgggtgcaaggtttggcaacaacttagcttaacagaggaatcccaactcagtataaacaaagaaaaaccaccaggcagatgtatggccacttaaagacatacggactcagaaaagctcccaaacagttcatagaggaggcagtaaatattgagcatatctttctctcttcatttaaactaactgaattattttttcatattcaagcactataggattaatgatattgtaaccaaaccttattggaaagtataagatggggattgaacctggtcggaggatgatatttaagttgaggcctgaaggaggaagaggagctagctatgtgaaaagaagaaagcatgtacaaaggcaggagacagcatcaggagtctggggaagtttggtatggtcataacatatgaatgagggagagggggcaagagctgaggctagggtggtaagcaaggtacagagaaggtgagtgctcataaaccagggaaaggaatttggattgttggggcaatcaccagccgttgatggatattaagcaagagagtgacataatcaggtttacaattttacaagcacacaagagttacagtgtggtgaatggattggaatgagcaagaccacaggaggagagagtgcagagccctgaattaattagagacatagtgtatcaagtgtatcagtcagggttccctacagaaacaaacccagtacttgtgtgtgtgtgtgtgtgtgtatatagatatagatatatatatatatatatacacacatacacatatatatatacactatatgatatataatatatcatatataaagcatataatatataaagtatatcatatataaaatatatattatatacatattagattagagatgtatttaaggaatcagcttatgcgattgtgggagctggcaagttcaaaattcatagggtaagctggcatgctggaaacttagataggagttgttgctggagtcttcaggcagaatttctttttcttcaaggagacccaagattttca

SEQ ID NO: 18 - DNA, 63179 bp, Homo sapiens
tgaaaatcttgggtctccttgaagaaaaagaaattctgcctgaagactccagcaacaactcctatctaagtttccagcatgccagcttaccctatgaattttgaacttgccagctcccacaatcgcataagctgattccttaaatacatctctaatctaatatgtatataatatatattttatatatgatatactttatatattatatgctttatatatgatatattatatatcatatagtgtatatatatatgtgtatgtgtgtatatatatatatatatatctatatctatatacacacacacacacacacacaagtactgggtttgtttctgtagggaaccctgactgatacacttgatacactatgtctctaattaattcagggctctgcactctctcctcctgtggtcttgctcattccaatccattcaccacactgtaactcttgtgtgcttgtaaaattgtaaacctgattatgtcactctcttgcttaatatccatcaacggctggtgattgccccaacaatccaaattcctttccctggtttatgagcactcaccttctctgtaccttgcttaccaccctagcctcagctcttgccccctctccctcattcatatgttatgaccataccaaacttccccagactcctgatgctgtctcctgcctttgtacatgctttcttcttttcacatagctagctcctcttcctccttcaggcctcaacttaaatatcatcctccgaccaggttcaatccccatcttatactttccaataaggtttggttacaatatcattaatcctatagtgcttgaatatgaaaaaataattcagttagtttaaatgaagagagaaagatatgctcaatatttactgcctcctctatgaactgtttgggagcttttctgagtccgtatgtctttaagtggccatacatctgcctggtggtttttctttgtttatactgagttgggattcctctgttaagctaagttgttgccaaaccttgcacccaattttgtcatcccatcgacaaggtgggagaggtgaagagtgcccattttcccttatctggagattggcatgggacatcaacgtgtttagaatagtccctgattcttcggggtttccaagtgtggctaaagctgatgaaactctaaaatctcagtgccttaaagcagcaaaggtttgttgcttgcgcatgatacatgcccaacacaggttggcagggacactgctgatcatccccaagacctttgctgacagagatatcaccatcttatgatgctgccatcccaacttgaacttccaaattgttgtatcaggggaagagtatgtagagaatcaaaccatactgcctcttcaatggctccagtcagaaaggacatgtatcctttccacttccactttgttatccaaaggaaggtacagggccatgttcactcaggccctgttcagggaagcatgtacctggaagaaaaggagaaccaggaaatttggggagccctagaaatgtctaataccagtattattactaattgctatccgttattgaacacaggccatgtactgagcattgtgctaagcactttacattaatcctcacaggaactctgaggtaaacactagtatctccattttggaaaggaaacaggttcagagaggtttcatgagttgctcaaagcaaccattgatatttaagctgggatctgaacctgtgtcaacagactggcagtcaatgctctccacacacctggaaggtgagtctggcccttctattacatatcctatgctacattactgcatatcctatgcatacactatagtacgcaataaccttctggaactctgtgcttatacagagttttgtatgatgcccttggcctggcagaagtgagagatgcatattttgggcaaacttctgttcacatctctcgatccaatttaaatcctaagccctccgtgaaacccctcctgacatccccccacagaatttactgctctagctcagctgctctcagctcaagtccagatcagggtactcatcacatggttttattattatctgttaaccttgttatttttcctactacactgtgtctccttgaagaaggaggctgtgtcacatttccttctgtattcacaggacacagagtgaaatatagcttaagtacagccagcattgatgacacatacatgccaggcatgagcctaagtgcttcacatatgctcactaatttcaccctcatatcacctctatggagtaggggctattataagcatcgtccgttttactcatgagaaaatttcatttgtagaatgcttaaataacttgcccaaagtttcataggtagcaaattgctgtgctggggttagaacccaggtagtttaactccagagcctaagcatgctttgttgctctgctactgcttacgccttctttcagccaatagctcagccttttccttctaaacactttagtgtgtatttcctaaaaacaagaacattctcttacataaccacagtacaatctttgaaattagtaagtcagctttgtcgcattgtgtaatctgcagactttattcatatttagccaatcattccaataatgtcatttatgacaaaagacaacattttctggttcaaagtccaatccaggatcatgttacatttaattaccatgtctttttagtatcctttggtctgaaatactttcccagtatttctttgtcttttatgacttcaataattatgaagagtgcaagcagtttattttgtaaaacgttcatctatttggacttgtctgatgttttcatatgattaatttcagcttattcattttttagcaggaacactacagaagtgaggttgtatccttctcagtgcatcatatgaggaggcacattatatctatttgtctctgtaattgttcttttattttatgttaatttttgtctcccagtgtatttttcttctgtatcctcatcatcaaacatgctgcctgactcatggtatacagtgaataaacatcagttgaatgaataaatctatttctccaaaagaaattgtaaatcataaccctagcttcttcccttcccctttctccccacataataatcagcaagtctcactgatcccatctcctaaatgtcataagaatcccatgattcttttccattctcactaccttagcattggctcataatttcaacagcctgatctttctgcctctagttttgcccatttagtctgtctttgaaaggtgagtggaagaatacactattgtgttatgtagaatgggcataagaataggtttaattgggggtaacgtgcaagccaaagtgttagtaagacgaaatacatgggctcctgttcttctgggagatgtgcctgcccactgggactaaacataaattggatttttcagtggggtttctggagtatgtgactatgccaaggaaattttgtaaaataaggaaggtcctaaaagtacaaagtttaaaataaaaatctgtagagttccctgagacctctaatcatggagcccaggccaaactatgagaaaaagatccaaggctttgattgggagtgttttggagccatatggctaactccaccagttgctgagtgatagctctacttgtattgaagtattcatccagaatcgggttgaccacaatgcacattgcgtagttagtaaataatccaaagttatgcagttgtctaacacaatctgagttagggagtcaacatctttgatagtgagatccccagctgtctcatcggtaatctcccctagtgagccttacaaacacctcctgatgagagaaaaacccatgtaaaataacaataaactgtgtccataatgctcccaaggagagcctactgatggtgccagaagctgaggatatagtctgtgcccactggttctttgttttttgaagagttgtatgactaccctcaggaagtggacgactctttgaagggaaaggcaggggaggcaaaggaagctatcttaactgcacagaaaaactaatcctgaaagcgggcgaggggtacacaaatgctactttgagttgggtccaagatgatactctgcattcgtttggtatggacatcacaggggatagacacatgagtgcagaaggcccaggaaaatggtggctgaggccccttgcctataggagcaatacttgaggcatcatttgatagtgggatgctaatatgatcccccatagccaaatccagttgggagtgacatatatagctttgtgataattggcactagaggtcactgcctcagatgggtatagtctgtccctatctggaataggaaaacagagaggttttttgccccttgatcctctacatgcttctcagggttgaattcgcccgagcccaaccagtcagggtctgtcagctaccctcaggaaagaaccagactttcttttatttcctagaatgaaaatctctgcagagaccatggggataacaatccctttatcaaagacaacctcttgagatccaggaagatttttacagcacagaggtgactaatgatatgagcatgagaaccacagcagtgttctcaaattgcaaaggaggcatgtggcaaccccagattcagagttgtctggggatgtggggggcaggggaaaggtcaccagatgccatttcaatgaaaaaagaaaaaagaaaagagcctctaaatttatgttcatccacatttctgtgatccatgcagtacaatcctcccagctattcatcatggttaatgtgggaccaaaaaaggaatttggccgggtgtggtggcttatgcctgtaattctagcactttgggaggccaaggtggagaatcacttaagctcaggagttcaagaccagcctgagcaacagagtgagacctcatttctaaaaccaaacaaaaaagagggaaattattattacataatgtggtggccaccaaagtgtaccacttcaatctcctattgtggagagcataattgactgacagccccagatgctacccttctggatccaccactgtgtatgcaccaaggttgtgcttccttcaggctactttcagccaataattagccactaattgagcacagtgggggtactaatgcaaatacagaaccattcttgcaagtagaactttttttaacagatgacttcagatcaagcactcctcatcaacctggttgaaacgtacttgaaactgcactatagttgaggatctccttactcagtccttctttcttccctatccttcatcaatgtcagatctgtatcatggtctaaactctctcttgatgttctctggctccctcccctttaatctgtcatggactctcaccccaaaatatcttgcacatttaattctgtcttgacatctgcttctcagaggacctgaactaacacatggaacatggcagtgtatacagctaatgagaattgtgctagtcagccttacagaatttgttcttaaagtggccagtgtgattgttccttaagctggccattcgagcactttatttcacctgctgaatgagagtggaaagaagcataggagtgccagtgaattccatgctgacagactcattggcccattgttgtttgacactggccataaatgagttgtcatattgtatcatgtgagaacatgtcaacacatgacaaaggtagtaaagtcagtcacacactttaatctatgtgtgctatctgactggggcaggtggagtgcaaccccatatctagagtgtgtctaaagcagtcaggacccactatacggacctacataggggcagggggacctataaagtaaatctgccagtatgagttagttctgacttctgtatgacagcccttcatgatggttttgtttctgtggtgggtctaaatctggatctagtaggtcaccataaataggatggctcagaggctcagttgactttctcattccaaatgttttgcttttctcaggatgtggccttttttaagagacaaataaatatgtgacttattaattgagcctgtggatgaggtgcatctctttccataaggagcagcacatacgtatgactttaatggtctcatcctgggtggtccaacatcctgacctaagagcaaggccggtagcgcagcccatgtctgtgtaaagacattttcattcaagaagcagaatgttttattgctcaaaagcaccacttgaagtacttctattaattgtgcagagcagccagtgccatgggacatcaacacttatcatcattataaccaatggcttagtttccattgaaattgatgccatcattgagccagttgctcaggcaaagcaggagtgaaactttctccgtacctactgcataggcaaccacttatccttgcagtgggcttgactctcaattggatgtactatttccatttcacatttctgtggcttgtcacacactgccaattattaaattattgtctctcagttccaaactatccttctataatctgctctgtgatgctggggctgagactctgcacatcacatttctccttcaccagctgcttcctgttaggttctgacaacaaggggctctagaaggagacttgaagatgttagttcttcactctggtagaaacagtttgttccagtagcagcacttgaatccagttgccagatttttccttccacactctctgagccagcatcgtcatgcctcctcagacaccagcatcagtcagttggctggcaccctctcctcagtggtctaagtccaagccccatgaggttctgcctccaagataccagtactaactaagcagtttccctttcctaaaggtctggagttttaattccatgggcccctcctttgagctttgggttctcatcatactagcttcatcccttcattccaccaggcctcaggatggtagatgcttcctgcagatcctacctctattaccttaatgttcttgttctgcattttcagccctttaatatctgtttaaccaatccgtacatcaaactctctgttaaaattagtggtgtgatttctgttttcctcactggtggatacactcactgatacactaatcttatgaaatttggttcagtgaacccattgtagagtggggatgttagatctgacaatcacttccctttagtgagacaacagtccctgccagagatttataatggacaaataattgtcgtttaaaaggcacgtaccattcagcagtggagagatttcccaccccagtattggcagagtcttgttgccaggtgtatcagatgtaagacctgtcatagatacataaaactccatgggaatcaggttatattttattgtattgcttctgaggcttcttgctgtaggggtctccacttaaatttggctaccagtctggtgactaggtacagatgcttgaatgacattttgaaatgtgagatgtgctgcctctaatacccaaagaggccgaacagatcataggctttttctttttctttttttttttttttggtagtgtctgtaaggccaatagactttccttattatgctatggaatgtctcctcaggctgttgctaatacagcccccaagatatgtacttgggtggcctggctctggcatctatcctcattcaagggccaggccacctgtggacacttgtgcttagattagagagcatgcattacagtgaggacagtttcctctgtgaggggcactaccaaaatgtcatcaatataatggaatgggcttgcccaacccattactgataaattgcacttatttgctggaggagtgtgaaattcccacaacaaaccagaaattaatgttctgtcaggtgaaagcaaaatatttcttctgtttctggagaaatttggagaacattagtagtatctagagtaattctgtccaattgaaatataatgtgagccacatatgcaattttaacttatctagtggtcattattaaaaagggtaaaaaagagataggtataatgaattttcatggcatattttagttaacccaagagatttaaaatatttatatttcaacagctaaatataaaaaggagacatttttcattcatcttttcaaaccaagtcttcaaaatctcgtgtattctacacattcagcacgtcttaattcagaccagcacatttcaagtactcaacagccgtatatggcttagtggcttaagaactggacagcgtagctctaggacataccacgttgccagtaatggctgcaatcagttcagtcatctgttggtgtatcaggcactgtgagtgccatggtggccactgttaaaatcacaatgatccataatgatctgtaatctggggccaaagacactggatttgctcactggcctaacagggttgtggaattggaaggtagtgtagcctaccattccctcctggcaatggcagtaaatcttgtatgaggggaatgttttctttctcatctttggtatgtgccagcttcaactgcacaattccgacaggctttggaagtgcagggggttctgcaaactcaataagactgatttatagtattcactaagagacattgccatgtttgcatccattcagatgttctgctttgctgggctgaggggactcagcatgtccatatcaactgtggagtctgacaaagggatggtgagtgagcatggtcttatgaaagcagccaacagcatctgcagtaattatgctgagtctcctggttctaagtaaaaccaaacccaactccagccagggaaatttactgtggacttgatcaggtccaagaataacagcttcttgggctcctgtgttttattaagtctaggtctgttaagtccttcccctatctatgttccaggctacatggattaggacatgaagttagcatctccttgaagagggcagaggaactggccctgggccaagcttgcttttggtttaaatggacttgaagagctccccagcaatcggcctagaaaatcaatctctcaggtggcacagaggcctctgggggtagggagtgtctgagagtcttgtttcagcagtgttaagatgtggccaactgcttagcttcctctaaacccttctacaaggacgcaggaggcattggagctttgctggccaagcagtggggaaagctaactgcctccatctccaaagggaaccctcccatccagaacctccttgcatcagctctccataggggggttcttaatgcctactctaatatcagtgttgtttcctgcatccttctctctgcaagctccttagagtgattctacctttcctatctatctccttagctagtcatcactttgttgcagaccaagagtcatgatgtactgcctgtgcaagcctaggaaaagtctagagttgatgctcttcccttgacttttcatttttgctgagacatattctttccagggccccttatctcattacccccactttgggtggggcatatatcagctccaaaggattatttcatcctttacactctggcagaaggagcaaagttagggatgtctccgtataagaaaccatcaacttttccagcattctctgaattaaggtcatttggttactacttatcctagatgcctaggattttcatgcaagtatgcaaaaatgccaagttgtctcaaaacagctttaacctcagtagaatggttcacttggcactcagtttctcaggaagtctcctcttggtggttatgtgaatctgattgccctgaacatccaattcaagaacaaggcaggtccatttgctccctccccattggtcagcctagcaaattcatctggcagaagagaatcccgtgataaacccaaagtgcttgccattcagcttcactactttgtaggtgtagcctcgtcatcatataaacaattaaagcctcaggttactcttgtgaccattgctgggagtccaattccctgttagtgtctttgaaatcccacaggatatacctcaattcctaccaaaggcccctgggtggcacactgcacaatgacaagtctcaaatctaaaagttgtggctgtgtgcagtggctcaggcctgtaatcccagcactttgggaggccaaggcagacagatcacctgaggttaggagtttaagaccagcctggccaacatggcgaaactgcatctctacaaaaaaatacaaaaattagttgggcatggtgacaggtgcctgtagtcccagctactagggaggctgaggcacaggaatcgcttgaacctgggaggcggaggccacagtgagctgagatcatgccactgcactccagcctgggtgacagagaccctgtctcaaaaaaaaaaaaaaaccaaaacaaacaaaaaaacgtttagactgcatcaactattctaatggcacttaggtgctgagggttttctcccaacttctttttccttaggtctcacagaggctgccagacttggagtgccaaaggatttaattgtctcaatctcccttacacaaacttcccaggacctctgtggcacatgaacaccaataagcaccacactagcatgctttgcagatgttagcttggctgggtttcccatcaccagccccagcagggatgctgtccatccctagtatagcttagttgatcccttttgcagtttccaaaaagccagaggtgaaataagcggattttacctcatgttgggcaccatttttgaggtaatgggttatggcaaactgcacaaagccacacagaagaaagtggttttaatgagggaaacttgtcagcaaaaggtcaggaagagacacatggatattattctctcatgcaaaggccagagcactgctagctgcaccctgggtctgtattccaggggaaggataattcttccctgtgagtttaacacagagcaagcctctctcactaacagaaaaccccttagtatactaaaaaaaattaaaataaaatggattttcccagtttcattatggtacatagagagaaattgaaataaaactttttaaatgacctcagataaacagagaaaacaagatgctcaagatttaaattctggtacattaagccttatgaacaatcaagactagcacatggtaatgactatttcagaataactggttatcagaggcatagaggttcacaaggctgtttatggccatgaaactgaaactggctcaaaagggtcagaatcattttgctgcctctaaaagacgtatattccgagccaccaggaattctaagaccatcatcagatgagagagatggctctgagagagccaagttgagtgttaagctggctgcctccaacaggctgttcatgtgtagtgctgaaaactactgtgaaacaaggaaaatccaaacaagttacttgagtatggtttcagcctacccaccactaatgatgcccagttagacagaatgggtagcaaagaaccacaaaagcatcagaatgaaaaacaagaaaagcagaaaatagttatttttctggggaaaaaaactcatcaatgcagaggaggctgtctagcatcattttggattctaaccctgggtagaacactgacactgtcacctctccatttgtaccttttaggcgggtaggctgtgccagagttccttgaagtgattacagtagtcaattcccaggcacattctacctacaaacctctcatttattttattactgagacgtttaaatcaattttttttttttacttcatagacatacttttttccaaagggcagggtatgttcatgtgtgcacaaataggagtatatgtttaatatggtttagtggcaccctatgtaataaatgtgttgaaattttatgtctgggaatatggagaattattttcaagtgtcttcgtttttgccttttaagggctcataaaagattatttgcaacatacatttactttgcacaactttccccccacatatcattagtttttgtcaaatgtagaaatttaaaaccaggagcaaacatctgtcagactaattttttgctttttcataagtgcaactttttaataaaaatttacatctagataaacaatcttcagatttttgaaactttaataagattttaaaaacatcatgactttgaactgaaaaacatacacgtttagcacacaaatattgtaatatgaatgaactccaactccatttgaaaacatgtgaatcaaagtacagttttagaagttagtaattcacatttaagcaagttagcgccttgctgaatacagcctttgtaaaaaagagacttagtgcatattttaatggtacactgtggttttgtaccatttggttgagtttttcgctttattaaacaagttcttgaaagttggtagataaaggctaacttcctatgacgtgaaatttccaatggtaacagttacattttgtaacagaacactttctatagatttcttttcctagcttaaaattttaaaagcaatcatttgtaaggattgcatcaacatcaatttagcagaggaagatcaaactttattgaaactgcttgcatacaaaatatattgcactataaccaaacaaatgtcaacataaaatccaatctgttgtcgctaatatgtacagagaatattgcccaagagcagttacattacaaggtcattctaccttggttaattatctacagtattttaaaaccaaacagcttacagatgatgtgtgcaaggtaccaatttctgttttcaaatactatacattcccagaataaataactagaaatcaacattaatgtttggcaatactttttaaaagactttttaatatttgtgaaatcatgtgcagtttgttgccattttatatgcttgtttgtatgcaaggaaaagtaactgtaaaatgaaaattcaaagaaacaaactcacaaaatacatcagaggcagaacttcagtttttacggctctgtacagattcagtggtacccctactaggagttactttttaagaaaaatataacatcttagagtgaaggtccttcacatatttttcctcaataaatttcacttaaaaaaaaaagactcaaaaaacaaaaccaaaccccaacacttcaaaaaacaaaagaaaaaaagaaaaaaaagttgttatttgttaaccgatcttagtcttttccaattctgcttaaacattagaccatatatttcaaagtttacaaaacatttaacctgcttccaatgtttcttagacaaagtacctgtactttgcaggattattatgcatacatggaaatgaccttcctatctctccaaaataagcttgaaattaaaatatgaaaaatttcacaaaacttggggcagacaaaattaaaaaaaaaaagctctaagttaaaattggtcatcaggccaaagagcaggcatatcctactaactttcgaccaggaagatttgttcctagctgaaaacattttagcctctctcagatgaagatagttctttcttctcctgtctatacagaaaaattacacatctctctcaataacactatttatcaaacttcagtgcaacaaaacaaaaacaaaaacaagtcctattctttatactgcctaacctgatgtttatgtaaggaaaaaaatatggaaagcatgcattcttctataaagtactaatgtttgacagggtttgctacatctttaacatttagtgtttccaacttatcttccctgaactctgcatccaaatataatattcctacctgccaagatataaaaaaggcacagatcatacaactttttttgctaatgaaaatgacaaatgtcacatcacacacatttcagggtccactaaaatactggaaaagtggaccaaaacataaactgacacaggacatgaaatgacatagcatttcatgaagacttctatacgagattgaaaacagaagtctaatatgattaccataaatgctatatattaagaaaaactgagaatgtactggtgaatgatcacccaatgcaggaaaatggtccaaattaacaaagaatatcactgctcagtactttagaaaataaaactaaaatctgccctgaagtgctaagtagttttaaaagcaatgtttcaaattttaaggtatctttttgtgcaaatctgaaaattgttgcttatggccaataccaaaaaataaaaaattcttagcataatttgtgttcatttcatgccctgtgccatcttgcctactatttgtctttggcctaacaaagttttctaatatggaataagaattacggaaatggtataggaaatataacttcagaattatgcagtttagggtactccattcacgagtggttgctgaccatccacgctgtctggcttctctttcttctggttacgatctttacccgtgcgcagccgactaccttcactggaggtattctgtaatgttttagtgtggacactcctttcattattgcagtcaactctgatctaaaacaagttatagttgttatatacacagaccatatcctactgtaatctgtaattggcctgacaagaaatttaaacctgaagtgtaaattccacatgttaaaaagagaaatggagatgagaacagaagaagtgcaagaaattaatgtaaggtaggattctttatttggtttatgattttaaaacactcttcttctttaactggaacacactggtcatctcactgcatccaaagttagagaaaaactcacaatcctatcatgtcttcttctaagtagaataaaacagtgagaaacaaacaggtaaaatgaattactattactgattaccagaagacatacatgcctctaacactagagttaaaataaaattagttattctccaaagattgtgaagcccaggaaaagagaaacaaaatgttttcctattctggctttaccctcaaataactcactaactagactttaatttacatctttatatctatcacaggtatgatcaagtttctctatactgagagctcccatagtcatacagtagaaaaacacgagctttggtttctactggcttgtatttcactaagaaaattcagatgatcctacaacctgaactctgtctgaagaatggaacagtataaagaaaactgcatataataatttgtggaaggactggaatcctaggagagtataaagatcaatgtaatttaaaaaatagtgttctaagagctataaaatattttaagtgccaatgctgaatacagcactgctaattccagaggtacaaatgaaagttaacagtgacaaatggaactaaaacaactacaaatattgatctacttcaagcacaaatgctaaaaacatccccaaatggttgtaatttcaaagtatgtttaagtagtgggtatgtgcatgtgttttaaatgtctcgttaccaaggattcagtactttgatttgtatctttttttttttttttcccagacagtctcgctctgtcgcccaggctggagtgcagtggcgcgatcttggctcactgcaagctccgcctcccaggttcacgccatcctcctgcctcagcctcctgagtagctgggactataggtgcccgccaccatgcccggctaattttttgtatttttagtagagatggggtttcaccatgttagccaggatggtctcgatctcctgaccttgtgatccacccgccttggcctcccaaagtgctgggattacaggcgtgcgccaccgtgcctggccctttttttttttttttgagatggtgttttgctcttgttgctcaggctggagtgcaatggcaagatcttggctcactgcaacctctgccacctgggttcaagcgattctcctgcctcagcctcccgagtagctgagattacaggtgcccgccaacacgtctggctaattttttgtatttttagtagaaatggggtttcaccatgttagccaggctggtctcgaactcctgacctcaggtgatctgaccaccttggcctcccaaagcgctgggactacaggcgtgagcaccgcgcctggccagatttgtatctattttcatacttaatagagaaaacatcaccttttaaattcagtattccatttcatttagaaatataaatgtgcatccttttaaccaatgcagttagactgccaagttcatcaaacatatcagtttaagtggaaaattacaaaacgggtacttaaatatcttatagctttgtaaaagacaggtacatacagtaatttaccaatctatctatcccttggacatgctggtccttaagaacccaccaatagttaacacttactttgagctgctatgaattccaagaaatattccatcataaactttgtcttaaaaagtatctctcactaatcttgggtgatggtcccaaatgaatccatagtcaggaaggaaccctaactacttaataattaaaagttacagaaaaagtagacgacaacatagattcagagaatcagacactaaggtttgactatcatttggacatatgctagctatgtgactgtgggcaaaggactgaagctacagtgcactcacctataaagtggaataataaaactacctcagtgggttgctgtaagattaaatgagataaaacatacacaaagcacttagcaaaggtgcctggatgtgctcaggagataattttaaaattatttaacaattggtttagcactggtgacagccaattgagaagagatcctcggactaggtcctggctgtaaataagcagatgactgaccaagcatggagactagctgaatatcatcagctctgtctatcatgattattagttgtaagacagacaccttcttttccttattttctattcaaagagaataccctatccctgttaatttgggggagcaaagacacataaggtttactgaggtctctaagtacatcccaggatgttccttctctgggggattgcaggtctaccaatgtggtattaaaatcatagtgtggctgggcacagtgctcacgcctgtaatcccagcacactgggaggccaaggtgggcagatcacctgaggttgggagttcaagaccagcctgaccaacatggtgaaaccccgtctctactaaaaatacaaaaattagctgggcatggtagtggatgcctgtaattccagctactcaggaggctgaggcaggagaatcacttgaacccgggaggcagaggttgctctgagccgagattgcgccattgcactccagcctgggcaacaaaagcgaaactcccgtctcaaaaaaataaaaataaataataaataataaaatcatagtgtggctgtcaaggtcttcacaaatactcagactgcatattctctagagaaatcctcttatttgtatacttgtcacaaagaactaagattgactacaattgtaatgttgaaggtaaaatatttcacataaactggatttgtaatctttgaacatgtttttaataaagtaaaataaactcataaatctcaaactaccatattcaaacaattaagatgaaaagaggcagacaggttttacctgaagggatccatctgttgttcttcctttagcctctcttggattacgtggacgattatctgttcgggagtgatcgtcgtttcctatgagaatattttcaaaaggttcaacagttactgattctgaaatgcttactggaagttctttattcccacaccctctatttaaaccaaccacagaatctgaaatgtaatcaataccccagtgattccagttacacaatggctaataatctagcctgctgctaagtaacagaaaatatttcacagttattataattctgcatctacaggtcaatgtgagttaatgaagggatgctgtttagacccaccaagatgctgaattagttatcagcatttattcatatatctgtatgaaccataaggaaggctgcctaatattctttctttctacacaagtggaaggctgatcctttcctatggtatcagcacaaaacgggagagatgggatcttggtaacagttcattgcatcaataggatttctcatggaacttcaagacagctgttacaattcactttgatttcttaatgaagatctccatacctttgaagcctcctccacgtcctcttcctccttgtcctcttcctccccctccacgccgccgtccgtctcctctgcgcaggaagctctccctctcttcctctgttggagctaatgaccaatcactgagttcgtctctgtggtcagattctgtttcagaagcatttgatgcttcagaattagttcctatcgagagttaaaagttatataccattgtctgactttaaaaaaaaaaaaaagagggttaacagaagcttccagagacgtttcaggggtaatccaaaactcttcccaatttataagcccaccaagagtattatcactttccatttcataaaacaaaattttaaactcaaaatgaagggctttgcaatatttgaggttaattttggttataaacatgtttcattctcatttttaaaaaggtatgttattagccacctaagttcaaaccttgatgtgccatatcattaaatagctgtgttcctttaaacatctatactctctggaggaaaagattatccacgacagttaagtgtgataccctgataaacaaaacctctaaaaagagagctccttttagcaagatttggcccaggacagaggggaatgtatatattttggtcatttctgagagggtggcaaaggaggccaccatggcaactgcttcagggaagggtctcttgtgggtcatggattggatctagctgaaggcagatacatgcttgcctgatgtttggtccacaacctgccctcccactcccattacaataattgatcattaataaagaattactataataaattcattatgcctgaaggggttaacgacttagaggacaggagcggagaaaaagagctccacggtgaggcagaaattcatgagtaaaaagaacagactgttgggagaggggttaggggttaggttcaaggttggccttaggagtaggtaactctccccaactccagaatatcagctctactacctctctcttcctctgttggagctaatgaccaattatagcttcaccattatagcttcattcctgtggatcttgaaggcttttccatcttaaagagttcctttttgaaatgcaaatatgcgtgaaatggattataccttataccatcattagcaagttacaaaggagatacactgttgagcaagaaagacagtaggcactggcaggtggggatcaggttcactgaaaggtactgggagagaagaaagaagcacggacagaaaagctgggaaggcaaagagaaacttcgcctacttcttgactgtgcctagggctgactttggccatgtcactcaaaatcaccttatgagccacaagaggcagacccctgatttacacagtccatccagcaagtatgaccagcacatacctgacaaaataaaaatgagccacagtacacaaatgaaaaaagttttgactatacagttataaaatcaggagaggccttaagaaaatcatcaacacacaagggctttgcagatttacccccaatcagagcatgaacagaacttgcaccggccctgtgaactctacgtgtttatcatcaggtttttactctatgtctcctgtaacacaatttaacccactgtgaattggaaaccatgtagcggcaaattgttataatggggttctaatgaatattagagattagcagctataagtctaggaacagataaagttactgagtaaaatgcttagtttgtacctgaagtatatccaggaccgcgtctgccgtgccccctatttctgtaaggtctactacctcgacccattccttgaccatcatcagtcacatagcttttttccttatctgtacgatttggtggtggtctagaactagctccaatctgtcgcaactgctcatcaatttgtaatctctccaaacgcaactggtctacttcctatttaaaatatacaagataacagtaaaaataatttgacattttacttaataaaacctttctccttttcatcagataaaaatatactggaatatttcaatttcagttctaaatttacagtaaacactgttacacagaattatcaggaaattgaatgatctccttaaaaagaaaattactacagataacagattattgatgtcaagaattagagatataacaaaaacactcagcagtaaaattatactgaataaaatttaaagttgtctaatttggcactattatccaattattctactgctaaggcacagatatgctattttggggacttcttcatgataggatattaaataaaacatgctaaaatgtatgaatatagataaatgacattcaaggtataaccagctaaccttaaaaaatcacacattgtaaataatcttgattaaaatagatttgccagttaatatcttaatttacaaagcattgagtttgggccatcttttgttttaaaagaacatatactatggttaaggaacaatgattttttcatcaactgaaaatgctgactattcctcatgaggggaaaacaaaactatttaatagctgaccagacagctaggtcttacatcatgccttgaaaacttcctaaagactacaactctgctacaacaagtacgagaaacagtatacatttagttgatagaaatatacacctggggtccaatgacagacccttacaaaaagcacttccagtatgttgggttctgttaaaaccagatgaaacctcatttctaaccactgtccttccaatccactcataaacatctcatttactggctacggggaatcagattcataactatagtagtagtaggcgtctcagtgaagcagaggttatcatagagactgtctacatgaacagtcattggagaagctcctgtaaagctaagtttctaaaatcttggttgtggcagcttctggaaaagaaaggtcaggtaaggatttggtccgtttcatctgtgctctgccatcattagcaatttacatagttacaccagaatctgttttacatagaatttgagcaaaggagagactgcagctgagtgagtgacttcctccaaaggtatagtaatagctcatggaataggaatatcttgcaaaacagaagagtagtccaggttatcccactggggcaaagcagtcaccttttggtgagagatgccaggcccaaacgagggaagttctggtgatggaaagaatggcaacagggcagctgctgataaccaaagaagatattcttgagaataaatcaaaggatctaagaaagaacattagtcaaaagaacaagggatttgatacaatgcaatcctaactctccaggccttcatgatgatttaagctaattacgagagagacacacacacagagagattacacataaacatacttaaaaaaaaatcaaagaggtatcctacccatgtaaaccttgctggatgaaacctttccacttttaattaactggccaccataagaatgaatggcatgcccagtattacactttttcttcctttcattcttatttacacacaagcagaaatcatgtactttttatttctttcaagaaatcagcaaaaaaattcttaatgccataaatagagttgaaatgctttttaaaaacatttaataccagctacattataattttgatatgtatggatacaaataaaacattatgaaaatgaagtagatcagtttccatttcattaaagtatagaacattttggccaaaaggaatttcaagaagcatctagtgtagggaagtgacttgcctaaagtcacacagctagttcatttgctgaagtcttataagtaaattgctgcattgcccatccagtgcttgctccactacaccttgtagcctcctcgttcctatcttccagtttgaaattttaaggaggcataaccgcatcacactaactaaactgaacatttatgagaagacacaaatagtttgtattttgaataacagtaaagagaaaaatagggtaaacatttaaacaaagaacttcatgaaatgcttagatttccttgataaatgacataaaaggaacaataaaggcaagagttatagacacagatttttgtctggaaaaaaccaaaatgctagaaaggatcaaatggattaacaggctatgtacaggattgcctaaactgagtgtaagggtttaagagaagaataaagggaagtataaaattttattgaaaactggtatattggtacttaaatttataaagacttccatttttaaaaaaattataagccaaacaacgtattttctctattacctttgacaagtcatacagtgttttgcacaggctagaatgagtcctaactgctgaaagatctactataaagtttgtatattttagtacaaaaggattagaagttaaagttctttctgttctcacctttaaatagttcaggtgataatccaaaagaacagtggcattagcgatgctgtcctttgttcccacaaaaacaaatggtaccataccctgaaaaagaaattgcaacaatgatcctataaaagtaatgatagattaatctgaaaaatgcaaataacgactaattccctagcacaggatctggtgaacagcaggtatacaaatgtttgctgtaaatataaatcaatatatgaaaacaaaagtagttgatatactactttacacatctactgtgaatacgaatagatcaatagcaaccttttaaacgtatcagattattataaagactagtattcagtatcagcaaaatcacaaaatgtataattcaaaattatacaagctttaccatgagatgtataaacaaaatgagtagtataagatgctctaattcatttatgaaaggctttatcctgatcaaaattttttcttttttttttttcttttttgtttttttttttttttttttgagacggagtctcgctctgtcgcccaggctggagtgcagtggcgggatctcggctcactgcaagctccacctcccgggttcacgccattctcctgcctcagcctcccaagtagctgggactacaggcacccgccactacgcccggctaatgttttgtttttttagtagagacagggtttcactgttttagctgggatggtctcgatctcctgacctcgtgatccgcccgcctccgcctctttttttttttttttttttgagacagggtctttttattctgttatccaggctggagtgcagtggcatgataatggctcgctgtagcctcgacctccccaggccctaggtgttcctcccacctcagcctcctggatagctgggacaacacgtgcatgccatcatacccagctaaatttttgtactttctgtagagacggggtttcgccacattgcccaggctggtctcgaattcctgggctcaggcgatctgcctgccttggcctcccaaagtgtcgggactacaggcatgagccatcgcgcctggccgatcaaattcttaaaaaaaaaatcaaaatgaaataccaagggtacaaaagtaaaaagtaaatcatttctgctaaccaagtaaatagagtacacacaaaatacaaacaaaaacatcaggataaaaatgcactgaataatctgtgagacaaaaaaataggtacattgacaagcattaagttttatcaagcccatacacatttcaataatgtactctgaaaattttaaaaggctgaatcacaaggaaagtttgaacttctctctatggacactacttaacataagaacagatttttaaaaggcatatgctaaatgtctgtactcctagcccatatatatatatattaagagggaaaaaaaaaacaactacttcttgtcacaagttatagggaaacctagaaacaattgtgcaaattaataactggcaattcatttctgcatgttgggtttttctccaacaagctttatttgttacaaaagcctttaactgtattatttcccaaaataccatgtgatggaatgaatgctacacccttccctctgggtcaaatatcaccaaaatagctttaaaatcctatgtaacagatttagttagattgacttcggagcaaattatttacgaatatcttttcttgcaacatgtctaaactgctggagtaccccaagggccactctaatttaagcacttcacgagtagacctgaatagtaaattaaaatgaagaaaggcaagaatggaatgatggcctttagtacggaccccagaaaaaagttactctgtgttctggaataatgggctgcccggcaatgagacatatccaatccacttgccgttatagtcctctttgtaaaatggcacctttgcttttaatccatgagtccacaacatttttttccataaacagttctcaccagctctccctgccctcaaagaacttacaatgtggttgaggagatcaacaaataaacatctatgtttaagtgctatgctaggggtgagcacattgcaaaacagaaggggaaggctcttgaaccagtcaagggggtggggatcttcggcaagtacacaaggaaagctttgtaaggaataaggtcaaaatgaggtgacatgtggaggagaaaaagcattccaggcagagtaaacctgtacatatgtctagaagcaaaataagcacgagaatgttcagagaactcaaagtacttcagtatggcttaaggttctctagagtgcaagggagaagataatttaaagatgataactagacaagtaattaggaaaagccttacaagcggcatgaaggtgtttaagctttaactccagggcaatggatccacatacccacaaacactcctccctccagtccctaatcctgaggatcatttgtaatctttgttaacaaggggaataaacattaaaatataaactgaaagtgtatttctcaaggaatgttttcctacctgccaagccttgagttcaggtttctgggattcccctgctacaactgatgaagccactaacacctaaagcagtataaggaatgcaagggatgtcattaactataacaaacgatacacagaagcctgaacgcaggactttcactgcaggacttttaaacccatttctaaacagattagttcaaacagagaaaattagtttctaaaatatggttcaagtagtaactaatgcaactaacagaaggtgtattttgagctacgatacctgcaaaatttaaagagagaaggcatggaaaaaagagagtccactgtcaaaagaaaaatgtgaccactaaatgcaaccccattattttgtgtttatggcataagagttgttactgtgaataaattgaaaagtatgtatcacactaatttgtagtatctcataagctggcaattacatttggaaaaaaaatagaacataagtagcctacaagtctaaccagagaaaacatccaaaataccaattgtgacatctgagacaaattacttgtattgtaattcaaagtgacaagtaattcttaccctctggacttttgtactgttaggttgagaaaaatgggtgctgttttcctttatatctaaatgttttttttcttctggggcattaggtccaacccttgaattattggaaggaagggaatttggtggcataatttccttggtaaaaaacagaaaacacaaaagagaaaaaaaggaccaatttaagactttatttagctctattagtgttatcaatcatcatatttttaaaaaatgtaagttattataaacagttttggtttataaaattaccgaatacaaattgtacgcagaaaaaaaagatttaactttagctaaaagaatctttcaaaaagaaagctagacaatatgtgaaaattacggctctttgatgagacagtatcttaagagtactattgcacagaaaggtgcatcctcacctctctaccccatgcaaatactttaaaagctgctacaaaaagcatatatttatgaagataaaagggttacagaatttaaaggtaaggaggatggggaagagatattaagcacagaaataaatttaaagcacacagaataaacacacatactacacaatccccacactaaaaaagtgaaaagatgaaagccagaaaacctgtgttccaattttgcttttgtcagcaacattaacatttacaaagtgctttacgaagcatttacatatatattattttattaaattgccattaacactcgacccagtgatgtatgtctcatatttaaaaatttataactacccattttaaagatcaggaaaaaagaattcaataaagtgactaatccaaactcactgcattagaggacagagaagggccattatctacaattataacattaattacagcaggcatgcttgataatcagaatatttgcattcactttatgcacatattagaggtcctcaacatatcacataaaaaacttttacttttattatatgtgccacaaaatattcgcactgtaacatacctcttcttgtggaacatttttctcattttcagcctcaatcctcaccctcacaactcctgacttgtccacaatctcctgaatcagctttccattttttcctattactttgcctaagaaataaataaatcaagtttggttttaaaaacacatacctcaaagcagtaagcacagccctactgtaaactattacattcatatagatagatatttttatgtgtatgtgtatgtattgaattgtaagatttcaaaaccaaagtagagactcttttcaacaagatggttaatctggttttctgtttaattaggacatcattgtttaaactcctttggtcaggtaccagagttgattaatacttgcaaactgatagggtaattttggatttttaaggcagttcaaagataacctcttatttttgcacaaaagggtacgctttaaacttgctggtactgtggtatgtatcattctttctgcaaagttctataagaattaagaaaaaagtagagagaatgggaaatatattcacttattcaacactttcaattcttgtctgtacctgatttaaatctgcttctttgtccatggtaaatattttcagaattctgtatggaaggcacatttataaaagataatctaagtctgaaagtggcttaagcagctatacatacatccaaaaggaatacaaattcttcaaggtcaatgtgttaacagagtatcactcctgtgcattacttacaaactttagcaatgtattaaaaagtgaagggattagtcacagagtaaaagattaagaaaacccactttaagataactcaaaaccacaatgaaaaagctttaaaccaatttaagtatttttcagtaacatctattaaaacttgggatttcaagtaccagtaaaaaataggtacttgatcatttccttatttattttacaatcatatacattactggaaaatgactgctttcatttgcatcatgacacgagtggtaaagcaagacattacaaacttaagaattactaattctggaaatgtacatgtgaactacatctgattctgagggctcacccaaggtacctaagtacccttacattggccacatccaccatgtgcttgccctcaccatctcatcttccattttttccttttcgcctttaaaggcaaagctcaaggcaaagttgggggaaaagatggaagcaaaaatttgctttgagccaatgctagataagaactcagtgaaaagccttctcacaaaaaattcttgtggctcttgtaatcagagcatagctttgacattcttgctgtgtgtggctgcctcattcacccctagaaactctttgactggtcatagaacagatctgacaccattaaatcaggattcttggtctaggtccttctgtcaattatttctgttcttctataacgaaaaggggaaaggtgaggtgagagaagctacttggagtcttcacacagtttgattttaaactgcaacacttacattttcatgaattaatgttgactttaataaagatctaagtgagttaacaaaatgaaaaatgagatttggggatgtttttattaagataatatcttaattatcctaagtactgtgtgttaactatagctgactgaatagtcataccaattcattcttagtgagtgaagaatccaattttaatgaaaagataaattagtgcacataccaaagagagtttgtgaaaaatagagatcacaaataacgttggttgactcaaacaaaacacatgcaaaactgattatgacacctctctaaagatctgccttgcagaatcttacacaaaaatgctttctgaaaagttccaacgttcccagtgttgcagtggaccatctctaaaacagaattatctcattttactaactagaaacaacaaaacaaaaacaaggctgatttacttttagcagtctttctggttatttctgagatcctcttctttccaggtaaccacaggtagaatctacttttaatatttaatagcaaataatccaattctacattacacttatttccaaatcccaaagagcaatttactgtgattctgttctactgaaatggagttgttttgaataaggtgaagaacagagtcccctactgtgtccagaattgtcccctactatatcttccaatttaattatcacatcaactctatgaggtggatcctattatcacatttgataggtaagaaaaataattctcaggggggctaagacagtgacccacgctcacattgccaccaaagaataaagtaggactgaaatccagatccaactccaatgcccaagcactttccccactaccatcatgccatcttcaaaaccaactttaatgaatctgacacataattctctactcatttgctattaaaaaaaaaaaacaaaacaactaccagctctttttccataagaattcctaaatttacaataacctttctaactacaaaaggtatgcaattgcttgacaagctgtaaagaagaaaataaatattattcatcacccaactgtcttgagattagcactttatcttgcgctatgcatacattctgtacacatacaattggtatgcaagttaccttagtaacattacaaacacatttctccagttgtctgtagtacacagttgagctaacacttctgcattattttcctactatttgcactttatcttcaagctaattttctttgggagatacatttatcatttctagtgtttgttaatgacaaggaagatgtttatgagtctatgctgacaaaaaagcaggctaaattagcattgaaactacgtaaacagaatgtatgagaagtccttgctttcttctttaaagtttccaaagaacatgtattactttatataaaatggccatgatctcaagtttaaaagataaaaaacatataggcagtatgtcccaattttatttacaaattaaaaacatatgtagctttcttgataaaactgcacctggttttgatatgttctactaaagatatctgcagcatttaggagtattggtgaagagctcctaaatatttgctgatactcacgatggtgatggtgataaaacactactcaagtcaaaatggagaattactattgactttgcagaaagtcccagagacatctgaagtttcttctagctttgggactttttagatttaagtaacctatgttcagatcttcaaccctgagataattaaaatgaatgctatcattttatagtcccataagaaagatcaaatacaaatctatttcaaatcataaagtccccaaatatcattcattttgaaaaattatttaattttaagatataaaaggtatacagtcaggagggctgggcaagatttatcctttcaggtattagtaggtttgaactagaaaagcaatctcttttgaataccttctgaaaatgtaacctttgagcatcatacttaacaaatatttttttgtatgctgtaagaacagatcgattgaacaatgagaacacatggacacaggaaggggaacatcacactctggggactgttgtggggtggggggaggggggagggatagcgttgggagatatacctaatgctagatgacaagttagtgggtgcagcgcaccagcatgtcacgtgtatacatatgtaactaacctgcacattgtgcacatgtaccctaaaacttaaataataaaaaaaaagaacagatcatatttcaaagactatgtttcaattaaatgataccctccagtaagaaaaaatggaattctatcactataaataaactgtttacctaaacttagttgttgtactatatgtcaacagatacttctgacttacctactaagttccttggaacttgtattacatcttcagcaaattcgagaaagcttctagcttttttcactgcatcctgatcctaataaaaggggaaacattttaagacaaaagattagccagctgaaatacttgtttggggaaaaaaaaactatgcagtaaaatatttacctctccataaatatgaaatgtgcaggtatcttcatctagatcaatagcagtgaccccaggtacttttctagcttgctgaatattagcaccatgagtaccaatagctagacccatcagatcttctcttacgataaactgttcatgaaatctcgaggcaagctgccttgaactctgaagagaaatggacgtctgatgaatacactttatcaactattacgacaactgtatttaggccagccatgtaaattatcttgaccctgtatatgaggggtccataaattattaatagttttaggttaaaactaacaggttttagaaaatacctctcacagcctaagtactttttaggttactaaaggtctatgacattttatatgtttttgttaataggaaagaacttgttgacattttccaaggtaactgctgaaaacttatcacaaggctgccttagttaaccaatgacatcagcaatataataactaagaagcaggtcaaatgttccccagtaaaaaccagctcactcggtctgacaaactcaatgttacttatttaggtaaaaaaatgtttaaatatcatctttatagaaaattttattcgcttcatttttattaaaaggtatcagtatatattttctggaaacagtgccattttttataacatcattaggtactgtggtctaaacattcctctgttgaaatgacattaaaatgacacctccctcaaaacctaaggaatcaaaaattgttggtacagtagttaaactgaataatcaaaaaatgtcaaaaattaaaaacttagtaagcatctgaaagctaacatgagaccagagtccgtaagaccttgtgatctggatccacaattatgatgagcacttgtaaatatccagtgatgacgaaactaagttacactgacatcccaaacttgtggataaccactgtctttaaataccattatcaaaatttagtgttcagttctagcatgccattaatgaaaaccaaacgtattagtggctcatgttgaaaaatgggaatttcttataggaacatgtaaatctctttaatattagtagtgaagaaagataggcatgcatactagtttctcattgttcaacagacctgataatttgaatgaatgaatacaactagcataaataatttaaaagtgcaatacccattttttttagactagagtaataaaatctataaaataattctaggacttttcaagaagtcatgttttttgagtcctggttcattaatctggttcgttctttttcattgataattcactgataaatggttagccaaaagtatgatagatcatttaagaataattcgatgtttaagaggcatatgagtatattttcataatactcacaatcaaagtaaggaggcagctctgggctaaaagttatgagagaatcactgaaggaaccacaaaatcatgaacacagggacatcaagaaagaatgagagcaaagaccaattaaacagacctccatggccttaagaaaaaacaaagtggcaaaaggagattaaacttttccccttctgctaagagttcagcatcatacatcaagttgacaggtggcaaatttcacagggtttttataagaacacagtcttgactaccttttctcctaaaatgcagtttggaactcctttttttctttactatttcaaatgtgtggtgttttccttctaatgaataatgatgacgaactctggaatttgacaggaatatagtagagctggcacattcatctaagatccacttagtttctatagtaatggatggacgtacttgatagttatcaatgaaaacaaatatatggtgatgaaaattattggaggattaataaaagtagataaaatgcaccttaagagacaaaatagtaagttagggaaatagcctctggcgggaatctgaagacaggagttttaaagaatgacaaccaattagaatgaagaagttctatacccttttaaacaaagataaacatacataatgagaggaatatgattagatatttaaatattctctagtatttttaatgacaacatgttatatggaagaagcattgccgcattttattagcaactttgataaacttctagtaaaagtgaaagtaccagaagtcccttaatatacataagctgctgtttaattttgaaacctcaggcatggaaactttagtatgattatgctttgtacaattttccaactatagaacctaaggaattgttaagaagcagtaaataaatgacaagctccccatattcaagttgtggaatgatacagttaatcgttcctaggtacccttacaagcagtgctagggaaagtgacatacctccagctgcttactagcttcttcatttctcattatcagagacaacttagtgcgcagactccgaaagtgcatgtcaatcagcatatgtgctcgctttgaggtgacttcattgatggactaaatgatttaaattaacaacattattatcaaggcaattgccccagatgaattaaactaaaaataaacaactcaaaaatgctcaccaaaatgacaagctgataattttctggatcataagttacagaaaaggcaccaactgcctttttaaaatccttatgtgccgcctctttggcacacctagaaatttaaaaaaaaaaattaagatgaataattaccaactactgacataaataaatgcaggcagatttacacatacaagaatcatggattcatattaaatttgatttatgcaaaatatgctatatccatttagaagcttagctccttttctgtacatttctgaaatacagcttagattaccaaaagagacatattcaggggaaccactctacactacaggtttcctgatttcagttacatacaagtcagtagttttcttaagtcaactattgaaaacttttgggagatagctacctacagggtatctgatttctttcttcttctcttgttgcaggcctttttttttcctttttttttaatttttagttttgtgggtacatagtaggtatatatatttatggggcatatgagatgttttgatacaggcatgcaatatgaaataagcacatcacggagaatggggtaagaaactgctaaacgatttgagggagagaaggaaacgtacatgaaccagaaggcacaaaaatttacacacatacacaatctctagaaaagggaggatttctatgtattctgaactgcaatttaatgttcaacaacatgtccaaatcaaacgtactgtattcacttaataaaatctgtaaaaaataaaaatgcgtctcttctatagtctttaagcattattccagatcaaggattgtaagatgagatgactttttaaagcttctttggctctacttattacacatttatctgaaaacattttaggtaaaagagaaaaaaacggagaaatcgtttatagtttgtgacttatgacagaattatcacatttgtttgatcagtttttaaatcttagaatgaacaaagttagtttagaaaacaaatgtacattatgtacatcagacacgtgtatagccaagtaagtttaaacaagcgcaaggctgccttgattctataagtaggaaaagttaaataagttttttctccattgctcttgcaaaccaaaccatttttgccaaagtccaccaaatttaaaatcaatttctagtagtttaaaaaattttaaactactagaaattcttctaaactaattgcatatcacttccaagttctcagcatttcttgtgtatcaacttacatttgccgtaagtcttctggcacatccagcttgatcttatggaaagtatcttttgtggcaggtttgttgggattaacagatcttagacgttcaattgtgacaatttcattgtaagttgcatcacatgctgcatattctatcacataaaactgagaaataaataaaagtcacttctaatcacaatttttaaagtaagaataagaagttctccctattcagttattttaaaataaataatctatgtgaaaaaatttatgaccaacagaaacatactgaacacatagtgaaaacattttaattaaattactcaaaattagatattacttcaaaatagaaatccacacgggaatgtacaacctgggtttaaaaaaaggaaacaatataagaaaaaaatttaaataggcattttcctacctcaccctttatcatcctcactttagctaaccaccaacagcaaggctctttttcatttgctctggaatacacctacacaaaaattacaacacagaatatttcatgattaacataattttgaaatctacagattttcagatatcgaggaaattttcttaaaatgcccctaggtgtctttaaaaaccacatgtcatatatcctcaaccaaattgtaaccctgtctatgtaccccgaggtaggcagagatacataatcagaaactacctgagattgctttgaagctccttgtaaaaatcagttttcctatatttctgttctaattcagcaataattagtgctctgaaaatagacgcccataaatacaagcacactttccttgggtactcagcaagttacaaaaaatgtatctaaaaatgtataagcttatttttgctttatcctagtaagcaaaaattgactgaaagttactgaccatgccctactgtcttgttgcttggtcactaaagtaagaccactgaacattcagcccactaaggataccactctggcagtcatatctcctggaactaaatggacagatccttggtcactttctggtctcctgcttcctctccactaaaaatgacaacttcatggtggcaatcctctggatatcactttcctggtctgtcacacactgcagatcagttcttctaactgatctctttgatgaccacttcaaagttcacttaagatgtacagcatggaacctttcatgaagaccctagcaaatcaaggttaataggaaaagagacaacagagtatatatggacagagagacagggatactcagaagcagaaaagagaaataagaaagacaagggggataaagacatgaggccaagagaggtacaaagtctagggctgacaagtagagtaaaagctcgaacttgtctcccttttacaaccaaagttaatgatcacacaatacagtgactgaatacaacttaacatacctttccctcttgcttccatctttctcaactactctagccagagaaattacctcaacgaatcggtgtgtaagacagtgaggtcatcctagcaatggtatctcattggtcccgatctgtcaagtgaccaagctggggagaaaaagtccctttcatccctccatcaaacactattctgggtactcctaatacagaccaaagacctgggtcttgccttcagagagcttacagtcttctggggaagtggacagctaagcatacacagtgtttctgttccctattaagatcccttgcaaaaccaagcccagctgcttacacctagtagagattggttacatttttggaaaataaataacactatatcctatgtccactttaaaactgtagagagaaaaacacaggcctggacattgagagatcttccctgactactctctgaaacagcaatcctgtccctaaatcacctttcatcctctccctttttttttctttaagactcacatctgtcatattagctatccttactggaatgtgatttcatcaaaggcagaagattctgtcctgtttttgctacacctttactacctagtgcagcaaataagaattcaaggaccagctgggcatggtggctcacatctgtaatcccagcactttgggaggccgaggcgagtggatcacctgaggtcaggagttcgagactagcctgaccaacatggtgaaaccccgtctctactaaaaatataaaaattatctgggcgtggtggtgggcgactgtaatcccagctactcaggaggctgaggcagaagaatcgctagaacccgggaggcggaggttgcagggagccaagatcgcgccattgcactcctggatgacaagagtgagactccatctcaaaaaataaataaataaataaataaagaactgaaggacaggacctagaaccactctgcctcacctgcacaaatgtctacttagcgacatccttcatactacaaatattcatggaacggcaactattattaactaatagtaaggcattatgcttattattgtagaaaaagaagagaagcagctcaaaatggagtatgtgaaaggatacaaaggagagaagataccacacaaactatatgaggcactgtaagcgccttaaatacaaaaccaatttctaatggagaaagaaatcacaaacacaacatttctgttcacatgttagatctccatagcacattttggtcaaagagctcaacgggagataagcaggtagttcacggtataacctgtgaaaaagagattttaccaatatgtataaactaaagcttgtaggtttttaaaaatataccaagaagattcactgctacttaaagaaattctagtatactattttgtaataaagcatgatttctttcctgtgtaaaattaattttcataatccattttgcttacaatggggacacagttgtaaacaaacaacatactattcaaagattcagaaattgagagaaggagaaaagaattactagtgggcaaaggaacttgcggcagtgactttcaaatacatgctctgagtactgctcaaatagccaaatgtaagcatcatgtatcattttgaattattaataagatgagttagtcaaaagcacgtgtccattccagctgtaattctcaaagtaatttaaacagtgttaaagacaaagtattaaaaaaaaacacagataaattaaccccactctttcagtgctaaatgactttatggcagggaaaactcacctcaacttcatcactttcatttatatctttattataacctacaggaggtgggaatctgacatcatgaaatggaatctgcctatcaggctgccagctgtaaataagcaaacatacaattatttaacatgcttttcatgtttaactgaaataatgaccactctgccatcaacttttggttaaggctgacccctctttttctagtttcaagaagcaaaagctttaaaatcatcagtttttgctgagtgggacataacggcaatatagtaacatttcagcaaagtctgcatgcagcacagcagcctactcccgtttggaatatttctctaaacacaatacagcaacattatgattttcaaaacaagtcttctttccaataatttcaacttctaagagctttaaacataagtccacaacagaaatttccttcaatatttgaatattagtaccagtaattgttagtaatataaatatgcttccacttgcagaagaattttaaccacattccaaggaccacaaaaactgccctctaattcccaagcaaaatggggctatcagcacattagcaattcacaactcacttttccccctttaaattttagatcccacgaggtggtcaattcttgctgtgggtagctggatgctgatcagtatgacgttatcagcatgcactgggatggtggggtctcctaaaccacagaaacccgatggagacagcctataggagtttaagttgcctatgtttttaaatttaaaatgatattaaacaactctgaaagataccaaattattttttatatccataaaaatataaaatattaggatgcggtggctcaagcctataatcccagagctttgggaggctgaggtgggagcactgcttcaggccaggacttcaagagcagcctgggcaacaaggtaagacctgatctttacaacaaattattaaaaaaaaaaaaaaattaggtgcagtggtatgtgcctatagtcccagctactcgggaggctgaggtgggaggatagctcaagctcaggagttcaaggttacagtgagccatgatcatgccactgcactccagcctaggtgacagagtgagatcctgtctttaaaaaaaaaaaaatatatatatatatagacacacacacacacacacacacacacacacacaaataaaatactgaaagacaaactttgcaaaaatactgaggattcaacttccggagcagtcacatctgggttctttttggtgttcttcatcagcagatactgagatatgttgtatgtataatgtcgatgttttactaaagagctttcttagtaaaattctattgagaaaagtacttgtttttgttaaagaagagctgttatataagcgggcaaatattaagtcagaatttgtggaaatctgattagggcctaaattaactgaaccctcctctgagttattatacacacctaatagatgttatacattcattgctaaatttgattttaaagcatataataatatataactcaatggttccaaggaaaaaataatgattttaagtgtatacagataaaaattcaaattccttattaaaaaatgtgaaatatgaaaacacctttatgctttatggaaggtttaggaagcacctaaaaacaaagcacctaaaacaatctgctatcagtaacaggagcttcttcctgattgaaaggaaagaaagggtaaatacaatctggtgttttacaaaacactgttttcgttttgtttctaacagaaaaccaaaaaggaaacacacaaggaagggcaaagagattactttggtggagacctattaaatcctattgatgtgctcaaacccagtgttgtattgcaaacatactccatgaacacaagggaaaatcaatgatctatttcaaactcccaggatgacaaagagcttgaagagaaactttcatgcagatatggtacaggagataaataattggaaggtccaaagatgaaataattttaagtttatggtagaaatctgattgaaaattaaaaagaagtgatctaataaatcaatgtataaactagacaaattcttaaatgcatagaggaaatgagtgtttgcttaacactttagattatagactacaggaaaaactaaaagagtagcaaataaagacaactctccctttatgggaaacagcatttacctagtgatgtaagtaagtagataaagtgtataattgtaagaaaaaaataccctccaagttatcaaagattcctctgttggtgtgatgctgttgtctattgcatagccatggatatatgaaacagcgaagagacaaatactaaaacttttggctttatgtattcagggaaaggtattctactattcaaacttgtattttggtctgcgattattagtccagagccagaaatagggttagatgcttttaatccttttatctctgtccccctacacgtgtttcaggcatctaaggatactactttgtcctgttgctagccaaaagaatctgctaagttcaattatgaaatatattttctagacactgaaacacaggcctggttttaaactttagaagcaagatgtgtgtatttattgctcagtatgcctgggtcacatactacattttagcagacataatccacatatcattataattcatcaatttaaatgtacaattcaatggtttatagaaggtttacagttatgtgcaataattaccagtcaattttacaacattttcattgccacacacacaaaaatcctgtactctttagctatgttctccccaccagccccagcacaagcaatcactaatctactttctgtctctatagatttgcagcctgcttttgatatattattaattttcttggtatataagagccaaaaaaatgataactgttaaccatccatcagagtttagtaaaatcctaagatcatagccacatctacactttgactaaggagtttatatgtactttacaatcttaccaacagctaccctgaaaatagcctttattagcattcaaaacatttagtcaagagacttgtgttctccaataaaatgttaacatctatactattgatgctttcatacagttaatattcctaggcctatgactgtttttatttcttcatctagcaaaagagaacagaaaagatcagctactgctattgctgaacatatgaaacattaaaaaaaatcagataataggtaaacatgactgtttccataaaatatactagacaactaaaaccatcagttttagatttaatgttaaagaactcacatacaactttttagcaatacccatgaatcttttcattactatctttttaaaatttacaaatactcctatgcgaacttccagttactaatacacaagactctctggtttctttcttcacattcaagggaattaagacgtaaggatcaataccatacaataagggacctccaggacattagcagaaacagtcattccattagtttaatactgagttgttcagaaacttctcagtcagtaacatgaagatccattcctgaaaagcactcaaactggacttgaatttttaaaaaatgaagaatagaattagcataaaatattaaagaacctcatcattaaaattatataacgagacacttacttgttttcaaatgcaactgttattgaatcttcatgaacatcctttacaaatgcctgtgtaagaaaaaacgttaaattaacttgtgagcttaaagatagtttttgtttttagttaaattttacagtgataccaaacgttttatgtgtttatgaataaaatagaacttcaaatgaaggtcagtttttgaagatcattttattcattaagcacatctatattgccaccttgtatgtgctataccctagagataaacatagctaaaacactaaacatgagaaaaaattctccacagatttcaacatctcgaaaaatagacaagtatactggaaattacaatgtggtagtgagtgcaaagctggacgtacattttaggtagaattactgaaaactaagaaaattgttccagaaccatatatcagccatatattgtaacctacctttctctccttaaaatcttagaataccaatagtcaatgattaaatataacctcaaatctatctatctatctatatatatatatatacgcacacacaaatatactaaactttctttaacaatcatatgctgcaaacaacactaaaaagtccagttactagagttgaattaagttctcaatctcacagtacttgtagaaaaaatatataaagtccagaggtttagatcttttaaatctgatgacacaattgttagtaatctacacaaagacagacaaaatagctaattatcaagaattctttaatcagcatgctgtctgtaactttataaaattaaccttttaataggtacagaaaaggaaggtttttgttttgttttggacaattagaagaataggacaaagcataaagaaacccaaaggctttatatcttaatttattttaaaagggcttggggagatttaagcttcttactcaaatttattctgtatgtttctccccttcagtggtttctccctgcctgcaggaccatagccaaactccttctcccgctgtaaaaggctctacaggagctgtcctccccagccccaccacttcttcaactttatctttcatatccttagaatttgtgacccaacaatgctaaactacttgtgccatactctgtagtttctgggcctctctccattccttctttcctattgtccttcccctctttttacatagctatctcttactggtcttccagatttcagttcagatgtcaacttcaacgggagaactgagaagtctaggttaaattcctgtcctctgcattctcatagcatcctatgcttatccctacaataaacttaccccactctattattatagcccattttctcactaacagtaagttttctgagggtggtgtcaggttttacttcatttacggatatactgcagagtgtctagtatgaactcagtgagtacttatcaaatagatcattgcctaagaggttcctatcccagccttagggaaaaggtatgtgtgtgggtgatggtggtaggttgataagacaaaggaaaacatactgaagaaggtgaggttcctactgaccccttaaaggataaggaagtactagctaaacaaaagagagtggaggatggagaggcattccactaagcctacggggcagcaggcataaaggtttagacagtgagaaacagctgggttgtggcagaaataataaatcctttgtcaacaaagaagccaagacaattcaatggggaaagtatagtgttttcaaaaaatgaagctgggacaagtggacacccacatgcaaaaagaatacgtttcaacctttacctcatactgcatacaaaaaaaaatcaatgaatatgcatcaaagacctaaatataagagctaaaattataaaactcttgggagaaaacacagtagtaaatcctcatgacgctgaatgtttgatatccatattggatagtgagacaataactagttcggattaagaccattctctaacttcggtgtcctcagtaaatggcatagtttctggtatataggacatgcccgatacatgtttttaaaaacaaatggttcaatgcagatgtctttgtaaacaaatatgtcttcaaaggcctatgatataaaaagattattttaaaaaatgaaacttcccaaaatatcaaattaaagcatatggagtgaagcattaattagctgctcttaaggaaaactatggaagctgagacagggccctggaaaacactgatacagaagcaacttaaacagagataccaagcttcttcaataatgcttaaataaaagtaaagctacgctaaaagaaagcttccttgtaagatcaaggtggactataatggcatccatatgttgtgctatacccaaggtggctaaataattatttttaagttaagcatgggtatatacccttatagttagttactggttcaaaaggggagaaatcaacattttcttatcattttgatcttgcttatttttactcagctatatttaaatgaccaatattttctacagcatattttgagaactctagcttaatactgccaatgatattttagaattattagatttcataagggtgcatgccccagtgcttcaagggattgtttgcctcactattacttcaacagagaggcctaattttgagttaggttgcaggaactggtcactcttaggctcttatttctataggtcgtaaaaattatggagaatgggaaagaggactctcctggccccgatttctcccttgtctttacaggatggctaataacaaattaacagtttgctttttgggggtgctattagattattaactaaaactaagacacctattaggaagtaactgaccccttatttacaaagaagggccactgcttctgtgttcatccttgtttaaggtttcataatgtttatacatcttggcagtaattaacattagttccttactgtatattacatgctaaaaatgttgtcctttaatcagctattagaaccttgttacagctaggtaaagaaatgttctaagtaaatcaagtatctacccaagactactgcccttgtctaaaactatgccatctaccatagtagccacgggtcatgtgcgactacttacattaaaattaaataaaattaaaatcagtctccaattcactcttgcaacatgtcaagtgctcaatagctacatatggcttaagggctactgtagtagacagacccgatttaaaacatttacaaatgttggagactgttttcagactcatcataaaagcactataatatcagccttattactacattgctatattttgtttttttctctttgcctaaaagttattgcccagttgaatcatacttatctacatttgcttatttcctaaaatcaaatattctctcaaaggaggaagatctgcaagtgctgtagctattcaaaaaaaaaaaaaaaaaaaaaaaaagcttttgcaggctctgaatgcatttccggatgatttccggatgtagtgtcagagtgtcagaaatggtttgagtaatcatcagagcccaacagggccactgcctttgagttaatgaggcttatctgtaaatggatgtttgcatgactttttcaaaatcagtcattttaagtgaatacagaaggtatataatacctttggttgctgctttaataagtggaataaaagaaactcataggttacgtttggtctacactcgcgtgaaggacaaatacctcctgtgaattctaaggtctttcactaattccaacaaggttccatcttcctgtttctcatcatagtttttccaatagccgtcgcttttggctctgtccttccccttatccaccactcacccacccacagatacactcataccttccttctttggccatctccagagcactatcactccacctatcaccaccttggaaaactgtgttttgctatgatccctacctatcaggcaaagctgatgtctgtagagaagagaggttgaggaggttcctgagaggtttccaaaggcagcaaattcaatgaatttgaatgaatgcacaggggaattaaagtgtattgggtgaggactagggctcttactggagtcagtgtacttagtggttaacggttttgctgtgaatcagacctacgttcaaaatcttggctctaatacttaatagctgtgagactctcaccaagaagtgatctctggacctcagattcctcatctgcaaataaggaactcgaccagcctcctaagactgctgtgggtaatgaaattacacacataggtggcactaaataaatgagagaaaagtagagagtgtcatattttataagagacacagaatcataaatgtttttgcatttggaaaatgtacatcccaacaaaagcactcttttttttaaaaaagctttaaaaattgggatagaaaaagaaaacaatgtttccacaaagatacttaatattaaaaggttatttagagtttgggaagaaaaaaaatgtgatgagaatcttggaatttgagaaaggcgataaagtacagtttaaaagagatacaagttcttcatcagggtgaataaacaggaaataaatcattaaggggtccctaatttactagcaactgggccaaagaggtaattacaataatcatatttatgaaagtatgtaatgcctagagctatctattcaaacattctattaccaggactgatgaaacaaagacagaaagtccatccttatttgggtaaactctccccagcgacacctcacattccttcccttagtaaagtatcttaccaacaggaaccactgctcacaggagaggctattatgtgttaaagtttcaatgtacacccgaccaccaatgaacataactacaacatcatcagtaagcttgtatcacttactgaagacagaacatgtagtgctatgataattctcgttaggaaaaacttacagcattgtaaaatatccctcctaaagaaaacctgctggaagctggacccggtgtctcatgcctgtaattccagcactttggagggctgaggcaggcagataacttgagatcagcctggccaacatggcgaaacctcatctctactaaaaatgcaaaaaatagccaggaatggtggcacatgcctgtaatctcagctacccggaaggctgaagcatgagactggcttgaacccgagaggtggaggttgcagtgagctgagatcccaccactgcactccaacctgggcgacagtgagacctgttgaaagaaacaaagaaacaaagaaacaaactaaagaaacaaagaaacaaaccaaagaaacaaagaaacaaaccaaagaaacaaagaaacaaactaaaggagcaaaggagagaaatgaaggaaagaaaggaaaaaagaaaaggaaagaaaaaaggaagaaaggaaagaaaggaaaagaaaggaagaaaggaagaaagaaaaccaaaaaagaaaaccaagaaagaaaacctgcaggagacaggatagggacataggaaatgtgataacagtatgattcaaacccaaggcttcatatataaagcaagttatcattttgtccccactccccccgccccgttgtatggggacactaacaacataaaagaataaagagagacaataaacctcatcaacagtccttccaaccataccacatgtccaggacttcatataggctacaaattatgtgaaaaacacatttagcttcactctgaccaaaagacaacagagacatgtgcaaagaaaacattattaaattagttactaatttttcttgtgtgtatgtattctaacttttgaatacttcagttttatgagctcccaatataacaaagacaaatttcctagcagggtcaaagatttctaactttatctttccttaacaggcatccacatgaagaagtacagcgccaaggttcaagaattagtaacaaaaaaagctggcacataaactgaattatttcatgatggctttgtattaacaataaaaaatggtaatataacactgtaactatagttataggatgctaaggcagtgttatagcacaaaatacaatcaaagaccaccatgaaattgaaaactaagcaggaaatcaaaccaatttcttcaagctaaatttcatcatttcaggaattcagaatcctgacccttaatggccctgacacttggtagtaagtcacttacctaacctctctgtgcatcatttaaagaatgggaataacaacaatacatcaaataaagtatcagagagaacagtgcctggcacctagaaagtactcatcccctgttaactattattataatcacgatcccaatcttctcaggaagcacattcctatagtgggcagaaatcagaaactccagtaatataccactgaatgttgcatctaattaataatttggaggttatgagaatatttaagtatggggttagaaaatgcacagttcaaaaggggaaaaatgatgcagccacaaagatcctaaaaactaaaaagggcaatcagactgtaggaaggaaaaaaaatgtggttgaccccaataattcacttcctcgaagtacagaataacacctttatgcaaagttagctcaggagacttcagagaaaccacgagtgcaagtttatttacactttacccaagttgatttataaacttataaatttataaaccttatgcaagtttatttgtagtaaaactgattttactacatttcagctatgtatctgaaatgacatgttagaccactaatatcttcattaaaaatatccttttgattgtacactttatcatatttagctgctagctgccataatactactaaccaaatgaaagtctgtcctcaaacactgaacttaaaaaagtataatctaacaacaaaattacaatctagtataattacaccatattacaacaaggaatcagaaatcagaggttgtattttcagaaaacaaaaaggtttgtatcttatgtctccaacatgtgatttttccatctttagtaattttcatactagtacacaaaacctacaaatcttaggattcattagggcattcatattggagtgatacgcattctacatttaaaatggagttaattcattaccattctcaacacatcaaaacttctagtccaaagaaaacaaattatgtggggcagatgcacctagaataaagactttatttcatcattattcatttagaaaatactttgtaaagattttatgaggtgtaagtcaaagtgccttcatatcttaacacctgcagggcactataaagtggtacacgtgaccaattttttctaagtcaaacaaatacctaagcataaaagtagtggctctggtgatcgctaaatctaacttttaagtttttaagaataaacaccagaagatagagagctgtccttgcaaatatggtggttatgttaggcaaatcaaagtctgaattccattatactcaagttgtttgatttgtttagttttaaaagcttttctatcaatttgatgaacaaggttcctatttctttttccataaatgtaacacttctccacagcagttcatttttcattggtttttatttcacatctttcctgtccatcccactggacaagcaactcagtttacttttgctttacttttaaaactcacagcagtattataagtcatataaaaatttcaagcttttttgttacagaaactgttcttccatcagtgcagaccatttgagattttcttagaaatcaaacttaattaaataaacataacagcaatttgtctgacacacacttgttcaagtattaacatttctcctcagggaactaaggggcaaccaacctattcttcattcaccttcaagttaaacaacttcgttacaaaacaaaacaaaaaaggagggaattaatagcaaaaatagaaggcatttcttatattccagtcagtgtgcaagcaaaatcactggagcaaatcataagttgctggaagagaacaataagtacttcaaggccataatgtgctacttgccctctgtgataagcaaactttagtggcatccaatctaagtttatatcacaggtcaatcaaaatcttgcctaaccattagccgttactcacacatatatatgtatatgtattatagttattagtgccagaaatctagtgaccaaaaccactaatctaggaccgtgaacgattctacgcaaactcaccagaagaaattatggatcaataaaatcaatgaaattaaaattttgactgcagagtcaactgaaacaatttcatattcatgagactgttaagaacataaacgcggggttaccttttgcctccttttacagcaaaaggctttatctttgtgctcaaagtatggaacagtttacatactttactcatttatgaaatatactgatctccaaatgtcttcataaaattggtaaacacagaataaagtcaattgtttattttcctatagccaaacgtgtcctgtctgaaacattcaagccattctacaatacatttaagaattgtgttggacactgctaatagctattttccagccttccttccacacgcaccttctattgccaaaatactgtagtaaggtgggatattattgaaagaggttatagacattcaaaaggaaatgagaatttatagatgaatttatacagcacctacataccaacaaacgcactactgctacatcaaatttgtaaatcttccttttaaaactgaaaggtgttagttgatctgcaatggtgtaactttaaaaagcacagtaaacccatgaatgcctatataaagcctcaacaattcagtccactgcaacaccacaaattcaaaggaaatgtggtcaagttcttaggggcacaaaaatattttcgctcagttaaaaaaaaaatgccctagtaataatatactctcagttaattacctgaagtttcatggcatatatttaggtctttggaaacttaaacacacacacacaatttttaagtagcagcgctgctaatggttttagacgctgaagcatgtgcattcctgaatttaccccgtttaacaaaaagggggacgcgaatattcacgatgatcaacttcttcaatgcactgctgggccatgttagggtcttcctgaaacttttggatctaaaatctcctccgaaatccacaaagagaagccactaaaaatcagttgccattgtgatttggtgccgactaccgcttcttactactctttcttcacagccctcgcccagaacagtggagctctccgaagtcccaatgctagaccggaaaagagaagccaaaggagacctgaagccctcttggcgctgcaggaggcggcccggctgaagcgccccccgctcctccacaactacccacacgacaggcccggatcccgctgggagatgatgtttaggaaagggggaataagccatcgccgtcacttagcgccgatttcggcccttcccgcccggctctagtacctgccgccggccctcgcccatccccagctcaccccggcggggctcggcgccgaaagagaaccctctcctcgctggtctctcatttcgataggcgctagggcctctcggagtcggagaggggcttccaacaggccccaagtccagtccttccctcccaacaacatcccgccgagcgtgccctggcacccaggcgcggtgctcgggaagagggccccgggcctgcctcccgccgacaccaagaagaaaagggagggaaggaagggcgaagatggggcctgccctagagccaagtaccttgtagaaagcgccattggagccccgcacttccaccaccagctcctccatcttctcttcagccctgctagcgccgggagcccgcccccgagaggtgggctgcgggcgctcgaggcccagccgccgccgccgccgccgccgccgccgcctccgccgccgccgccgccgccgccgccgccgcgctgccgcacgccccctggcagcggcgcctccgtcaccgccgccgcccgcgctcgccgtcggcccgccgcccgctcagaggcggccctccaccggaagtgaaaccgaaacggagctgagcgcctgactgaggccgaacccccggcccgctgcgggtgtaaacactgaaaccacgtcacgtgatcaacgctgttccctccccccgcgggctcagcccctcggccccgccctctctcttcaagtggcctgggagcgcgcgcatgcgcgctgctgggaaccggccggggtgccgggtcgaaagacagacgcgcgggccgggcgtgcgcgggcttggtggagggcgggaaggctgaagggcggtgacaggtcgcactgcctcgcgagggccagaacgcccatttctgcagaggtgcactcagtggcgtgggaaatcaaatgcatccggttatcccagttcggcctctctgggattccgcgggagggggtgtctggtctggtttggtttggtttggtttggtttggtttggtccggttcaaagtagcgcagtctgactgagcgggaggtggagtggaaggcgagaataggggtgaaggattagacagaagaagactttgaactaggaacagtggcaaccagggtgacccaggcttttgtgacccgtagaggcagaaggtgaggcgtctacgccctctctcaccagattttgggcggccctgtggagacaccctgtgccctttaagggacatggattgagtcgggatctcaaaatgtgagcctttcctcagacccagctttgacccacgtactcgcctttcctcaactcattttcatactttcacttgactatatattttttaaaaattgtgttaagcacttgaggttcatttctgcccctactgtatgtgcaccctgtgccagagggtggggtgaacacgtgtgtagcagtcatgcgtcctgtccacaggggccgatgcacctccttgcaaccctttacattccactgtgaaacaaacctcaactttttcttattcctgtttttacaccgtgcttatagctgccttaatccatgttcccttcgggatgctggtatccaactgagaagttgacggagcatctatcgtgtgccagacactgtgctaagtgctaacgagaaatcggtgagcaaaacagaaaagaaaaaaaaagaagaaacgactgccagcattgaacttagtacctagcaaagtaggtggacataaatcaaattgtcagacaagtaaatgagtagttgcagctgtgataaggggtatgaagaataggcgcttccatgatggcggaacatgacctagtctggggtggagaaggggagatgattccagctggaatatggcaggtgagagttaactaatagcactgagttggcagaggcaggatgacctgccccaggcaggtgccccagaatgagaggatgttgctgctggtggaactccagctttaaagcggtggatctagggccacattcctcaaggccatagcaaacaggaaagaccttttggactagggtctttggagtagtcacatgaggccaagaacccaatagggctgaaagagaatctcatcataggctgaatgggagcagagcattagctgcaactccaatgtattatagtaaaaggggacacattgattagaatgattatacccctccaagtgtaagctgttgttcaatttacccagggcttaaaaatatgtcaactcttcacaaccatttttactacaagccacactcaacctgtgttgttccctgaacctgtgatgcactttcatccgttcatgtctctacacatccttcctgggccccatagaggccctgcaccttaaggttttcagctggattcctattagctagttattttatctcaggtacagagagttaactttgctcctcaattttcagcacattgtcatatcagtccctacagggtccttgtttacattattttatagtgtttatattattttttcctcatctttctcgatccccactctcattcttctagacacaagctgcaatatgttcgatagagatccttgataatttaacacagataatgttttgtttatgcctcttgcatttacagagatggtattggactgtaaatctctatttcccactgttttactcaacagtctgtttttgagctatacccacattgctgtgtgtacacctagtttgctaccgagtatgccagaaattttattcatacatatccctactgatcgggcatctaggttactgccaactccctgaagtcatactgtggtgaaaacccttgtgaatgtctttacaaacctttgccagaacttattttgtgctcttgtagaactttgtgcataccctctgcttcctcattacactgcttggcatatagcagagactcaacaaatgttgaatacctctactatgatggttagtgtactagaataatttatttatatttctgttttccttattggattattagtaccttccagacagggcaaatgtcttttctatctttgtgtccctggcacattaaaagtggttgatttcaaggtatgttcaatgaatgaataaatacttatcttcactgccagtacatactgcaacttagtcttccccacttgactctgagtctcagccttactctgatctctagcttttgatatttcccctttcaagatagcttacctgaattcagacactgagctcaggcctgatcatgagcctgctcttccaaagtcctctctctctctctctctttctctcctgtctctcgttacaggcagctcctgccttccagttcgttgctcaagcctaaaactgagacattttgaccctctttcacacatcagatccatcagcaaatcattgtagaatccagactctgtttctgatcatttgctcagctaaaaccatagtccaagcttccattctcttacctgcattatggcagcaacttcttcgctggtatccctgcagtcactgtccactgttgtaccctctctgacagttctcagcacagaagacagaatgaccctgttgaggtgtcaatcaagtcactctgccactcacaatcccccagtgactccctacatctctcagagtaaaagccagagtcattatttattctggcttcagtgccctatatactctgacttctgttatctccgctatctcaccttctactttcccccttcacttcattccagtgcatgaaatctatctagttcacctagattttctcctatgttatctttcagaagttttacagttttgtgttttgcatttaggtctatgatccattttgagtaaatttttttcaaaagatataaggtctgtatctagattattttttgcatatgaatgtccagttattccagcactgtttattgaaaaggccattgtttctcattccagccataatgttttctttgttgtttcttgaaaatagcagacaggttctgtctctctcccctcactagagtgtaagctcagtgagaacaaagatttccatttgttttattcactgcttgtccccagtgcctaccacagtgtctggaacatagtgaatgtttactaaatattacatgaatgaacgaatatgtgttgaggacccggccgaggttgagtcagctctcatgcctatatttatctgatattggaatgatgcttcagtgtttctagccctgccttggcccttggtttccattaaattgctgcctgttgtctttgcattgatttattctgtgctatttcctgctccttcgcaatttgagccctctgagtcttttccatggctcaaacccagctgaaatgccttctgccctttccgactctcaaatcttatgtacccttcaggacccagctaaagtcacacttctttcttgacactttctctgacaatttcctttaaccatgacctctcattcaaatgagatattagaaaaagaataattaattggctttattttttagaacagttttacatttatggaaaaattaagcagatagtggagagagtttctatgtacttcctaatctccctcctcccctacagttcctcctgttattaacatcttgcattcgcattgtacatttattacaactgatgcattattactaactaaagtctatagtttacattaagattcactctttgtgttgcatagctctgtgggttttgaaaaaagcataacatatccaccattacagtgtcagcagaacaattacactgcattaaaaaattccttgtgttccacctattcatctggtctacctgcaaccaacccttggcaatcactgatgtttttactttctgcagaattttgccttttccgtaatgtcatagagttggaatcatatagtatgtagtcttttcatactgcttttttttttttacttagcaatatacatttaacattcctctgtgtcttttcatggcttgatagtttattttcttttattgtgcacagtattccactgtatgtatataccatggtttgtttatccatttatttattgaaagacatcttggttgctttcagtcttttaaaattatgaataaggctcctgtaaactttcttgtacagatttttgtatggacataagttttcaactcatttaggtaaataccaaggagcatgattgctggatcatatggtaagactatgttttgctttatcaaaaattaccagatgatcttccaaagtggctgtaacagtttgcattttcaccagcaatgagtgagacttcctgttactccacatccttgccaacatttggtgttgccagtattttgaattttgggtattttaataggtgcatagtagaatcttattgttttagtttgcaatttcctaatgacatatggcattgggcatcttatgcttgtttgtcacgtatgtatcttctttgataaggtgtctgctcagatctgttacccattgggttttttttattgatgatttttcagtgttctttatatattttagatatcagccctttatcagattatgtattttgcagatattttctcccagacagtggcttgtcttttcattcatttaacaatgtctttcattgagcagacatttgtaatgaaaaaatttcgactgttcagtttttttcagggatcgtgcttttagcattgtacccaaaaagtcatcaccaaacacaagttcacctagattttctcctatgttatcttccagaagttttacagttttgtgttttgcatttaggtctatgatccattttgagtaaatttttgtgaaagatataaggtctgtgtctagattgttttttgcatatgaatgtccagttattccagcaccgtttgttgaaaagaccattgtttctccattgaattatttgctcctttgtcaatgatcagttgactgtatttgtatggatctaattctggcatctttattttgttccatttatctacagttggccctctgtatccatgggttctgcatcaacagattcaaccaatgacagatcaaaaatattctttaaaaatcccctaaaaatggccaggaggggtggctcatgcctgtaattttggtactttgggaggccaaggtggggggattatcaggtcaggagttcgagaccggcctggccaacatagtgaagccccgtctctactaaaaatacaaaaaattagctgagcatggtggcgggcacctgtaatccaagctgctcaggaaggtgaggcaggagaatcacttgaacccaggaggcagaggttgcactgagccaagaccgcaccactgcactccagccctgacgacagtgcaagactcagtctcaaaaagaaaatcccctaaaaataacaatataacaataaaaataatacaaataaaaaatcaataaagtataactgttacatagcatttacattgtgttaggtattatatataatctagagatgatttaaagtatacaggaggaggatgtgcataggttatatgcaaacactacgtcgtattatataagaaacttgagaatccacaggttttggtatcctcagacatcctgcaaccagttccccccatgatactgaggaacaacagtatttctcttttctttcatcaataccctactgtcttgactactgtaactttgtaataagctttgaagtaagatagtgtctgtcttccaactttgttcttcctcaatattatactgcctattctggatcttctgtctttccatatagactttacagtcagtttgtcaatattcacaaaataacttgctaggattttgattcagacagcattgaatctatagatcaagtagggaagaagtgacagtttaacaacattagtcttgctatttatgaacatgggatatttctcaatttatttagatttttcatttctttcataaggtgttgaactagattctgtacatattttattagatttatacctaaatattttgtttttcagtgctggtttgaatggtatgtttttaatttcaaattccaattgttcattgctgatatataaatttccctctcatcactgcttttgctgcatcccataaattttaaaaagtttattttttcatttagttcaaaatatttttaatatctcttgaaacatcttctttgatccatatattatttagaagtgtgttgtttaatctccaaatatttgagggcattgcctagcatatttctaggtttctaaaaatatctagtttaattttattgtaatctgtgaaaatatcttgtttgatttctgtttttttaatttttaaggtgaattttatgaaacagaatgtggtctatcttgattaatgttccatgtgaacatgaaagaaatgtgtattctgtctctgttggatcaaatagtctataaatatcaggccaggcacagtggctgatgcctgtaatcccagtactttgcaaggctaaggtgggaggatcacttgaggccagaagttcgagaccagcctggccaacatagtgaaatgccgactctactaaaaatgcaaaaaattagctgggtgtggtggtgcatgcctgtaatcccagctactcaggaggctgaggcatgatgagagtcacttgaagctgggaggcagaggttgcagtgagcagagattgcccactgcactccaagcctgagtgacagagtgagactgacacacacatacacacacacacacacacacacacacaataaagtctatagatgttgattagatcaagttgatcgataaggatgttcagcatcaactatatccttactgatgtttttggctatatctgtaaattactgacagagaggtgttgaagtctccaaatatgacagtgcatttgtctgtttctctttgcagctctgtctgcttttgcctcatatgttttgacactgttgctagatggatatacaataaggaattttatgttttcttgcagaattaacacctttatcggtatgtaatgcccctctttattcctgataatgtccttgccctgaagtttgctttgtctgaaattaatatagctacttcagctttcttttgattagtgttagcatggtatatctttttctatccctttacttttaatctaggtatatctttatgtttaaattgggcttcttgcagacaatacataattgggtcttttaaaataattcattctgacattattcattttttaatttatgtatttagaccattcacatttaaattgattatgataataatatagttagattcatatataccatgttttaactgttttccatttatttcacttgttcttggtttcttttttaacttttcctcttttactgccttctctggttttaattgagcattttatattattctctaataaaagagatcttagatattgattatacttttaaaaatgtagtagtttccctagaatttgcagtatatatttatatctaattaagtccactttcaaataacactatagtgcttcatgggtagtacaggtaccttattacagagtattcccaattcctccgttatgtcccttaaaattttgctattattcacttcacttatccgtatactataatcacccaaaacataattattttgaaaaaatagttatatttattagatcaattaaggttaaggaacattaaagagtttattttatgctcatttattccttcttgaaagctcttttctttatgtagatttcagtttttgacctatgtcatttcatttctgtccgaaaaatttcttttaacatttatttcaaggcaggtctactggtgacagattcagcctttgtctgagaaagcatttcttctttgcttttgaaggataatttcactgtatccagaattctagttttatcctttcaacactttaaacatttcacgctaccttcttctttcttgcatggttgccaatgagatttctgatgtaattcttatctttgtccctccttaggtaaatttctcctcttctgtagcttctttcatgttttctggttgttttagttttctgtgatttgaacataatatgactaggtgtggacttttttttttttaaattttatcctgcttggtgtcttttaagcctcctggatgtgtggtttggtgtctgtcactgattttggaaaattatcagcctttattatttcatatatttcttctgcttctttctctcctacttctagtattctcatataagcatattatacctttagtaattgtctacagttcctggatattttgtttctttttttatatctaatttttgcatttcagtttgggaaatgttaaaagaaaaacttcatgcaaattaaatttaaaggagtttaattgagcaatgaacgattggtgaatcgggcagctcccaaaatcacagcaaattcacagagactccagtgcagccatgtgatggaagaagatttatagacaaaaaaaggaaatgacatacagaaatcagaagtcaagtacagaaacaactggattggttacagcttggtgttagctttatttaaacagggttcaaacagttggctacatttgattagtcaaaattcagtcattggcacaggtgcgggctatggttggtttatacctccacttgttatagttcaagatgtgcagaaaaacctttaggccgaacttaaatatgtaaggaggcaactttaggataaacttgattaacagaagtttctattaacatatcttcaatctcattggttctttccgctgattcttcccgcagctgtttccagtctactggtgagcccatcaaaggtatttgtgtttccgtaacagttgtttttttaaaaatttctatcatttttacaattctttcttggagattttctttctctctctctgcttacattacccatttgttcttacatgttgtctactttttccattagtgctctaaacatattaattataattattttaaatttactttctgataattctaaaatcactgttatatttaagtctggttcctttgctcgctttatctttacagactgtgttttttcttgcctttctgcattccttgcaattttttgttgaaagtcaggtataatgtattgggtaataggaactgaggtaattaggttttagtttgactttttatgttaatcagttaggagttggggtgtttaatgtttgctgtagctgtaggtgccagatgctttagttcagtatctttgtttttgtctcctttgctgtctttgcgtttccctatcaacttcttcttaaatggtctgggtttctcagctctcccattgtaatctattgctattatactggagcactgttgatgcagtggcatggtgttagggaagggaaatgttctataattttatgattaaatttcagatttttagttgagttcctgggctgtaatcttcagaattatttcttagctttttttctccctttagatgagataagaaggctaaaaaggactagcactggctaataatcccttcctaggtcaggaatggttctggaaaggtagtttccctcgtagggcaagcatttgttacaaagaatatactgaatatatttcaaagtggttgcttcctgctcctccttcaggaaacaggaagcagaaattctctgatatatactgtcagaaactggtggggttcctgaaggcaaaagccatgaaagtgtagcctttgcctccgatttgtcccctaggaattttcaactttcaaactagcccacacccagcctcaagcaattcaccaaaaccaccacttaagttttcctacctaattggctccagtggctgctgcttcaggaaatctaagttctgctctgattctctgtattcacctatcgctccaaatttggtgctggcaggttgccctggggccttaaatctcttggtctaagataagtcattgcttttctgtttgttcaatgttttgttgttgttgaaaggagtgccagtttccaagctctgtacatgtcagagctcaatattagacatttgcgttggaatttctttcttggcttggagtcgagtgtcaggactgatattcatagcccaaacatcaccaagaagccggtacaagtagaagtattgaccctcaaggtcattttagtattgatttcattatgagataatcacattattttctctttatccattgagaataaatagcatgcaatctgtcacagtcactggtttggctaacttgacttccatgcccagccttattttctcttgcctgcctctaacctagagagtggaaaacctaaatatgcaagtttccagccaaccctgaaaccatagtggccacgtgactatttttgtttttttgcaaatgtgatctaaacataagtttacagggaagtttctagaaaagcttttgcttttttgagaaaaggggacaaatttggctgatgttttatcttcttttgtaatgcctgccttggttatggatgtgacacctaaagttagggaaaccttgaggctgcggttaagagaatcgcaagctatcctcccacctcagcctcttgagtagctgggactacaggtgttcgtcaccacacccaactaattttgtatttttctgtagagccggggtttcaccatgttgcccaagctggtctcgaactcctgagctcaagcgatccactcgccttggcctcccaaagtgctgggattacaggcatgagccactgtgtccagccaccaccagacttatgtgagaaaaataaacctctgtttgattaggtgttgctaaagtggcttttcaataacttgcagccatatgcatttctgatagagcacctaacctatatggaatctgaggtacaaaaccaaacaaccagactaatagataacaactatgaggagcaggagtcaacttggctacaatgagtcatgttgaggcccacccattcaaagaactaaagcaaagatcagtctcaacattgttgaaattccaagtactaaagttttgctggttgccatttgttatgcacatatgtcacatgaaatgtggaggggatgttgtctctgtaaactcaaagtgccagtttcattcctgtaatcccagtgggaggccaagttgagaagattgcttgaggccaggagtttgagccaagcctggacaacatagtgagacttcccccccgcaccccccaccactctacaagaaagtaagaaaattagcctggcatggtggtgcatgcctatagtctcagttacttaggaggctgaggttggaggatcacttctggccaggagtttgaggctacagtgagctacgatcaggccactgcaccccagcttgggcaacaaaataagactccgtctctaaaaaaagtttaagaaaggaaaaaaaaaaaaggaaaaagcattaaaccaaggcgtcagtgaccagtagcatgagaaaatggcaatttttaaggaggtgggagccttagtagtttccctgagctgcacagatggatctgagaaataaaagtaaaattctaagccttcatctgaatgaacagagcccctcttggccaggggaactgcagagaaaccttgaaagctgaattcatggccatgacaggatgagagat

SEQ ID NO: 19 - DNA, 63407 bp, Mus musculus
atctttgctagttttaattcttatctagttacctaggtaacattaaaaactctattaagagctctactaatttctgagagtattgctgatagaatgcgcatagaagcaataataactacctcaaagatggcatctgaacagagtccaatattttttaggtgtaggatctataaagatgcaattctacgtggcttaatactatattataattacttctgacatcctttattcattaaagatatctttttattggatattttatttatttacatttcaaatattattccctttcctggtttcccctccagaaatcccctatcccatcctccctccccctgcttctatgaaggtgtgcacccacccactcctgcctccctgccgttgcattccactactctggggcattgcgccttcacaggaccaagggtctctcctcccactgatgtcagataaggtaatcctctgctccatatgcagctggagccatgggtccctccatgtgcactctttggttggtagtttagtccctgggagctctggggggatctggttggttgatattgttgttcctcctatggggttgcaaaccccttcagctccttcagtcctttctctaactcctccattggggacccccattaaagatatcttaaaatagaaagggatgccttgattatggtctagtagtatgtaataaaatgcaattctaaagtcccaatgggtgttcgtgtgtgtgtgtgtgggggggtgtgggtgtgggtgtgtgttaattggagtctcctaactcagacttacaatgtagatgtgaggatgaccttggacttctgatcattcttgcttccactccccaagtgcttggattttaagcatgcactatcacacccaatttattcctgcaaagtaacaagcctgatgtagagataagccctccaaaatgaagatgttaataaaactaaagtaggaaaagactaacccctaaaaggtcaattttattaattgttaatttaaaaaacaaatacaaactagctattcactcttctcaatttgacagttcagctatggtacaactgctagacaaaaacaacaacatttctataaacttggtggtcacaagattttaaaaaacacaatcattttacataaaggaaatgaatgatatgaaagtaagccaggacatatactagaaatcaaaaacatttggggaagaaggaacatgctgtcctaactgaagaaatgaaggggagactagttgatataggaaaatgtgcattctgtaatgtcgggtgagagggacttaaagtggaaatctatataacttgaatttcttgtaattgctaaatagaatgatatctttcaatatttatacttcatggctcagatacctacctcacttgccttgattctttatcctggccttcagtttgaaaaatgtgaggatataggttaagaagagaaataacacataatatgcctcatttcttaagctacgttacacctcgttttgttactagaaatttccaaagaaaacataaatataagtctttgtcttcttagaatgaagtctcaccaattaagatttgctaaacacccactgtttggactaatgccattcttggcagcacttactgtaatggtctaaacaaagtttgtgtctcaagtcggtgttaagtccatttcagggttcagggaatctaaaaatcccaagtgcaaacatgacttagattcttgtacttctggatccatacttcaaggtcttcatcattataaatggtctctgccatctgccacacttacatattgccttctgatacaggggaaaaagtcatccaatgttcactgggattccaggagaaatcatattattttggcaatgaataaacaactttgataaaatatcttctggggacttttctgtattctaatgaaaaatatccatctactcaaatagaacatgatgtctagtatcttttgctttgtgtttgcatcttgctttatattcattatttatttttgcattctgcttgctatttttctttcctctgacacagatatttctttactgtttatttgagtaagatattgagtgttgcttctatcatataacgttctttttctcattttcccattgcagtaagatgaaacatatagtatgttttcattccagtctatcttcctctccctgtcctttgaaaggtttttatttcctctcactgcccatctttccacataaccttgcatgtggtccagaaacaatgtactatctgtttgctaaaacttcgtgttaaatcagtacaacaaaccgcatacaaaagggaaagtacaatgcaagggagaactaatcgaagataaaactatagaagttttagaacataatatagaaaggacacttttcttccctagataagagtggatatagttatttgatgtcctttatctgtctgtattatagcatctatcattgtggctgcttctgggtccataaacaaaaggcacacattgtgacctagcaaggggagaaggaaagggtatctcagatttcttgctgagtttacctatctgctgtgtgtgtccagtcccagaactcctatcacactgtcaatacaataaatttccctccagtccaacagtgtccatttaacactccctcctattgtttccaattgatgtttctattattttggttaaaggtacagccaaaactcttcatttgtccattcaaaatgacaaccaaaagctgagatgtgttaaagcaaaaatgagaaaaataaactattatccccacccccaaggaactattcagtaacagttatctggacttagaatttctccacaccccaatgctagttatgcctaactcgttttaaaaataaaatcattaaacatttgattttgattttctaaacttaccaaataaagaagaacctttaaatctcaaagtcattacatataggatgtggagaacactccaaaatcccggaaactcagccaccaattgctcagactcataaacaacctaaacattggcttatctaccttcccagacaatgacatggatcctttcaccttacaagtaaaatttcacacagaaagtattttggtacctttaaggagtagaaacctatctcatttgcatatattttggagagttctgttctatgcagaaagtcattcctgaattcttgatttttgaaagggtacagagttcacttttatgaatcagatccaagttgctttgaagatcaaaaagttttaatacatatttgaatagagatacttttaacttggatccaatttccttcttggccttctttttctggaaaagtcaataaaaacaaagattttaaaaattttattagcattactattataatatgccacagttagaagtaaagctatttagatcctttgcttttgagtgagagacctttgaacaacaagccctaaatgggatgtctccatcaaagacctctcctcagggctagggaagcccgctaaagagaaggtggagtgagtataagaggcagaagaacaagggcctttaaatcacctgagtaaagctcatatgaactcagatacttaggcagcatgcacaggggcttctgtggatgccataatatgggattcctgaatgtacaaacatgtaggtctctggttgttgtgccttcctttttttccaattttttattatgtattttcttcatttacatttcaaatgctatcccgaaattcccctataccctcccccccccacccccgctcccctacccacccactgccttctcttgggctgttttgcttctgttggtttgtcctgtccaatttcaatatgataatttttattttatcattgtttcatttattttgttacagatttattaaatgaatgaatgaatgactctctagacacttggataaaagttaaaaactgaactgtcatttatacctgctggaagaggaaaaatcagtattctacaatggagtgacacacggtatatcaacaactccagggaaggcttcatgttcagaaacagctggcctaatataatggattccactgtttgcttgtgtgtgtgtgtgtgtgtgtgtgtgtgtgtctgtgtgtatgtgtctgtctgtctgtctgtctgtctgtctgtttgtgaatacatgagtgtgtacttttttggcgattttaattttttttctgtttgggtttttgtttgttgtttttgttgttgttgttttcccattttggtttggtcttggttttggaggtttctcttgtattggtttttgtctgtttgggtttcttttttgagaaagaacttaaagttgggcaagtgggggggggaggatcagaaagaacttgaggaaagggaagaatatgatcaaaatctatttacatttaaaattgttttaaataaaaaaaaaattaaaaatcctttgctttcttactctccatgctccatgctatttctacaagcaccagatccatggaattcaaagctttttcacctctaatgtcacccttttcctagttcttcaagcatcatgtcccagcatctgcatagtggcttaccgccttctgtaactccagttctagaaagtccaaagccctcttatagtctccatgggcaccagacatgcataaagtacatagacacacatgcagccaaaaaattacacacaaacataagcataaaaagactcacaaaagtggaaataataaagcaggcttggtagtacacatctttaatctgagcacagtggaggtataggcaggtagacatctatgagttccaggctagctaaagcaatgcaggaagatctcttctctaatatcaaaagtgaaaaataaaaataataaaaattacaaactaaggtgactggggagatgtctgagttggtaaagtgcttgcataaaataacaaggacctaagttcagatcagcagcacccatgtaatagctgagtgtggtcgtgcctacctaaaactccaggattgggagagtagggaccagaggcaggtgaattactatagttccctgtccagccaacctaaccaagattgtgagctccagagaaatgcagagactttctcaaaaacctaagactgagagcagttgcaagaaacaactggcacccaccttttcctctacactcacatctatgtcatctacttgtgcatacatcatgttcacagagaaaggggaagactaaaacaaacaaaacaacaacaacaacaacaaaaagaactcagacataagataccaccacatttctgtaactagaaagcactagcaatgtttggcaaatgcagcaatgatctttactatagcataagaacagatgcatcattttcggccttgctttgccatagaggctgagagagtactcctgttagtatcactttctctgcagatcagagaagacagcagattggttgcttaatctagaactgtctttcctcctcagccttgcatcatcatcacctggacaatttttgtaaccgggatgctttctttcagggtgctatctataaaaacagcacttttctgttttttcaagtaacttaattcacttcaggaacaagtaaattccttctacaccatctttctggtatcttagaaaacacaggctgtcataataactcttcttaccaagccagtcaggaacttattatgtaccttcaatccatagactcagcactttaatccttagaggaagattttcttctataattttattcaacttactctctttatttttcttcccctagaattcttaccaattttcctatctttcatccaaatatcctgattattcatggtggctatctctctgtgttttatattttgagctagggtttgggttataatgttttgatcttaacagttctgacctttatttgggctatcaaattatccttttagttgctctcacgttttctcaaatgttgtatgcgcctttctgttccaaacatcctatgcctcctagcaagtctctttacctggatgtgtctgatgaattttctttctgactgcagaatctatgaagtgattatttatactacagtaacttcgctttgggggacttcagttctggattttagaaaagtataatgtaatagaacttcagattcaggcagggtgaggctgatcaagaagactccctgcaaaacaacactacagaaagacacaagttaagtagaaactagacataccttccctcctaatttgttttctattgctgtgacaaaataattcaaccaaaaactacttggggaaaggactggtttatctgacttacactgtcaggtcagctcaccattaaaggaagtctggaccagaattcaaggcaggaacctagaggtaggaactacagtagaggttgtgggggaatgctctttagtggcttgctccaacccagttgcttcctcagtttttttttttaataagccagtactacctggccagaatgataccatccacagagagctgggcagctccacatcagttagtaaaaccctacaacacttggttacatgcaatctgacaaagacaatacctcaattaagacaatacttcttccctggggaagtctcagtttgtgtcaagataaccaaaattaaacaacatacctccttctcattttgacaaccaaggatccccacaacagcaggaaaatcctcccagcattctctttcttggcccaaagatctgggatgctaatgcccacatattcctgaagctcatgaagaagaaaattctctatctgcttacttactcctgaagaatccaaggcttttgtccccaacaattggaggttccaacatctgttttcctaagagaggaagagtgattggaattgagaactatttattcaaagcatctcttttcacttgcacaactttgtaatgcacaagtattaaaccataaatttacttcaaattttaaaactctgcccaatttcccctccagttttattagaagcatttcagatttattactataaagagatcctgattttaaaaagctacaagatttgttccatttttagtatttatatagctttctcagaagttcaaaatgtcagtgaccagattaaaatcagctcccagcctcaatttggaagaattaatttcttttgaataattaattggtcagtttctatgaataatagttcaaccaaggtgcatattactattttcttatttatatgacaaaattaccatttaccaggagaaagcattatcaaatataaatctttcaagccaaactgaccaaactgactttcatttccttctattcttcagtatattgtactttagtgcgcattcataagtcaggtttcagtgctaaaggaaaccatcaaatagcaatcaattctgctgcaaggcttagtgacataaattcttgtgtatttttattctcagtcatatcaacctagatataaaaatagaagtgataatagcagtgctacaattgtattactctgactgtgctccatcctatataattcagaggatgttgtagtctctcctctttcttaagactaactctgaagagtcccctagtaatgcttaatgagttctcctctaatggcactttctatttccctgttcctattctgatagctcttatctctaaaactcttttactactgccagacaaacaatgcctggtaatttctctgtcttcaaattataccagtgctactatctgtgtccaggaattcttatatgggtgcacaagccaagccattgccatgaaggaattgaagatgctcactcttactagttgattgaaaagcagttggtattagctccattgcctggaaaagaacttaggacaagtacaagtgatgccttacatagcatctctatctgctcctcttagatcttgaattctatcaagaagtcatggttagggttacagagcacaatctgaatggcaaatgctacaccaagttttgaatcagtctcactgtcttaaggtgtcgtctaaacctaaaccacatttggctgacctatctattccagatacatctttcatgataagcttctcatctctcatgaataattaacttatgccaatctttttcttccttgagtcttctggatatgactagatatcagttgtgaaaatatcataggaatatatcagaatgtttggataccatccattctaactatagttgttatcatttaaatgcaaatacactgtcatttaatattttcctacagtaagcattaccttgatagttttttttagatggggtctgtacctactactggacaagagctcattatgcagctgaagatgcccttgaacttctgattcttctgcttctatctccatgttggattgggtttagaggcatgcatctaaaacatggtattctattttttgaatatctgttttagaggagaggtcaaatcgaggtgatatgttcagagaaaataacatgaaagaagtctgacttaagcagtgtcttgaagggcatttcagctaggactgaggaataaaaaggcatagagggctcaagttacaaaaccatgaaatatagaagaaatcgatgcagagacaacagacagttatttaatggaagataggggccaaagtagggccagacatgctgaagtataggcatggagcagatgtcatttatgctgagtcttcaatatgtattcattcattcacttacccattcattcaataaatagttagaaaccatctactgtgttcccgacattggtgacacaggcacttaagcaatacataaaagaccaatctttttttttttttttcaaaattaagtttacattccagtgaaaaagactaacaacttgcctgataatttcaagacatcaaaggaagtatcatgattgtgaaatttagaatgtgaggcagaagggataaaagatgtcagaatgtataaaacattaagacttgaataaataattactttaggtttagccaaagaaacattaccagaaatcccatcagagtgtttggggtggcagtttgattggtatggcacataagcaggggtattattttgtcttgcgacttgacaaaaagaaggcaagagtggctatagggaagcaggtggagaatgaaagcctggataatgcatgagtagactctaagactctgaaagaatttggtatccgattaggattgagagacccccccacaccgtgaggtgtagagtatgagcccaccccagagaaatctaaaagaggaaagataatgccacaacatatccccacagtgagaacaaacaccaaacatttaaaatctacctaaagtacaagggtgaataagatatcttttctgcctagatagtactaatagtccaatgagaaaaataactgtaaataaataattctactgtattgtaaatgacagtaaaatattaagcattcagagcctgttttataatcagtgcaaaagaagaaacaggaagtgcatacacaactctgtaagagcacactcgcaaaattcttgccacagtgcatgaagaagacacaagagttttcgtgaccctgggaatggtggcatatgcctttattcccagtactttggtagcaggagcaaatagatcaccatgtgttcaaggcctgccaaggataaatactgagacactgtcccaaaagcaattttaaaaatacagatttaatggtagcagtgagaaacagatttacagtccagtaccacgtctgtgtatgcaaaagccatacacatatagcacactagaagtaaagaaagaacagggaattcaaggatagcctctactaattctgagttgtggccaacctgccctacaaaaaaatctgtccttaaaaacactatcttaaactattaatgatatgtcaaacattacaactgttttctagtagaatgagacaagtaatatacacaataatatgagcaaaagaggggccatgtaagaactaatggtgagcatgctgagaattgaaataaatgcttactgaaatatttgcaactgaagtgaaataattacacaatcggactctacctaataactttaagggggaaagaaagttatgcacagtgtcatgacatcatgaaactatgtcttaggacagtaacctttgcgaattactgatatgtttgaaagccctgagaaaactacatatcttacacttggaagatagaatcttctcaatcaatatgtccccttttatatcactggagttaaagctaatgttatgccccatctggtctatggtgagatttgtattcaaccctacaggattcttaatatattgtggctactccaaagatcctagttcaatgggtcatttctgtttaccatagcctcaaggaatgtggcccttgatccactgctttaaagctggagttgcaacaacattaatattgttccggctgaggcaggctgggaactggaagcctcacatcctagccctctaccatctgcttaggacaactcacccttgctctttcaagtgcacacttccaaataagtctttcttgtcacattccagttggaatcatcttgcttccgggctcacttatctcacaccacagacaggctcatttccaactgtaaaagatataaccacactttatagaccacatcacagttgtgactccatatttatatcttcttcatgcgtgtatgtgtgtgtagcatccatgtgtgtgagtatggccacacatatgccacaaaacatgtgtgggggtcacagtacaacttctaatgcagtccttgccttctacccagagtctctctttttgttgttcgaaactagataaggcacactgacctgtgaacttctggggaatcaactttgtgggagtgcttatttaggcacttaggcccagctttctatagattctaggaattagaaaattcaggatttcatgctcgcatagcaaatgttttacccccttgagccacctctccagctccacacttacggttttgagaagttgaattttgcacatctactcctgtaggttccaatttcaatagtgacagtctttttgttgctacctcaccaaggactcactagtacttaggacagtgcttggcacatggtaggcattcaatgaacttctcagttggatgcaagccttctggattaaaggagcatgggtcaggctggatataagcccaatacagaggccaaaggggtggggaggtgattttggttctgctgtagaaggcaaaggcagagagctgcatggaaaggacccaatgatgcacatagacagatcccatgactgctttactgatgccctccctctggtacagggggcatgtagaagaggcagaagtcgagtaaaaaggaattaacaagtgttcaactctctctgtcagctctttttattacgaattccaagtaaaactatgaacggaaagtgtgagggggactgtctgagaaagggataacatttcctgaagttctggcacaccctattggcccttaaaaagtactcaaagttcccacaatacttccccaaatcactaggtagtagagcgatttattttgcatcctagccataagagtcccagaagtcagggtcaatgtagttatcactgttcctagatcaaagtgttctccaatggaatttatcactttttttttacttccctcccgccgcgacttgcagttcaaacaggtcccacgccagtgccgtgaaaaatctacccaatgcccctccacttctggtcgggccccattttcgacaactggaggccttttcccatgtcctcgcttcctcctgtacggaagaggcctctagtccccgcggcgggcacaggcagccagacttagtactgccctttacgctttcccgcctttcaccaagtgcgcgcgccaaagggtgcgccctgataccctgaggcaggtacccaggagggcgcatgcgcgtgctccactgcccgagaggaggcaagggcggagcggagagggcggggccaaaggggaggggctgcgcgggtcacgtgacatcgtttgactgtttacaggaggcgcagcggagcccttggcctcagtcagtcaggcgctggggagcgtttcggtttcacttccggtgaggggccgcgcctgagagggcgggcagtgaagcaaacggacggcgagcgcgggcggtggcagtgacggcggcgccgctgccggggggcgtgcggtaacgcggcggcggcggcggcggcgacggcggctgggcctcaagcgcctgcagcccacctcccggaggcgggctcccggcgcgaggacggacgagaagatggaggagctggtggtggaagtgcggggctccaatggcgctttctacaaggtaaccggctaccggacaggcccggtcctcggcctccctccctccctcgtgtccagggtggcgggcgggcccctcgggcgcggcgggagcggcgggctgtgggatgtgagggagcggcggagtcggggcctagagcccgcctcagcgttccgactcccgcctgaggccccggcgcctggcggaacgcgcgggttgccgagggcggttgagcggccgagtttgtcagcgaagcgggaatgcgaggacaggggatccgatcggccatggggccggtgccgcgggaagtggcggcagcggcttagtccagctttcccaaataatcctctcccagtgggttcggggcctgacacgcggggagccgtgcgggaaccgggggcgcttcagcccggccgccgccagccctgctggacgaacggccgttacgaggcttgggcggccgttaggaggtttgggctccgcgttcggcccacagtccagactttggagagctccccggttctgggcgaggggtgtgcagggagtagtaagaagcgggcggcagctcggaatcacaatggcaactgctcttgagtggcctctttgtgaatttccaaggagggttttagatctaaaagtttcggaaagaccatgacatctgagagagcggtttcaaacgctagccagagccggtatatccacggcctccgaggctctttctaactgggagcaattcagggataagcatgtcgcggcttctaaaaatattaccaagtctgcttattttaaatttccctttgtgtttaagttctcgaggacccgaatttgtgccacagaacttcaggaaattaacggggactgtacgattgctactgaatttttaccaggacggtttggaatgtttgttctgtgcgctgaagtgcataaacttgagtatattcgctttgagttttgcggtgttacagtgagctatatttgaggttttaaatgggcattcatggaactactgagagtttttttataccattgaatatcaagtaacatcgtatatttttcaaggaactttaaacttaagtattgtgtgatttttttttgatactgcataaatgtagatctagcaatattataaattctccttttgtgaatgtttataagctctctaaggccccacctcactagaatattttagtaacagaaggtgcacgtggaaggaagcatggaaaatagcttttgccattgtccaatagttttaagtttattatagaataacttggacatttcaagtgggacatactaagctaaactcgggaaagtgactttagtaaattatgcttttgccaagtttatggagacatttagtggaagataaaattctcgaatcaaggaaatttgtaaaatactaatttatactaaaaatacccttttgttgtaatataggagacagaaagaacacaacatttatgttactaattttaccagtgcagttatttttcaatttgctgtaataaaaaaaatgttccggttagttttggttagtttgcattagaaggtttctaggttctagaatgacagttttagttgctagagttggggcactgagacacagatgagcaagggataatagttaagtagtatttttgttcatctctaataacagcttagatttgagtccgctgttagtggcttttaatgaagttggcttgccattgagggcaagtaccacatcctactcttgaaggatttattggccccagtaattttccttgaaaactgactggaatatatttttttaaagtgctctgtttccactattaatccccttgctttttttcttggctttgtattccaacaacttcttgatttgaaggtgaacaaaaaaggaataggttatgaattatcctttgattccctgaggggacatgtagtgctttttaaaaatgtatattgaaaaattgctattgtgtttaagtttggttttggtgttgtttgtttgtttgtttcaactggtctatataaagggaagggtactgactatcctgaaagaggttcaaattttacaacacttagaatattgactgtgaacaggaaaaataaagtggaagcatgctgagtcgttttctggtgaaattgattacaaaaaatgagaggtaaagaccattatggaaaaactggggtccttgttcattaaattggtagaaataaaaatttaaagtgaagtaagtcaaattcaatataattgaattcagtctttgatttgcttactagaactactgtattgtgaaggatagttgtacatctcctgagaacattaagttagcagaataactatatagaacacatattagcagtgatttgattctttctctgaggatcactaaaatgaagatttcaaaatcacaaatcatgctactagcatgataacagccaaccagttctaatttggatctttttcttttggtgtttaatttttaaaactattaggtttatttgtgactatgtgagggtgagtggatgcttatttgcatcccatgccacacttgtcaagaggacagatttcaggagttgtctgtctccaccatgtggctactggggatggatctcaggtctgcaagcctttacctgctgagccatctcaagatgtggctcttttttggtgtttattttttaagatttgaccctgcgtggtggtgcaaaccgggagtggtggtgcacgcctttaatcccagcactcgggaggcagaggcaggcggatttctgagttcgaggccagcctggtctacaaagtgagtgccaggacagccagggctacacagagaaaccctgtctcgaaaaacaaaaacaaacaaacaaaaaaagatttgaaacttagactcagcactcaccagaatttctagttttaagctttgtttttttctttaacctggaaaaagttggtcacacgtactagtttttaagcccttcagacatgttatatttaaaatctgaagaaactttgatttgtatctcacatgatctttaaaaagccagtaatgttgcaaaacactgctatacatctttattcaaggtgcatctgccccatgtagtttttttgtgtattacagtttgggtatgttgagaatgataatgcattaaattcattttgatatagaatgtatgctgttcagatgtgagaatactacatatgcaaagatttctaggttttatattctagtatcaaaattagtaaaccatattagagacgtatacaaaacgtttaaatttcaaactataatggctaatatctaattattatgtgtaatgatgcaaattcacaaatatattatcatcttaattttaagctcagcatctgagaatagactcccactagctgaatattgttgccatatatagtggtttattaatacacaataatatacagtcaagacattttttaatgccaggtttggtagatctcacctataatcctagcacctgggaggcagagactaatggatttctgagttccatgccagacagggctacatagtgaaaccctactttgggggtgggggcttacaaagtatttagtacccaacctatatatcattttagctacattggcttgtagaagtaaatgttttaccataaactttcacaggtttagaaatttataagcctacataaaatttaaatgaactcacattcatagttttctctgaaatccagcaatcttgaagtatgagtgttaatttacatgttaaagagatgaattatgtaaattaccatattttagcctcccaaatcaaagcaccctttgtaagatttagtgtctttgtgaatgtaacaccccaccttagaaatgtgcaattccagttctatactcatgtattctgataacctcaaaattactaattttgtgcaaaattttgtgcagtgtagtacttgggagttcagattctggcctgctctgggagatgtttgggatcatggttatggtaatagttaccaagtggggagtcttaggcactactttgcctctattaacttcctcccactgttttaatttatataagggatatagatatatagggagatgaaataaataattactaatgtttgtcagggtgctaaaagttttggatctgggatttgaaatcagacttgataatgaaatgataaaatttagcttgaagaagtaaagtagattacatttgttgctcacttttcaatttcattataatctttgctcatatttgtacagtgacattgccttagcatcccataactacaattgttgtataatcttttttaactgtagacacaaagatgtcagtaatctccagtttatgtatccatattctttttttattaaccttctggcttgaaatattttcccataaattcttagtaaggaaagataaggttactctgctgtaaagcttgcttttgttagttaccctaggagcttactaaacctgaaaaactgtaacttatatgaacagtatataaacatcaggaaaacaagtcagtggatgctgttttctttgtacctgttgtctttagttagagtgaatcatttttcttagaatttatggaagaactgttgttgttttacaaagtggggagaataaagattcaatgtatatatgaagccttgggtttgaattatacatcttatatggccctataatttatctctaggaggaaagtttttacttattttatgtgtatgagtgttttacctacatgtatgtctgtgcaccaaggaagtgatagaaaagggtatcagatctccttgggatacagatggttgtgagctggaatgtaggtactaggttttctaacccctagtttgatatcttaaaacttaagatatgtgaagaagtcatgataggggaataaaagtttacccaaataggactggactctttgtcctttgtgtactgctttaataaagcagtgtttgcattagatagttttggtttttatatatcctcaggactatgacttggtccaattgtaattaaatgaagggatgctatgatgacttaaaacttctgtttttcccctggtgaacaaccttagtgtgttttggtcactgcttttttttttttttttgcttttttttttaatcacttctttcaaaccctaaagctttttttttttcctttctagagtgaaagtaaccattattatttagtaattttgtaggactatccctttcttgttctatcttactttttaagcctttatttgaccattaagactttcatttactttcctaaatagcagtctttggatctgtcatgattatgagtgggtaagtctcttctctccttaggaaaacattagcactattgagtgactgacatcctgtggagaactgtaatctttagtcatgcccttaagaacttctggtttgatagccccattaaagccttttttaaagtatagagggagtacttaacattctgaaatgcaaaggcatttatagttctgtatcttttatgaaaattacatatgtatatttacgttacaactttaaaaggctagtctctaggtccttagtttaaaaatgaggaggaatctgaggttcccaaatcctgcagctattatatgatagagccaagattttagagcctatatttaattcataacaaaactcaacctctaagttctctgatcccattaatagccctacatgtcagatccagtgaagctctttgggcattcatctaatctgcctttgaatatatcacagaaatcttctcagcctgttgtttttacatcaacttagcatgataggaaagaattacagcaaaatgaggtttttcaagttggtaggtgaggtgctagctctctagaggaaccttgtgaatgagttaagagagagtcggagagtttttaaaaagcattattggaaaaagtatgatgagaacacatagaaagatatgaaacctgtggggaaggtttactaaaagactttagaactgacaggatgtcttgtcctatccttagtatgtgtgcggggcagagtccacagatgagattcttttatttacttagtaaagcagtaaccagaaggtattaaatgcattctatatcagttactatgcaaacagtgactaaaatgactgattttgaaacaatcatgcaaatatctatacatagataagcctcattaactcagaggcagtggctctgttggatgtgatgattactcaaactatttctgacacttttcatccaaaattatattctaggactgtgaaaacatttctttttgcctcttattttttggctgttttgctttctgtctctgtctctctctctctctctctctttataccatttacagctctcctttgaaagggaacacttcatttttaagaaataggcaaatgtattgaatgcatatgattaagctagataataattcaggcaagtagggggaaataagaatacagctataaagtcataagactaaggctgatttttatggttagtttgaaaactcttaatgttgtaaatgttttaaatcaataggatatgctacaaaccccactgatctacccatagttcttgatccctcaaaatgtggaaggtgaatgggtgactgaatttaattgtagttaattttaatgtaaatagccataggtcacttctggttaccacagacaatgcaaacagcaaagaccagctttggaaagactttgctttacaaaggacaattttctacccagctgtaccaaagttcagtttgctgactaaagagtttaactttttcagcatataatgtactataaagaactagtgctgtgctcttatgctcttgcctcttttttgcctctttcccccttgctccccaacccctccccccctccacatggccagggcctgcctctgcttctctcctctctgcctttctctgcctctatcaccctcttaactcccctccccataccctaaataaactctatactaaaaaaaaaaaaaaaaaaaaaaaaggaaagaagaactagtgctgttatgtatgttgttgtgctgctgccaaggcatacaaacatcatacaactttcaaagaggatgaagacagaagtagttaccttttccttttcttagtcttgattttagttggcagtctaataatctcccccagaaatacattattaacttggtattagctactgtctgaggacaaagaacaccttccccttctccataaatttgttttatagtatataaaaccaagatcctgagtgaacagttctcacaactttttattcaaaatcaggaatatttgttgttgaataggacaaacaatcccttagcacactggacgcatgatacatacttgcttatgaaatagggcatattctaaagtatcagaataatattaaaccagagttgttcaaatatactgtaaaatttttaatgatttaaatatatatttaaatataaataaatatttttaatgatttaaatatatctgagaaataagcaacatcaagtggatgggaaagaaaatttgggttcatcatcatttaaacctgtaaatataaagatataaatatagtacttgctccttgtactaatgacttcatagtccatattcctgctatttgtgaagtctccattgtattgttggcttcacaacatcatttaggggctccaatagggattttatccctgatacacatatcacttgcctggcctccaatatttcttttgcaatttgggtgggactttccataatttttattatacatataaaagctggtgaatcaccaaggtgtgctaccaatgccatattgctgaaatgaatcctggggaaataactttgtcactagtttgagcagagtttctctggtgctgctgccttctcaaaggaacatttattgcttgagttgtagagataagagatattcatccaaacagacacacccctaacacatgcacacatatatacatcatgggtttaaaattctattctttgttctgtctcagctttcttattgttttgttttgtttttttttgaaacaatctcaagctgttttttgttgtctgtttttactcttgcttctccatcctccaactagttgttggctagttcatccttacactttaagggtcagtagaaacttcacctttccagtatgtcttcccttttcaaagtaacagcactaccaaaaaaccagaccttacaccaggtctagaagagaagcatcttaggcagcagtccacttagtagatgttcattgaattcattctaagtatttccaagataatcatgcatatactatatttaacttagttgtagtttctacctgaattgaaacctaaaaagcaaatagaagatagttaagtgaaaagagggaaaggacaatagagcacttatggataagttacaggcttatctttactgctaggcatgtggttctagaataagtttcttaatttttaataatgtagcttaaagcgtacctcttacttcatattcaacactgaattttaatggccagtgtaactatctctttgagatgttaaactcttaagataattttttcttatttagtattgtaattatttgtattcttaaagcctaatatatagtacctagcaaaatagatatggtgaagaagggggcattagaaacggattttcaatcaaagatccattttattctctttttttttccattttttattaggtatttagctcatttacatttccaatgctataccaaaagttccccatacccacccacccccactcccctacccacccactccccctttttggccctggcgttcccctgtactggggcatataaagtttgcgtgtccaacgggccatcttttgatacatatgcagctagagtcaagagctccggggtactggttagttcatattgttgttccacctatagggttgcagatccctttagctccttgggtactttctctaggtcctccattgggaaccctgtgatccatccaatagctgactgtgagcatccacttctgtgtttgctaggtcccgtcatagtctcacaagagacagctacatctgggtcctttcagtaaaatcttgctagtgtatgcaatggtgtcagcgtttggatgctgattatggggtggatccctggatatggcagtctctacatggtccatcctttcatctcagctccaaactttgtctctgtaactccttccatgggtgttttgttcccacttctaaggaggggcatagtgtccacacttcagtcttcatttttcttgagttccatgtgtttaggaaattgtatcttatatcttgggtatcctaggatttgggctaatatccacttatcagtgagtacatattgtgtgagttccttaaattcttaaatatctctaaaatttaatttcattggtcttcaagcttaaaagttaatttgttgtggttttttcttgcaggcatttgtaaaagatgtccatgaagattctataacagttgcttttgaaaacaagtaagtttcttactatataatcttaatgttgaagatttttaatgttttatgctcatttttttcttcattttttaaattgaagtctgattttagtgggtttttttttcctattatgaaacaaagttcccagagagctcaggattaaatcaatggaaggccctcttttgctaatgattgaccttagaggtccttactatataatcttgatccttaagtccatttgattatgaaaacaaaagatccattcgtctcaatgaactaaaagttttaaatagtttgtaattttattaaaagttgaaaatatgggaatttatggatgtttacaataaaaatgattataggtttttatactgatttttaattatatggtttattttatcagaagaaattatgtgtcctcattaggttatttttatttttttcatatatttttaatcaataattatgacagttaatctttactgctttttgttctagatcataaaacagtacttaaatatctagaaatatgagctgtatgaaaaagtcaatagtatagatattatcatttcattgggggaaaaattctagtcactaaattcattaagtattaataaagaccattttcaggtagccatttgagactctgaagtacatatgtttagtattggtattaggatttttactaaactttggtaagtgacagttacaacatttagtttttctctaccataataatagtacatccaaggcagtctgaaaatctgtagattaaaaaaaagtagtatagtgattgcttagacttgttaggaatgtgtaagaaaggttataactaaagcataaaatacttcctgttgtggagataaaaacatactataattcactaacaataattgtatattatatgacaacacactatacactattgaatttgtgaattatgtggtttattaattatatcttagtaaatttcccaaactgcagtctgtggcacagagttactaaggactaaaaacaaataccttggttctaaaatattaagaatagacctgcaattcactgtctagaaaaatctaaagttagaccgtaagcttagattctttaagctatcaataagacaaagtagtaacctttgatgcctgatacacatttagaaagatacagatgaaagtactaacagaatattaagccctcttccatgctccagactaataatgttagtttacaagtttaaataatagaatatctttacctgaatgtataaagacaaaagttccataattgcctttttacatcattaaacaatagacaactataatatcgcgtctctatttaaggtctcatgggtaactaaggggataatcttttttgtatttaaactattatttttactttaattatgtttctgaatgtatatctttgtatggtatgtgcaacaagagtgcagatgttaatggaggctagaagcatcaactctggagctggagttagagtcagttataagttgcccaacaaggaggctaagaacaaattaaggttcgctgtaggcgttatttaatggctaagccatgcttctagcttcgttgcaattatacttttatctttttatttccttcactagtaaaacactgtttttaaaaatggccatttgattctctactcgtagttctgaactgtaaactcttaagcagaatctttgttcgttttgtgtttcctcttttggcttccactaaaaaggggggtaaaggaagagaaagattcatcaggaatactgaaagaaaacacagtatttcatagaataggatcttttcatttagaaagaatagcttagttagggtgcttagtttttaacctgtatttaacgtcttcaaatctgtacgattaaagagttaaagacattgttacttctttggaaccaagaaatgtatattttgcattgtatgtctcacaagtgaaacgtaactgacagttcataacatgttaaaggtcactaattatcagtgggtataaaaaagctattctgctgtattttaattatacccttttcaactgtattcataagtaatggggggagtcagtgtaatctcatcattcaacagatttctacaaattctgacttatttgtcctcttgtgcagtagttctttgtaaacagaaagaaaaaaaagagacaaataagtattcctcaaggttgttttattaaaatgtcctctatcaaaatataggcattttatgaagctaaaaaggttactcagcagttaaggatacttgttgttcttacaaaggactaatattcagttctcggcacctgaaactttaattccaggctatctgaatctctcttctggcctctgtccatgcacattcttagacacacaggcatagaagtttttacacagaacagaactgttttcttaatggaaaaagtgactgctctaaatgattgaatcactagtgttcttataaaattttgttacttagtatttgttatatctttgtaagtaaaaaaatggtgttttaaaactattcaatattttaaattaagaaattaggcaatttaattgaactcctgtaggctgtctccattgggtttctatggtttaggagaccccccacacacacaccaatccagtccatgctgatacatcggtagatcagcatccagctacctatggcaagaattgactacttcgtgggatctaaaatttaagggggacaagtgagttgagaattgctaatgtgctgactgccattttgctttggaaagtagaggatagttattgtggttgatggaatgtagtcagaattactttgcaagtagaactatgttgatgataatactaacaattgtcaatactaatttaagcatcaaaggaatttctgttgtagacttgggtttctaaagtgtgagttaaaattattagaagaaaaaccttttaagtaatagttttgatctgttgtctttagaaaaactgtgtggaaacctaggttgctatgctgcatgtagacttcgttaaaatgtctgtgcactgccattatgcaccactcagcaaaaactggccatttgaaggcatttgcttctttaaaccaagaaagagtcacatttaaccaaagttgattgcagcatgctcactatttgcattaaacaccaaaagcttgtcaaataatgatattttgtttatttgcagctggcaaccagagagacagattccattccatgatgtgagattcccaccacctgtaggttataataaagatataaacgaaagtgatgaagttgaggtgagttcccaagccataaaataaccagcgactaagggcatgtgtgtaattttctttgacttttaaaatataccttgcttttaacagtatttaaactaccttgagttaaagttaaaatcccttttagttaattatttgaaatgttatatggttacttatatttggctattcagccacactcaggaaatatcttgtcccaagtttctttaccccattagcatatccttgcctcatctctaaatctttgtgtaggtaatacttttgttagaaagagtcattaagtgagcccatgaaatgcgactcaggttgctgtctgcagaccagagcacttctagtttttctccgctgtttctgctcagagttctgcaacttctgcaatctctagtgctgtctgctttcagggaaagggcgcctagttacaggtcatgtgacttacacatgttgggagaagactgtgctatcaagagtctccagcccacttctcgtgtgtgcgtgcgtgcgtgcatctgtgtgtctgtgtatgtgttctgggcactgaggattgagctagggcttcattcatagatgctgtacacgtgctccctaatgaaccacaccccagcctcacattgacaaggaaatgcagcattgagtgtggggtgaaggtggggtacacagagcagataaacatgattgacctgcctcctcctacagcgggaggcagatctgtcagcaggcagcttttacatcctgtagtgcctgacagcaccagttccaaatattggtatcaacagctcctcccacatcttcgtggtacctcaatccttaaataaaagccattgctgatattaatgccagtagtcccctccccgaaactcacagtgcctcgaaatccttaaataaaagccgtggttgatcatcaaaaaaaaaaaaaatttgttgctattctattcactttttcagcaaaatgaatttggaaaaatagttttacaaaggaaagtaatagttctaacaaagcatgaatatgatattatatgcctatgatcttaaccgttaggaggtggaggttagaggatcaggatttcagagtttatcattggctacatagcaagttagaggccagttcttcatacatgagagccttaactctaaaagaatttttttaagaattctagagccagtgtggtggcatatggcctttaaatccagcactcaggaaacaggcatgtggacctcatgagttcgaggcccaccaagtctatggtactgagttctaggacaaccaagtctacataaagagaccttgtttcaaaaaaaaacaaacaaaaaataattttatataatagactagtaatataaaatttattttagtagtagtgaatctttctgatatatatttttcaaatctgtatcttttatatcatatatagatagatagatagatagatatatacatatatctatctatatatacatatacatatatatatatatatacatatatatacatacatatatatatatatatatacatatatatacatatacacacacacacacatatatatatatcccaaatgtcctttaataggccatactatgaactacatgctcatctaccattgagctcttagaataaaaggtgctgttgaaatttgatcaaaatcattgtatttatgattctctactcattgaaaattggttttctattataatcttatttatcttacaattttgtagtctcttttacctcctacttcccaagccttattttgaggtctttttaaaaatgcattaatttttatagtttcatgcatgtttgtagtataaagcaaataaataggtacttgttaagaggtaagcaacgtgaagttaggtccttaaatgttaattttctgctcaggctatcaggtacatcaatacagtcttcctttgatgaggttacattctagctggaatagctaatgtcatgacaggtgaaagttatatgaaggaagagaaagctaaatggaagataatacaggggcagcaatgctatttcagagtctagttggaggtctctgaatgttcaaacctatgttcttttctctgcaatttaaatgaggaataacatacttataataaatacttataataaatacttataatataaatacttataataataatataaataataatataatatattatatataaataatatataatattaatatataatatattatataatatataataataaataacataaataaatacttataataaataataattaataaataataaagcctaaaactgtacttagtgtattctggatttggctttgcaagagatcttaattgtaaatacagatgttatctaaacctctacaggcctttaagctcagtagataacatgtacttgttcccagggctgactatatgagttagatccccagtcctggcatggtagaaggagagacacagacacatgggggattgtcctctgacctccaattgtacacctataacattaccaagtgaatgtatgtgtttgttctctttcaaaaaccctctggtatctccttccctgtgggcttcttgctgtgttaaagcaaaggccagtttatgtgtatgtttttatggcaagactttggaggggtaaagaaaaccattttgtttttttcaacttagttgcatgacagttgaagcccaatgagatgcatcataaaacttacctcagaagctagtgagatggcacagcagatcatggcaacttaggttctattaatatttatttgttattgtcttcacaaaagattgcatgctacacattgcaaatgaacttgaaaggtttcctaagagataattattagagctgtgtatgaaagccagaaaagtgatattcagaagattgctggaatagatttgtcttttttcatggagaggaggagccagaaaagcagagtagccttcaaaagagatgaaggccaggaccctagtaagctgagtgatcagtgaactcactaacctatctgcttagagtacaggtagttattgcctttgtctgtaactttggattggttttccttgttataataaaaatgatgcttacatggtttcagatacatttttgtagattattgaatagctacagaagaaaatctagtcatgctatggatatcagcttttctcaagtgttcatgtcaagagtactaaatattactgacatagatcagagaagtaaacaaagtgcttttaaccgtgagttctcaagttgtttccaattatgtatttttgtctaagccaacataaatgtaaagtttggttgaaatcatatggtatatgatttcaaagataaatatggactttttaagatttcctcactgtctagtgtctgctgcttttgaattatgttaatcataaatattctgttttataatttttatgtaggtttattccagagcaaatgaaaaagagccttgctgttggtggttagctaaagtgaggatgataaagggtgaggtaggaaaatgcatattgttcatactatttacattttctaagcccacattttaattttggtgtctatttttaataactgcctaactttaagtcattttataaaaatgttttcaatataggtttactatatgcttgctatatgtttctattgattaaagtttccccctccccaagagtttatattttaaaatgataggagctgggcatggtgatccattcccttaatcccagcactaagtggctgaatcacaaagatcagggttaaaagtcatccgtggctatagagtaagtactaggctagtctgggctattatgagttcctttctcaaaacaatagtcaaagttatgtaggtttcccttcttttaaaaatatggctaagaatgacttgtttatttctctcagttttatgtgatagaatatgcagcatgtgatgctacgtataatgaaattgtcacaattgagcgtctacgatctgttaatcccaacaaacctgctacaaaagatactttccataagatcaagctggaggtgccagaagatttacgacaaatgtaagttgatacattaaaaaaatgctatatcagaagggcagtggtggtgcatgcctttaatcccagcacttgggaggcaggggcaggtggatttctgagttcgaggccagcctggtctacagagtgagttccaggacagccagggctatacagagaaaccctgtcttgaaaaaaaaaaaccaaaagaaaaaatgctatatgaaaaaatgctgggaacatgcaagggtgtgtagttttacaaatatacattttatatacacatacatatgtgtatataaattaaaatattatatataggttactgcatatataaattaagatgttatatccaggttactaattcagaatgtaaattttaaaatgatatgttttgtatctttgtcaaaagtagtttggttacagtagtgaaggaaaaaaattttttttcctagttatataatcaagcaagtcctgtatttgtttaaacttacttgatatatggctaaagtgtgtaaatctacactgagttctctaaacaaagattttttttttcataagctttgaagattttgaaaatgatagaattctatcaaaagtcacattgttcatattgttgttccacctatagggttgcagaccccctcagctccttgggtacttactctagctcctccattggaggccctgtgttccatccaatagctgactgtgagcgtccacttctgtatttgccaggcagtggcatagcctcacatgagacacctatagcacggttctttcagcaaaatcttgctggcgtatgcaatggtgtcagcgtttggaggctgattatgggatggatccccaggcagggtagtgtctctagctgcatatgtagcagaagatggcctagttggccatcattgggaaaagaggcccctgggtcttgcaaactttatatgccccagtacaggggaacgccagggccaagaagtgggagtgggtaggtagggaagcagggtagagggaggatatagggaactttcgggatggcatttgaaatgtaaataaagaaaatatctaatacaaatgataaaaggttttttaaaaggtaaaaataaataaatagaaagtcacattgtacactacaaaattttctcctgatgctttcccttttagagaaaatattttcagataaaatacatactaagttaaagctaaagaggcttggaaaagccctgtttctaatcttttatctagaatgatgttaaacaattcagagaagagattaatttttaaaggtacaataagtctgatgtggactactaccctagataaaagtcatattatagttcagaatacatagaaattctatttttaagtctagagatgatgtatgcaagtaatttttatgttttcatctttatttcaacagatgtaactgttcttcttcaagagagaaaggagaggattaagatacccatagcttatctccataatttttcagtttgctcacagaaaatattgacttatgtaaagaaaatcaagaattatacagaaaaaaaagtggttcctataaatgtggcttcttcaacaatctaaccctaatagcaattccttaagagcataactgtttagccagatgtggtacatgtctgttgtctcagtacttgggaggtagaggccagcctaagttgtgtaattgagtttaagactaacctaggataacaccatgcatgtgcatacacagaaacacatgggtaaataaatgcttaaaataatagctaaaagggcacaggagatgggggtcatatagatgcagtgctcaagaataaaattttccaaaaaaataaaatatgttttaattagctgcttttttaccctttattgtgtcaaatgtttgctttatttcacaggtgtacagtaaaagtacataacttgtaaatagaactagcatttacataaaagaaatttagtataaatccttggtttttagtataattttatctgcatatatttgtgctagtgattggtgatcattcatgttaatgatgaatatgttttatttctaggtgtgccaaagaatcagcacataaggattttaaaaaggcagttggtgccttctctgtaacttatgatccagaaaattatcagctggtaattttggtgagtgttttttaattgtctagtttggtttatttcctctggggcatttgctttggtaacaatattgttaactttaaatcactcagtccatcaatgaagtcacctcaaagcgagcccacatgttgattgacatgcactttcgaagtctgcgcaccaagttgtctcttatactgagaaatgaagaagccagtaaacaactggaggtatgttcctttccctagcactgttggtaaggctgtccagaaataactactgtatggttctcaaattcaagtatggacagcttgttttattatttcctatttcctctagtttggaaatttaaattgtacaaaatataagcatactaaaattttcatgcctgaaattacacaacagtcatatattttaaggaaattttagacatttcatttttaccaaaagtttgtcaaagctgctataaagtgagacaatgcttcttctatgtaacatgttatcattaaagtactagagaatatttaaatatctaatcttattcctttcattatgtatgtttatctctgtttaaaagggtatagaacttcttcattctaattggttgtcactctttaaaactcctgtcttcagattcctgccagaggctatttccctaacttactatttcgtctcttaaggtgcattttatctacttttattaattctccaataattgccatcaccatgcatttattttcattgataactatctagtacttccattcattaccatagaaactaaatggagtttgttttaatgtaccaactcaagtagattactgtcaatttaaagagtctccctcatcattattcatttcgttagggagaatcatcagttgatatagcaaaagaaaaggggagtttcaaattgtagtttaagaaaaaaggtagtcaaggctatgaaaattgccaattaccaactttgtgtatgaatgatgaactcttaacagaaaaggaaaaatttacttttgtttgccaaatggctgttgaggtctgtttgattagttttttttctctcattctttattgatgtcccccatgttcacacttttgtggtttagcgattttctcataacttttaggccacagcagccttcttaatttcattgtgagtattatgaacgtgtactcatatatctcttcttaagcatctaattcttcttgaatgttctttaccatacctttggtttacatgtatccataaattatcaatgggaaaaatgaaccagggtaatcacgatccaaaaacgtgacttcttggaaaatcttcgaagattttatatactttactaccattacctttgaaaacaactattgttcttttaaaattgcttacattagatatatttattcattcaaattatctggtgtgttgaataatgataaactatgtgcatgcctattttcttcactactaatattaaagaggttcataaacccttttaagaaatacccattttcaacatgagccactaatctgtttggttttcattaatggcatgctagaactaaacattcagttttgatatgctttttaaagacagtgattatccacataatatggggtatcattggaacatagttttgtcattgctgaatattttaaagagttcatcaagcttttgtggattcagatcacaaagtctaacagactctgaatataaaagtaatataaaattgatatttctgtattctacgagtgttcactttactgttaaaccacagagttttagggatttttttccctgggtttgaggagagagggtgttgtcttaatgtcacatttcagctgaaggatgtttagatccaccatacctggttatatattatgaaaatggcaccatttctagaaaaagtacttatatatccataataagtgcagtgaatatttttttattaaagataccatttttaattgttgcttaaattgaattgagtctgtcagacctagtgagctgttcttaattgggaatattttgtctgcttcttaattattacattgtggatatcattgaataacaaaggcagccttgcaaataggtttgcaaacataaccttgaaaaactgtcaataaactttttcctgttaacaaaaaaaatgttttaaatggcatagaccttcattagcctcaaaagaacttgtgtgattctaaaattagtttttctactatgataatttataggaccctgatatatagggtcaagataatttacatggctgacctaaatgaaattgtcttaataattgataaaacatgttaatcagttgtgcatttctcttcagagttcaaggcagcttgcctcaagatttcatgaacagtttatcgtacgagaagatctgatgggtttagctattggtactcatggtgctaatattcagcaagctagaaaagtgcctggcgtcactgctattgatttagatgaggatacctgcacatttcatatttatggagaggtaaatatttcaccatataatccaacttccccctcatagaaacaaacaaatagtatttcaaatgccaaatcttttgctttgatattacacccactcaaccttctttattaggatcaagatgcagtgaaaaaggctagaagctttctggaatttgctgaagatgtcatacaggttccacgaaacttagtaggtaagtaaaaaataactttatatataccacaaaaaataaaatcctagtacacaacttctatactagttaaacctcgtttcatcactgaaagtgtaatctgattaagtcaatctttgagatgtagcctgttcttacagtgtatagaaaataatactcaaagattatattttcagaagatatacaagaaatagttcagacttatatgtctgaaaggataatttttacctagcctcctcaaggtatttttttaatcatagcattagatttttttctaaaatgactaaaaatttaagcttttatagtttggtgatatttgagaaaatgatagcattcatgtcagttatctctgggttcaaaatctggatatgtctagcatagacatagtttgaaagataaattcacaccaactgtctttggattttatggagtcagtagtagctccttataaattgataaatactgtttcctaatcatcactgtgatggctgttagcataggaacttttcactagtattcccaaattattcagttgtctttagtagaacaaactaaaaccaggtatgggtttattttttaaaatgtgttttgagctgggcatggtggcgcacacctttaatcccagcacttgggaggcagaggaaggcgaatttttgagttcaaggctagcctggtctacagaatgagttctaagaaaaccagggctacacagagaaaccctgtctaaaaaaaaaaaaaaatgtggtttgaatttataaataaatttggggcatattgcttcttaatcctcttgtagaagtataaagtgaacaaacttcctgtgtagtttatgtatatagcttaaaacattcataggctacattttgtcaaaatagaatagtaatcatcttacagtgtcatttaaaattactagcaatagcccagcattcaggagacaggcacaaagatcacaaatttaaggatagtatggggtagggatagcaagatcctgactccaaaatagtgtccaagagtcatggtattttttaccattaattaaaaaaaaacttgaaggtaaagaacaaatgctaatgaaattagtttacatgtatgctgcaacacaagaatgtgaatgtagtgttaccaacacacataccagttgtatagaagatacatgcatagcacaggatgaactaatgattatgatagaaccatggtatccattaaattttgatagtgctatagtaggtgaaaatatttacacatatttgataccattgtgactttgggtgactgacttagctcttgagagaatgcttttccttcacttaacatgatatcaacgtggtattcaaggtctagatgcttaatgaggtgttgttatgtgtagtacttagcacagttctgggtacagaaggaaactccatgttctcttttgtttattcataacttcttcatttcattacagcagatttatagtaaattctgttggaatttggaagtaactgcaatatacaagtaaactagattcaattagattaccaaagaagaaagagattatacctatagtcttgcattaggtgtagaggatgtttaaagttggtttgcaccaaaaaaaaacctattgcagaattgagttttctttacgtttatacttagtaaaacaagagaattctggtttgatgaggaatgctgcaacactaggaatactgggcttcttcagaaatcagtttttgttagttcggtttgctgggcaggtttcagggtgacgtcttaatcactattacttgagtctcatctactgattgattacctatttttcacaagccttcttcagtatgcacaccaatttatcttgcctaaaagtttgtgtgttctatctaaactttgacagtgagtttgtttagacgaagtacttagttatttcttaatagaaacatgctaaagtcctacttttctttatgctaatttgcatctttattaaaatcaactttcatggttatgtaaggattttacagaaaaaaaaaaaaaaacaaactctgagaatactccaggtagggatttttgtacgttcttcatttcatttgaagaagaatagaacagacataatgagatttttagattagaaatcctggtttagtggcatgagttttgttttctaccactgaccaaagagctcaaggtggaagagtatgaaagccacacacagcaataatgtcaaaactgtggctctgattataagaactatgagtccttctgcaagaccttttgctagtttgttatttaaagtagctaggaagcaacttctctcttttcatcaatttgcctgcgctgaggaggcaaaatgagcatatagaagcatttcacccatggcttatctaagtgcttaagtccccctagaatctggtttgcctcatgtgtaggtttctagaattagtagtgcttaatttgtaaattcttgctttacactcatgtatgatagtggctatgaaagcagccatgtcctagttttatatataattgaattttgcacagtggggcaaacaattgctatttagaactactactagatttttctgaatttcaacagatgttactaaagaatacgtataagccttttcatggtagttttggagttatctgaaagtgtgctttacctatgaatatgtatgctactctacattgtgaccaatgcatagaactaatattctgttattaacattggcttgaagaatttttgttccttttagatatttagatagctttctaagctcctgaaacttaagagcatattttcaaatgtgtcatacataattctaaaaatagttcctatgtatatatgaggaaatgtgaatcaaagctagatgagaattgaaattgtcaagtaagcaaatacatttattatccttcttttccttaattccttttgtagagctttacagagtgctaaataccacagtaccagttagtttaaagtatacggtcttatgtgagataaggggttctctttgagttacctttaaattttcagaattacccaatcagttcacaagtattaatcagctgtagtatctgaccaaatgagtttaaaaatgacctaatcaacgagaataatttataattaaactatttttttaaaaagcttctgttttgaatcttataatccagtatgtatatgtatttgaatgtgtaagatagtttatagtggagtgtgcttgtacgatttgagtgatgtcctcgagtcaaacatgaattatttattttaggcaaagtaataggaaaaaatggaaagctgattcaagagatcgtggacaagtcaggagttgtgagggtgaggattgaggctgaaaatgagaaaagtgtcccacaagaagaggtatgtaatagtgcttatttttctggttttgtctaagagaaagagttttgtttgtcttgttttatttttttaatgtattaatacagaggctcctgtattacatgcatataatattttttttctttttgtggtactcagaatcaaatccaggactttgataattgttctgactattggacatgcttaatactatagatactagactatctgttttggtttggcttggtttttgttttttgaagacagaattcctcagtgtagccttggctatcctgaaactcactcttagaccaggctgaccttgaactcagagttctgcctgcctctgctttacaagttctgggactaaaagtgtgcaccaccacccagtgactatgttttctaatgctggactttagataagtaaatttatcctgtatttgtcttcattttgtgatcttataatgggtagtcatgagtttgctattataaggtgtatatcactggttcagccattaatgaatgacaaaaagcgtgcatagacagcctttataaatgcttttgattgagtgttaatgtggtaaagtaagttcattctgtgtgtgctttttctgcacatgatcacttcccccaacatgactttgataactctcagtcctatctacctggacatatgcttattggtgtaaccttgtaagtatttgtatggaaagtggaaagggacagtataacccttgatgcagttgtactctcaaaatgctgtccacgcacaagcttataattttcacattaattagctgtcttttgtgaaagattattttaattgatgttaaatcaatttagtgttttttttaaggtttaattcaataaagtttgtgtgtgtgagtgtttggaggggttgggagaagagctcagttgtgagctgctaagaaccaaacttggttccactgtaagaacagtacatgctcttaacctctacaaaaagccatctctctctaatccctgatttggtttttaattgcataatttttatgctctatgggagctggtgagatggttcagtggttaagagtgccgactgctcttctaaaggtcctgaattcaaaatcccagcaaccacatggtggctcacaaccatccgtaacagaatctgatgccctcttctggagtgtctgaagacagctatagtgtacttatacataattaataaataaatagtgtacttatacataattaataaataaacaaacaaaccttttaaaaaaatttatgccctgtaattttatatgtcaaaacactttatagtaatctatagtcttaaccatcattgttaatgggaaaagatgaacttcaaacattgttcctaatatgttgaattatcagatttctttataaataattaagtggatatgcttaacaaaaaatatcactgacatggtaatagaaccaagttctcataaaattggaattttttgtgttttatgtttttttatcaaggaaattatgccaccaagttccctaccttccaataattcaagggttggacctaactcctctgaagaaaagaaacatttagatacaaaggaaaacacccatttttctcaacctaacagtacaaaagtccagagggtaagaatttgtcacctctaaccacactaaaagtaatttctttgacgcagattccacatttggtatttgggctgttttttctcgttagatttgtaggctactcttactctatattttcacataggtttggtaccatatgagattacaaaacaaagtaatacatattttttcaatttattcacagtgacaaatcttaagctataaacctaatggggtcactttttttctgttgagggtggacttttttttttttcatactataactccttaaattttgcaggtgttgtaactcaaagtgtaccttctattagatgtgttagttacttcttaaagccatattttagaaactgattttcactatttgaactgacctatttagaaatgcatttagaagtcctgcagtgaaagtcctgcgttcaggcttctgtgtatcgttcattatagttaatcacatcacttgcattccttatactgctttaggtgttagtggtttcatcaattgtagcagggggaccccagaaacctgaacccaaggcttggcaggtaggaaactattccttgaaaaatacattttaagttgatattttaatgtttattccccttgttaagaaagactacaaatgagcctcatggttgggggctggtggaggagtatttgtgggtatttggatccacagccctaggctaaatctcaaacatcttcattccacttagaagttcttcccttacatgtccagtgtcattttctaccagtcttcccactgtgtcttataggaagcttgattccttctgaagttcttggaattctctaaaattgaacatactttttgctgctgctttatgtgtgggtttattctacccagactgttctttttcctgtatttgccttatcactttgaccctgttgtatgtgaagctttccttgtgtacttaccacaggtttcctacctgttccatcttcctgtgtgctcacccagagcatgtttttagatgttttcttgttggtctcttcaaccacattgtaagctccttgatgtcagggtcctttgcctggtatatgagaattgcttataataaggatggtataactcagaaaagactaaaagcaaaaatgccattttataccaagaactaaaactgcaagtgaattggacactcctttctgttggacatccctttctcatcttagaaaagagaatcactttgtcctaatattggtattctatattttcaatttattcagatcttctgattagacatttgagttgtccttgggtactctaacagtttgtaccatgttataagagaaaattggtttaaataatgttcttcaaattctacctaattaaatctacagcacaaaattaaaagcttattttggtgattacttggaaagcatgtattatttcgtgacttgatatttggcacttggaaaaagtacaattaatgcctttgtgattatgctattgagaaaaggaataatattgaaggagggcactttttatattgtagtacaaaaaagaaaatctttacaagttcttttcatcccctgatagttcagatagtcactgctactaggaagctgtgccttgcctactatatgataatcagcttacaagcaatactttctgatggttcagttttattgttcatcaacagtagcattctttacaaggatatagaaaatcctgtgtccttcccttcctttcttgaacctactgtatactgaatataaacagggaaagcatcccaacaatagctacatgttctaagaaacgttctttaggaaagagtgacactttgctcgagggacagattcttggcctcctgcatttttgccaaacacttgtaactgtaatacttattacttattagtattacagtattagtgtgtgagtaccaataatcatgtatttcttcagtagcaaaatgattgaactattctcagcttagaatgtgtcttatttatcccctctttaagctagactttcctactggttattatattgaatggtttggggttttttttcttctcttatgctgatgagaaatataaatatttagattatatctttaaaacaatccctatattaaaatgctatacatagaagatcaaagtatttcttatgattgaactttgtaagattatactatatttttgaaattttatggacttattaaatattatgcttataattttgccttggtttttgttcttctacaaactactcagtgtattttaatttaaattctcatttttgttcatgatttggattttgttgatttggttggcaaaattgaggtttttaaatttgtatcattggtatctgattttaaattgaatttgatttaggtagaacttacagtgagtgaattaaagcataactattcatcttgcttaccacagtaaagattgtataattcttagttaaatgtttgttattttgtcaacattaaacagtagtctttaaaacaatgtgatgtctaagaaatcactatattgatctgcccttggttttacatattgatttatattttaaatagatgtttgtgtgttcgccagaccttgtactagggatttagtcattaggtgtttttgtttttgttttcagatgaaccatcactagttctttaggttcactgttacaatttctttttcagggtatggtaccatttgtttttgtgggaacaaaagacagcatcgctaatgccactgttcttttggattatcacctgaactatttaaaggtgaggacaggatgacttttaacttctaatcttcttgtgctgaattattaaaaactgtatagtaaatccttccaaaactaggatccttctaagctgtgcataacagtatatgaccttgtaaaaataatagataaaatacattgtttcagtttatttcttctaaaaacttaatttttcattgtaaatcttacggctaatatcccagttctcaatacattcatatatacatatatatgtacatgtatatatatgtatatatatgtgtgtgtgtatgtatatatatttatttatttatatatagttattctgctaaacccttagattcaatttaggtaatgatgttatatatacatatatatgtgtgtatatatatgcatatatatatatatttgaaccttctagcttttatggatgttttctgatccaaattttgtgtgtacttgcctttgttgtccctcctatgttatttattaaggaaattctagcatttcatgaagtcctctttaaatatttactcttcatacttttctctatattgtgttaatcaaaatataaactacttgtgctttcttgtatatgctcatcttactgattttactgttatgcttccttagcttgcaagctgggaagtaggaacccagaggctattatattagtaaaaatagcatgggattggcaatacatctgtgaagtagctatgtgtactttttcaatttccctttggcccaaatataaaatttaatgaaatgaaatcttaattgtttttagtgttataatgtcttatttgttaaaatatatgccagaattattctataggtctttttttaaagtctacaaaataatctaagttctattttatttatgatactaacttaagaatgtgtttgctgacttaaagaataaaatgtgaatcagtcttctagtaagtaagagtgaaaggaaaaaaaacggtgcagtacctggtcattttgttcattcttaatggtggtcagttaataaataaaagtgggaaggtttcatccagcaaggtttgcatgggtaggatgccactttgatttgcttatttattttttgttggacagtgttttatgtgcaatctgttgtatgttttcctttataatcttcactagaaataattattgtgacctagatagacagagctgcattatatcatgtcccttgttctttcaattaatgctttttcttagatattttatttttctctattgaatattttgtctgttactggcagctgttctgttgccattcttatcatcaccaaatcatcttttggttgggtctagcatctcaccaaaactaagtacaatacctaagtgcaataactggaataccattctcttatgcaatttctagataacacattccattagctagaaatatacctttgcaggaagccactagtctttcctttttcctacccagtttatcacagattctggtttagagagcaagttctctgtggattctcagtctgaccgtttttcaccccccaccccatgtcagaaccaaaatttgacaactttgtttcaatgacctcttcttgattgacacactgaatatttgctgtagttacagatcttatgccctgtagctaataagtgagatgctcatggatatgctagaaaggcaaggattaacgtgaaagtttcatctggattcgacagatcccatgtttttgtacatgctatgtataagggtctatcagtggattctggagttgatatattttgttcaactcaatgtatattgtttgtaatacttgtttaagcagagttttagcattttaaaagtttttcaaggcatgatgtgagaactaggtgttttgatgtgagacctagggatttcctccccttcatataaaggaatattagcatgtttagttcattgaaaataagtgatccgtaattatatctaaaaatactacatgctctttaaaaaatataccccaagtacaatacttagtaaattagaatattaactgacaaaataatttcattgagctcatttatgtgtgatttttaaaggttagttgattaaatcttaaatgtctgtcatttatctgtatttttatactttttagtattgttttagtcaatcttatttcaaaaagtccccaaactaatgtatctctgccttatccatagactaattgaatagcagtgccaaatcactcaaatttattcaatataactttaaaactgagtgtttttgttatatttctaagtcttgacatcagtaagtgtatcaatagtaatctttctttttaaggagaccattcaatttcctaataattctgggttaacagtgtttactataaatttagaactgaagtcgaaatatttccagtatacttttttatctgatgaaaaggagaaaggtaatactaagtaaaatgtcaaattatttttactgttatcttgtatattttaaataggaagtagaccagttgcgtttggagagattacaaattgatgagcagttgcgacaaattggagctagttctagaccaccaccaaatcgtacagataaggaaaaaggctatgtgactgatgatggtcaaggaatgggtcgaggtagtagaccttacagaaatagggggcacggcagacgcggtcctggatatacttcaggtacaaactaagcattttcctcagttactttatctgttcctagacttaatagctgctaatctctaatattcattagaactccattataacaatttctcactacatgttttccaactcacagtgggtcaaattgtgtttcaagagacatgtagaataaaagcccgttaatgacacacatagttcacagggcagttgtgagttctgtccatattctaattggggataaatctgcttaagcccttatgtgttgatgacctaagacctctcctgattttattactgtatagccaaaacttttttcatttgtgtactgtggctcattttttgtcaggcatgtgctggtcatacttgctggatggactgtgtaaatcaggggtctgcatcctatggctcataagatgattttgagtggcatggccaaagtcagccataggcacagtcaagaagtaggggaagtgactctttgccttcccagcttttctatccttgctgcttctttcttttctcccagtaactttcagtgacaccagtgcccagctacgagttcctactgtctttcttgctcgactatgtatctatgtaacttgctaatgatggtataaggtgtaatccatctcacaaatatttgcatttcaaaagggaactctttaagatggaaaagccttcaagatccacaggagtgacgctataatggtgaagctataattgctcattagctccaacagaggaagagagagaggtagtagaggtgatattccagagtggggaaagacacctactcataaggccaatcttgaacctaacccttaaccctcctcctatcagtttgttcttttgaccaatgaatttccatctcactgtggagctcttccccccactcccattccctatatcattaaccccctcagatgtaaacagttgttttatagtgatcttttgtttagcccttcccactgggagtgggagggagattgtggggcatgcatcaggaatgcatatcccctttcattggggataatcccacagtagcccctcccctgagacacaacaatcatggtggcctttattggctgcttttagagttggccaaattgtacatccttctgtccctgtgtctactaaaagctctcattatagaagttttgcttatcaaagtattacattgttatagacaatttttcctctattgatcacagctatttaaaaatatggcacattcagatctgaacttagacagctaacaaaacacctttttaaaagatgtctaacaaaaattacttcaaatatggcaagccttttactttgaatttaaaacacagataagtatattctttggtaggcttctaaattgggaagaatattgaatcacccctgaaacttcatctctggaagcttctgttaaccttttttttaaagtcagacaatggtatataacttttaactctcgataggaactaattctgaagcatcaaatgcttctgaaacagaatctgaccacagagacgaactcagtgattggtcattagctccaacagaggaagagagggagagcttcctgcgcagaggagacggacggcggcgtggaggaggaggaagaggacaaggaggaagaggaagaggaggaggcttcaaaggtatagctgagaagaaaaggttaaggccagtgagatggctcaatggataaaggtactaactgccagtcttaaccctagttcaatctccaggacccacatggtaaaaggagtgaagtgactcctgctacttatctcttagcctatacatcaactatggtatatgtgcctctacaaagatatataagtggttttttgtttgtttgtttttgtgggttgttgttttgtttttttgtttttttgtttttttttgagacagggtttctctgtgtagccctggctgtcctgttactttgtagaccaggctggccttgaactcagcaatccgcctgtctctgcctccaagtgctgggattaaaggcgtgcaccaccactgcccagctgtaagtgtttttaaagagagaaagaaagattaaaagtaaactgttagctgtttgaagctgagtaaagaatcttggtgatatagtctgttttgggcttatcatcatcatagcaaatgattactttttcatttgtttgacagaatattacacagccttccttgtgattttttggaaactatgactaaatagtgataactaatttatattcttcgtagttccttaccagcatctggttgttaatccagacagattgacctgttgaatcaaccttcagaatattttgtttcttgttaccagaatagattatttacttgtacaattggaattggtaggctcttcattacattttagcttctattgttggtctgaatggggaatctgaaaagagagaattttgagcaaatgttttaagagtcactaactgttaaacatttttaaaatatacaggaaacgacgatcattcccgaacagataatcgtccacgtaatccaagagaggctaaaggaagaacagctgatggatccctgcaggtaaaacctagtttccatctaagtagtttgaatatgtgctttatttttcagcatgttcaaagatgataaattcatactatatgaaatatttttcttcagcattacagttgtagacagtctcagtcctctgtgacaaatgtacaagtatgaggatttttccagtgaatatatggttttaagtatttgtgaacactttggcagccacattgtaattctcagactcagtggtggttctcgaaccctctcaaacaaaatattctgaatgaaatgtactaagtggctcaagtcaggtaccctctccctttaactgcagagataacctgttgtccttatctgtcttgtagtcttgataagatcgggcttctggtgtccagctttccatgccctgtggatcagctatttatttatgtgcacaatctagtctgaggatccattttcaagtgagctattgtcagtgcttaaacggttgttaagtaatttcagctttactccctgaatacatccaggcatctttactaagtgcttcatgtgtattttatctcacttaatcttacaataatccactgaggcaagaagttttattatccaatttttaggtgattaagtagaagctgcagttcattgcccacagttacttacctagcatatggtagagtgatgatcattcaaactttggtatgtgatctctttcactttatctgtaatgataactctaaattttttaagcaagtaataagagttcctttctgctgggcagtggtggcgcacacctttaatcccagcacttgggaggcagaggcagttggatttctgagttcaaggccagcctggtctacaaagtgagttccaggatagccagggctatacagaaaaaccctgtcttgaaaaaccaaaaaaaaaaaaaagagctcctttctgcctataaaccaatacacacaattagctaattttaactcaaaatggtacagtagaatcttctgaatccaaaccaactctaagggagtcttaacttcatggcatggtccattctgaaggaccagacagaaaaggctaatattgtttgccattgacacttaaaatagtttataccccttagaatgttatacgttaatcttcataccttccttggatcttagttctacaaatcattgttttcagatttctcctcgtgattctgtttttcaagattcaagttagagagccatctgactcttcttactgaagtacaagttcctagactgatacaaactaaaatcaaaagtgtatgctagaacattatttggaatttcagtgtttttctgtgttttttccatgtatgtatttatgtgtatgagtatgtaggtacatcaggcattggatcctttgaaactggagttacaggtgattgtgagccaccatgtgggcacatgggaactgaacccagagcctctggaagaacaggggctctgaactgctgagccatctcaccagcccccactatttagactttgaaggagttgtaaaagaggtttctaaaggatggggtggaacttttggtatagaaaaacttactgatactataatatatgtgtatgggaactaaaggttagctcatgaatgggttagttgacttttcattcaggtgaagctatcataggaaggcatgctttttttgtctctcttggattttatagttattgctgaataagccattccttttgaaatatgttgttgtgaggtgtgctttgtgtgtgtgcatgtgtatccatatgatctgctgtatactttgcctataccttatatattttctattagccaataatagtaacttaatttgaatggcctcactgatttttgcttagaatataaaggtgacgaatacaaagtgagattttttttcttatagattgtacacagtgagatggctactgttttccagctaaataatattgttttaaaaacctaaaccaataaagaaagagcctaccatgctttaatttcttacagttctattttcatctgcatcctccttctatttttttgagacaagattccacttatgtagcactgggtagcctagaactcagatccatctgcctctgctttccccattaacatgtggcgtatgtattacaggcttaatatttcttgtgaggccatttatataggatctagtgtgtatgtatatataacaagtataacttgttttagatcacagttaactgcaataatgaaaagactgtccatactaaaccattacagagtgcctccagtgaagggagccggctgcgcacgggtaaagatcgtaaccagaagaaggaaaagccagacagcgtagatgggctgcaaccgctggtgaatggagtaccctaaataagctacataattccgaagttatatttcctctaccatttccgtaattcttactccattttagaaaactttgttaggccaaagacaaatagtaggcaagatggcacagggcatgaagtgaacacaaattctgcaaagaatttttttgatattggcaataatcaacaatcttccagatttgcacaaaaagatcttgaaatttgatgcataacttttaagtacacttaacacttcagggcaggattttacttttattttttaaaaatactaagcagtgatctttattaactaggaccattttcctgaattggactatataactcagcagtatgtttcagtctttcggagtaaatcacatttgtgataatcatactagatctctgtcttcagtctcatttaaagtcttcatgaaatgctgtgccatttcatgtcctgtgtcagtttatgttttggtccacttttccagtattttagtggaccctgaaatgtgtgtgatgtgacatttgttattttcattagcaaaaaaaagagttgtatgatctgtgccttttttatatcttggcaggtaggaatattatatttggatgcagagttcagggaagataagttggaaacactaaatgttaaagatgtagcaaaccctgtcaaacattagtactttttagaagaatgcatgctttccatatttttttccttacataaacatcagcttaggcagtataaaaaataggacttgttttttgtttttgttttgttgcactgaagtatgacaaatagtgttattggaagggatgtgtaatttttctgtatagacaggagaagaaataactatcttttcatttgggagaggctaaagatgttttcagctacttgcaaatcttcctggtcgaaagttagtaggatatgcctgctctttggcctgatgacgaatttcaactttgaaacattttcttttgtcctccccaaattttgtcaagttttttcattcatattttacattaaagcttattttggggagatatgaaggtcatcttcataaatacataacaaccctcaaaagtatataggtactttgtctgagaaacattgaaagcaggttaaatgttttgtaactttgaaatacaaagtctaatgcataagcagaaccgaaaagcagaccgacaattggttaacaaataattctttttttttcttttttgatgtgttgagtcttatttttgtggggtttttttctctctttttttttaaatgactgaaattcactgaagaaaaatatgtgaaggaccttcactctgagatgttatatttttttttaaaaataactctgagtaggggtaccactgaatctgtacagagccgtacaaaccgaagttctgcctctgatgtactttgtgaatttgtttctttgaattttcatttttcatttagttttccttgcatacaaataagcatataaaatggcaacaaactgcacatgatttcacaaatattaaaatgtcttttaaaaagtattgccaaacagtaatgttgatttctagttatttattctgggaatgtatagtatttgaaaacagaaattggtaccttgcacacatcatctgtaaactgttcagtttaaaatactgtagataattaaccaaggtagaatgaccttgtaatgtaactgctcttgggcaatattctctgtacatattagcgacaacagattggattttatgttgacatttgtttggttatagtgcaatatattttgtatgcaaacagtttcaataaagtttgatcttcctctgctaaattgatgttgatgcaatccttacaatgattgcttttaaaattttaagataggaaagaaatctatagaaagtgttctgttacaaaatgtaactgttaccattggaaatttcacatgtcaaaggaggttagccgttatttaccaactttcaagaacgtaatcttgttcaataaggtgaaatatcaatgattggtacacagtcacaatgtaccgttaaaatatgcactaagtctcttttttttacaaaggctgaattcagcaaggcgctaacttgcttaaatgtgaattactaacttctaaaactgtaatttgattcacatcttttcaaatggagttggagttgattcatattacaatatttgtgtgcaaaatgtgtatgtttttcagtttaaagtcatgtttttaaaatcttattaaagtttcaaaaatctgaagattgtttatcttatctagatgtaaatttttattaaaaagttgcacttatgaaaaagcaaaatactagtctgacagatgtttgctccggttttaaatttcgacacaaatgacaaagataatatgttggggttggaggagatatttgtcactcaaagcaaatgatcattttgcatgtttctttttgttttggtgcgtgtgtgcatgcatgcctgtgtgcatgtgtacatgcgtataacagattagaagagggagtcagatcccctgaaactagagatacgggttgctgtgagccaccatgtaggtgctagaaactgaacccaggtcttaatagaagagtagtgtgctcttagctgctgagccatccctccaggtctgtttactaagctggcttgagattcattgtatagactggtcttacctcaaacttatgacagtccttttttttttttttttccttacctcctgaatgttgggatttaatatggctgtgatcctggtttctatgcttttaaaaaacaaaagcaaaagtttgtgtgctttctaaaaagaggcgggggtcgggggtcaatttggatggatgaacaagaggtgggaaaggcctagggggaatagggaaaaccatgatcccatgctgagacataggattccggtaaactaaattatgcattcactcatgtttgtacacatatcagaaaaccctgccatttggatcacagggagagtaagcaggcctttgtagtttaaaaaggctattttttacacatttttatttcagtgtgtgtgtgtgtgtgtgtgtgtgtgtgtgtgtgtgtgtacgcgccaaagtacgcatgtagaagtcagaggatcatttttagaaattgattcttctttctgtggtgtccagggaatcaaactcaagtcctcaggcttgttggatattccttaccctctgaattcagaacaacaacaaaactaatcatttattgtttgaaatttttgcatgaatataatcatcccagattcccttccctcctactttcctgtctccctaccacttttccctccaaaggccatgtgttttataaacccactgaatgaatccatttagtattaccagtatgttcattggaatagggtcatctactggagcatgggtagcctgtcagggactgggtcccctgaagacaatttactcttcctcctccagtaaccatcagatatgggttaaacttccagcaatgctagaattttggctggtttgatactgaggccagtcctgtgcatataatcagtcaatgtgagttcacttatgtaacaaccctgtcatgtccagaaaacactccataaaaagtccttccctacctctggctcttatagtcttctgtcttgcggtagatgtgtgataccagtctcccaattagggctgtgtacttttcagtcttcactctttgcagtttggccagttttaagtctgtattgacccctgtctactatctactacaaaaggaatcctctgatgactgatgagggttgaatgtaaaacatactttaagaggccgtttaatactatgttcgtttatcagaataatagtactagatttctcgagcttgtagtctatgtagccaaaggttcttttgaaatagccatttaccaggcgcaattcttggttacttggaaagcgtaatcagatgcaggatttaagtcctagacatcttttttttcctcagtgtgtattgttggactgttaaatacttccttttttttatgccaaggagttttacattagtggcaaggtataaaagcctttaaagttttcacttgccacatgataaaacgtactaagtttcagaactgagtgtttaaaggttttgtgaccaatttctatatactagatccttgattactggagtagattgagaaatgaaacaagatttaaatatcaacaggtcattccaaggaatcctgagaattagaatttattatcattattcagtattatacagaattcagatggtacttgctgagtgggaaaatggaacccatttgttcaaaatcaaaattattttggtaaactctaaggcattcttgtcatatttctccagagataaggacatgtaaaagatactgtgtcaaggaacagtgctaggactcaaaggaatctgtcattagaactagttagtatagcacagttaccacaaaatacaactgaaggtaaagatggggagatggggaactgtattacacatttgactagaacttagaataagctctgtcatagtggagcagtctctcaggccgttaaattcatggattaagattaaaggtgggtagcattcttattccacattaatagttatgttttatgtggagaaagcttcttaaagataaaattatgatgggaaagttattgaattaattgactgttcctatccactgtgtattgccactgccaagacacaaataaaaccacatgagagggccacaacccaaacaggactggcatggagtcagtgaaaaaggcaagagaaacaggtttgcctatggcattgatctatacatggaaaacccagtattttcaggaaactttcaagtttggtataactaaggtacttaaaattggaaagtgaggagctactgttgaggatataaaaagtcagattgaagttgaatgtgaggaaagcctttgaagaactgtaaacaatcagatttgcacttacgtgtgggagtccaaaaggaatgatagtcttgactgccaacaggactttgcccaaatactaggccagtctaactaaaagacttaagtgcactgcagtgcaaaccccttgacaaccaaggttacagttgctagcagctggtgttcacagacaactctgctgaaagctgtcatctagaatcaggctgattggcatgtaagccccagtttgaatctctatattgcaaggctgccatagggccttgtgctgtggacagatactcataaagaagcacttttggagtacagatgtagtcagatatgccttcatgttaacatggaagaatggagtgaatgaatccatgtgcttcttccttctaaccctttgccagtaagttgtcctcatcaaaccttcatttcttgtatatgctatgtggtttgctttaacccactaattctcagaagatgcctaactggtacaaactatgtattacttgccctttggagactatagaagggatcaaacagaaccataccttgcagaaatgagcacccctcatagaactagtggcaatacatgaaaatgagggaacagagaggcactcagttggtggagtgcttacctagcatttcaggagagcctgagttctctctcccaatactgcatgaactggctatggtatacaactagaagcctgctctcagggagtgaaggcaggagggtaagtttgaggtcagtctaaagtatataaaaccatcacaaatgaatgggagataaaaatctcagtgaaagccggggatggtggcgcacgccttttatcccagcgcttgggaggcagaggcaggcagatttctgagttcgaggccagcctggtttacagagggagttccaggacagccagaactacacaaagaaaccctgtctcaaaaaaacaagaaacaaaacaaaactcggtgaatatgtttatgacttattactatgcagagaggctttggaggcaggttgaaataatgtaaccctttgtcactcctttacaagactgccagcccttggaaatcctaagaaaaagaaagaattgcagggggaaaagatccaactttcagcccctactgccactgaagcagctaatgcaacctaaatttgcattgacacttgggcagtgtgtaccacccacaggtctttgtaggaaaataagtcatggcttctggggctgcaataaacttaacagggcattgattgggtttctagacttggacactggactcttgaggtttgatctcattatgtgatgaagagctttacacccatgaagtaagtgaagcttatggttttaatgcagcagtcctcaacctgtgggtcacaaccatcagaaaacattatttccagtgctcttaggaactgagacatcattcagtagcagaagtagcaatgaaaataattttatggttgggagtcaccacaacacagggaatgatattacataaagggtcacagtagtaggaaggttgaaaatcgctgctttagtgcatgattcactttggcctgactgattagctaggctgctgacttgtgatgagggagcaaatgtgagtgcaacttttttaattgggtgcttaggagattcagatctacacccctcctgttgagtgggctataagtaaccaagactgttcttgggtactggccaaataagagtgccactatttcacatttaaggatatcccaccttacaggtcattgatatggtttgtaggcatcacagcagggtgacactattggttgtgtccctcccttggaagcttgtaaagtatcctcacacggcccccaatggaggagctagagaaagtacccaaggagctgaaggagtctgcaaccctataggtggaacaacaatatgaactaaccagtacccccagagctcgtgtctctagctgcatatgtagcagaagatggcctattcggccatcactgggcagagaggcccattggtctagcaaactttatatgccttagtacaggggaacgccagggccaagaagtgggagtgggtgggtaggggagcagggaggagggaagggtatacggaacttccgggatagcatttgaaatgtatataaagaaaatatctaataaaaaattataaaataaatttaaaaaaaaaaagaaagctagtcctcagggaggagactttcaggtccgacctaacttgatccaatgtccaaatgtagatggtgtctacaacagtagggacttaccttccacttctaggaggcaaccaaggacagtagcaatagcctgttttgtttaggggagtctcttggacttccctgaccaacaacttactaggagcatttccatgactagtattaggggttttgttagtctatggcttgggatagcatagtcagcccaagtggcacaacttcattgaagctacacacaatggggaacatacatacagttatatgtaaataaaaagataatggcattttattatgacattttattttttattttattttattcatttatttatttttggtttttcgagacagggtttctctgtgtagccctggctgtcctggaactcactctgtagcccaaactggcctcgaactcagaaatccgcctgcctctgcctcccaggtgctgggattaaaggcacgcgccacctccgcccagggacattttatttttatgtttctatgttattattttaaatcccgaccatagtttcccctcccttctctctttccagtctgttctcccacactcactccgcctccatttctcttcagaaataggaagcccttccaaagatatcagtcaaacatggcatattaagttacagtaagactaggcacctccccttgtattaagactagacaaggcaatccagtaggaggaaaaggttccagaagccagcaaatgagttagagaccgcccctgctcccactgttaggagtcacacaagaagaccaagctacaaatacataacatatatgcaaagggcctaagtcaatcccatgcaggcttgctagttgatggttcaggcttagtgagcccctaatgagtccgggttagttgattctgtgggttttctcgtggtttcctctacccctctgggtccttcctcctcctcttctgcaggattccctgagttctgcctaatgtttggctatgggtctctgcatctctttccatcagttgctggacaaagcctctctgatgacagttgaactaggcaccagtctaccagtctttttttttttttttttttttttttttttttttggtttttcgagacagggtttctctggatagccctagctgtcctggaactcactctgtagaccaggctggcctcgaactcagaaatccacctgcctatgcctcccgggtgctgggattaaaggcgtgtgctaccacgcccagctggcaccactctattaaatatagcagaatatcattagaaatcagttaattgagggcttcaagggggtgccagtcatgtttagttctgtcctaggtctttaggctatccagcctctggatcttggacacaagacaatgtcaagggtggacttactccagggacatgggtttaattctggaccagtcactggccactcaaacaatttctgatacaccttgaccacagtatatcttacaagcaaggcagattgtaggtacaaggttttgtggataggttggtgtcctaatgtctcctctggaagtcttacctacttacaaggtgatagctgtttcgggctctgtataccccattgctaggtgtcttagctagggtcatcctactagattccttggagtttccattgcactagatttctatcttgtccctaagatgcccaccagttccagttgtctctcccagtactctgcctcaatcctctcctcagggagagtcatgtatccccctcttgagccctccctgctacctagcttctctgggtctgtggattatagcatgtttatacaaattataaaggaagaagtctttatgattgttttcaagcctccttacaattggtttttcttcaccccactccgtcttcttctgtattgactatttctaaagctcgggggaacttcacagaagagagagtaaaatcattatgagagccgtaagactaggagacctgctatgaaatcagctctcctagtaatgatagggaagctacactcatgatacctcaacaatatgacagcctaaaaaacacctggacaatgacaaagctagtagacatgctattgtggaagagggaaatctcatagggccccaccttgtggcaaagaactatgggcagctaaccactctgagggtgggagaatcagtcggcaagaacctttaatcggttatccaataccaagtggtcagccatgaaaatatatacacactaaaaatatagctacactaaatatactcagcatcatatatattcatatatatattcatgtatatatatgaatttatacatagatgtaatgataacagttaaacagattgtcttaatcaatgttctattgttgtgaagagacaccttggccaagttttaaactcttatactgggggcttgcttacagtttcagaggcttagtccctatcatgacaaggatcatggtggcaggcaggcctggtgctaaagaaatagctggaaacttcatcctgattgacaagcagagagagaactgagcctggcaattttttttttaaacccaaagcccattcccagggacacatttcctccatcaagaccacacctaatccaaccaggctacacctcttaatccttctaatgcaagcaaagagttctactccctggtgattgagcattcaaatatatgagcctatggaagccattcttattcaaactaccacagagaccttgaaagcaagctaggctgagtacatggcatgagtgggagggagggaagggaaggaaaaagaaggtaattgtaccattttttaaaaaaacaccttttttgtttttttgttttggtttgttttggtttgtctttaacagtttcaaacatgcatactatgtaacctggttataaacacctccatctccccctgcaacttctcccaggttcccccatcgcatctcccttccaactttcaggtcttccttttttaattgaatttatgttttaaaatccactgagtttcaccgatgatacccatatgcacatgattatgaggtcatccactggggggatagagaacctaccagtggcaacacccccaaagcaaagtgaaagttcactcctgaaatagctatcaattgccaccagctctttagctggggtgggttcttgggagccccttgtcatccatgccaaaattatttgctgtcttgatcatgtacagacaaccatagatgctatgagcttttatgtgcaatggctatgccatgtcctgaaggcagcatttcacagtactgttagccgttctctaagtcctacatttgttctttcctcttgtcctattttgggttgctattgctatgatagaacaccatcacgaaagcaagttgagagggaaaggatttatttggcttacacttatttccatattgtagtccatcacttaaggaaatcagaacaggaacaaaacttgatgcaggaacctggaggcagagctgacacaaaggccatggaggggtattgcttgttggcttgcccagcctgctttcttaagaacccaatgcccaggggatggaaccacccacagtggactgggctctcccacatcaatcattaacaaaatgtctgcaggcttgcctacagtccaatcttatagaggcattttctcaagtgaagctctctttagttactctagcttgctccaagttaacataaaactagcctgcacacacactcctcttccacaatatttccagaaccttaggtcagaagcgggttgatatagatttctcttgtacagttgaacacacaagtttgctttttttcaggaattggaccaattatgagtctctgtattaactgctgctcactagaaaaagaaaaatttctgaccaaggttgagaacacaacacaaatctatatgtataaacaataaatatttaaaactcagtttgacaatacattatttagatattaggttccctgcttagacctatgatctaagtacatgggcttttgatcaggtttacagtccaggcctaagtctgaatatatctcacttcctccccttctttctttgagacaaagtctatgtagcactgactgtcctggaactcagtatgtagaccaggatggcccttctaactgacagagatctaccttctgcctcccaaataatgggattaaatgtgtgcactaccatgactagtcttcctctttttattcataaaacaaatatatttatattgagctttctaaacagtactttgttggggctggagagatggttcagtgattaacaatacttattactcttacacaggatctagcttcagttcccagcacccatatggcaggatgaagcatgcttgatgtgtttataaaaagataaagagataaagaagggggtgcctcggcaggcccatgacaaggcatcccttccccctgagggaccagccactataccccctaaggggtatagtatagaatataatagtttattcagggcatgaggatggaagttcagagggtagtagaggcagagaaaggcagagagagagagagagggagaggggggagaagaagaggaggagcaggaggaggaggaaaaggaggggaggggacaagagaggacaggagagaagaggagagaagagaagtagaggctgtccatgaacacatggagagaggggaaatgaaatagggaaggaggggggaagggaagagcccaagagaggtcagagagggaggaggggggcaagcagccccttttatagtgggtcaggcctacctggctgttgccaggtaactgtggggtggagtttagacagaatgctaacaatgctcacaagcaggaagaattgaaaaatgcaggcatattgtaactcccagtgctctggggacagaatataaaaggaccaaaggagcatgctgagcacaaacctagttgtagtttcagtgagagaccctgtcttaagttgaagagtgagagagcaagacattggtgttttcctctggggtctgcatgcacacacaggtgcgtgctcatatctgtacatatatgcacaacacacacacacacacacacacacacacacacacacacacacgaaaaaagagcaaacctaactagtgttggccagagtaaagggagctcttgcaaactattgatgggtgagtagagcactgtagatccaaaaccataattgtcatatggtacatcaatggcagttttggatatatagcagaaagaaatcaggtatgaatacagacaccataactacactcacaagccttttgcagaaccattcaaaacagcccagaaatgaaatcaacacaagcttgtttccttcaaacgtctgggagagaaatctaggctgttagcttgccttactttgatactcaatgctgaaacaacctgttcaagtatatctctcaatcctttatgtcagggcacctgtgatggcacattccattacactgatgacacttgatagtgacctgatcacacttgatagtgaccttcctcgaggaaaatattctcactgtaacgtgtgtcctcttgctgtaaagaagcctggagcaaggccactagagttcaaatttgggtactgtaggaacccaacgtgtgttattcaaacatgtgaaccaattcaccacactggtaaccaaatttgagttgagacccctgtgccttaaagtctcacaatcaataccataaaacatggtgtgctatttccaaccattgtgaccccatgatatctttgtatctttgactagtctcataccttatccaatattccattcctactttggaggattggagacaaaagtctatgacgctaggacattgagtgctaaggtggaggaaacagccattgggctgatactgacgtcctaagaggtatgatgggctggttcagagtgtaaggaaaggatgaagtaaccattcagaaactggattcaagtgctcctcccagagtgaagaaacagcagctttcaaccttctagtctcttattgtagactctcttatttatagaacctaacagagcactggtgaaagagaaatgtgagagcgagagacccagccctacatcatgcaggctgtagaagggaggtttgtgtattggtttatttctttttttttctcaaattgacacaagctagagtcatttgggcagaggaaatctcaactgaaaaaatacctccatcagattggcctgtacacgagtctgtgtggaatttatctaattgacagttgatatgccagggcccaatgtgcagtgggaagtgctactctcaggcagatggccctcgattttatggaatggaaactgagtaagccagtatgcactgttcattcatgacctctgctttagtttctaccttcaggttcctccccttaatttccttcataatagagtatgatttgaacatgtaagtcaaattagacatttccttcccaagttgtttttggtcacggtacttatcacagcaatagaaatcaagctagaagagtttgtaactgagaaatgaaatatagtgaccagatgaagacatgtgaatagaaaggatgcatccttgcagacaatgcaactgcaaggacaagtgaaggtccatgcagtgtctactatgttagtttaattgcctgctttgcctgagctacatacaggctcaacaggactttcaaatttgagactggataccatatgaagaagtctgcttaccatatgagatggccttcctccatgatgaaaaatactactattccatcctccatgatggaatgataatacatgttagaaattcatagcataacccactctgcacaagagatggaacttcaggtagtgctttgagcaataaagcagtctgctttttgatgaacacaatctacttttctatagaattatgaactgctaacagcatccctttttgagcaggccacccagaatgagactattaatcaaatgtatgccatactccctttggaaacctcttccacaagctaaatcaagaaacatctctatactaatcatgtagcaaagatgacattctaaaagcagtaaaatacctggaattagaaagttaagtgaacctgtgtgccatccatcctattcatgatgatatctacctacccagtcgatatatgttcagttctcccatagtaacaaaatcaccacaaaagcttttttttttcctcacatacaaataa

SEQ ID NO: 20 - DNA, 63407 bp, Mus musculus
ttatttgtatgtgaggaaaaaaaaaagcttttgtggtgattttgttactatgggagaactgaacatatatcgactgggtaggtagatatcatcatgaataggatggatggcacacaggttcacttaactttctaattccaggtattttactgcttttagaatgtcatctttgctacatgattagtatagagatgtttcttgatttagcttgtggaagaggtttccaaagggagtatggcatacatttgattaatagtctcattctgggtggcctgctcaaaaagggatgctgttagcagttcataattctatagaaaagtagattgtgttcatcaaaaagcagactgctttattgctcaaagcactacctgaagttccatctcttgtgcagagtgggttatgctatgaatttctaacatgtattatcattccatcatggaggatggaatagtagtatttttcatcatggaggaaggccatctcatatggtaagcagacttcttcatatggtatccagtctcaaatttgaaagtcctgttgagcctgtatgtagctcaggcaaagcaggcaattaaactaacatagtagacactgcatggaccttcacttgtccttgcagttgcattgtctgcaaggatgcatcctttctattcacatgtcttcatctggtcactatatttcatttctcagttacaaactcttctagcttgatttctattgctgtgataagtaccgtgaccaaaaacaacttgggaaggaaatgtctaatttgacttacatgttcaaatcatactctattatgaaggaaattaaggggaggaacctgaaggtagaaactaaagcagaggtcatgaatgaacagtgcatactggcttactcagtttccattccataaaatcgagggccatctgcctgagagtagcacttcccactgcacattgggccctggcatatcaactgtcaattagataaattccacacagactcgtgtacaggccaatctgatggaggtattttttcagttgagatttcctctgcccaaatgactctagcttgtgtcaatttgagaaaaaaaaagaaataaaccaatacacaaacctcccttctacagcctgcatgatgtagggctgggtctctcgctctcacatttctctttcaccagtgctctgttaggttctataaataagagagtctacaataagagactagaaggttgaaagctgctgtttcttcactctgggaggagcacttgaatccagtttctgaatggttacttcatcctttccttacactctgaaccagcccatcatacctcttaggacgtcagtatcagcccaatggctgtttcctccaccttagcactcaatgtcctagcgtcatagacttttgtctccaatcctccaaagtaggaatggaatattggataaggtatgagactagtcaaagatacaaagatatcatggggtcacaatggttggaaatagcacaccatgttttatggtattgattgtgagactttaaggcacaggggtctcaactcaaatttggttaccagtgtggtgaattggttcacatgtttgaataacacacgttgggttcctacagtacccaaatttgaactctagtggccttgctccaggcttctttacagcaagaggacacacgttacagtgagaatattttcctcgaggaaggtcactatcaagtgtgatcaggtcactatcaagtgtcatcagtgtaatggaatgtgccatcacaggtgccctgacataaaggattgagagatatacttgaacaggttgtttcagcattgagtatcaaagtaaggcaagctaacagcctagatttctctcccagacgtttgaaggaaacaagcttgtgttgatttcatttctgggctgttttgaatggttctgcaaaaggcttgtgagtgtagttatggtgtctgtattcatacctgatttctttctgctatatatccaaaactgccattgatgtaccatatgacaattatggttttggatctacagtgctctactcacccatcaatagtttgcaagagctccctttactctggccaacactagttaggtttgctcttttttcgtgtgtgtgtgtgtgtgtgtgtgtgtgtgtgtgtgtgtgtgttgtgcatatatgtacagatatgagcacgcacctgtgtgtgcatgcagaccccagaggaaaacaccaatgtcttgctctctcactcttcaacttaagacagggtctctcactgaaactacaactaggtttgtgctcagcatgctcctttggtccttttatattctgtccccagagcactgggagttacaatatgcctgcatttttcaattcttcctgcttgtgagcattgttagcattctgtctaaactccaccccacagttacctggcaacagccaggtaggcctgacccactataaaaggggctgcttgcccccctcctccctctctgacctctcttgggctcttcccttcccccctccttccctatttcatttcccctctctccatgtgttcatggacagcctctacttctcttctctcctcttctctcctgtcctctcttgtcccctcccctccttttcctcctcctcctgctcctcctcttcttctcccccctctccctctctctctctctctgcctttctctgcctctactaccctctgaacttccatcctcatgccctgaataaactattatattctatactataccccttagggggtatagtggctggtccctcagggggaagggatgccttgtcatgggcctgccgaggcacccccttctttatctctttatctttttataaacacatcaagcatgcttcatcctgccatatgggtgctgggaactgaagctagatcctgtgtaagagtaataagtattgttaatcactgaaccatctctccagccccaacaaagtactgtttagaaagctcaatataaatatatttgttttatgaataaaaagaggaagactagtcatggtagtgcacacatttaatcccattatttgggaggcagaaggtagatctctgtcagttagaagggccatcctggtctacatactgagttccaggacagtcagtgctacatagactttgtctcaaagaaagaaggggaggaagtgagatatattcagacttaggcctggactgtaaacctgatcaaaagcccatgtacttagatcataggtctaagcagggaacctaatatctaaataatgtattgtcaaactgagttttaaatatttattgtttatacatatagatttgtgttgtgttctcaaccttggtcagaaatttttctttttctagtgagcagcagttaatacagagactcataattggtccaattcctgaaaaaaagcaaacttgtgtgttcaactgtacaagagaaatctatatcaacccgcttctgacctaaggttctggaaatattgtggaagaggagtgtgtgtgcaggctagttttatgttaacttggagcaagctagagtaactaaagagagcttcacttgagaaaatgcctctataagattggactgtaggcaagcctgcagacattttgttaatgattgatgtgggagagcccagtccactgtgggtggttccatcccctgggcattgggttcttaagaaagcaggctgggcaagccaacaagcaatacccctccatggcctttgtgtcagctctgcctccaggttcctgcatcaagttttgttcctgttctgatttccttaagtgatggactacaatatggaaataagtgtaagccaaataaatcctttccctctcaacttgctttcgtgatggtgttctatcatagcaatagcaacccaaaataggacaagaggaaagaacaaatgtaggacttagagaacggctaacagtactgtgaaatgctgccttcaggacatggcatagccattgcacataaaagctcatagcatctatggttgtctgtacatgatcaagacagcaaataattttggcatggatgacaaggggctcccaagaacccaccccagctaaagagctggtggcaattgatagctatttcaggagtgaactttcactttgctttgggggtgttgccactggtaggttctctatccccccagtggatgacctcataatcatgtgcatatgggtatcatcggtgaaactcagtggattttaaaacataaattcaattaaaaaaggaagacctgaaagttggaagggagatgcgatgggggaacctgggagaagttgcagggggagatggaggtgtttataaccaggttacatagtatgcatgtttgaaactgttaaagacaaaccaaaacaaaccaaaacaaaaaaacaaaaaaggtgtttttttaaaaaatggtacaattaccttctttttccttcccttccctccctcccactcatgccatgtactcagcctagcttgctttcaaggtctctgtggtagtttgaataagaatggcttccataggctcatatatttgaatgctcaatcaccagggagtagaactctttgcttgcattagaaggattaagaggtgtagcctggttggattaggtgtggtcttgatggaggaaatgtgtccctgggaatgggctttgggtttaaaaaaaaaattgccaggctcagttctctctctgcttgtcaatcaggatgaagtttccagctatttctttagcaccaggcctgcctgccaccatgatccttgtcatgatagggactaagcctctgaaactgtaagcaagcccccagtataagagtttaaaacttggccaaggtgtctcttcacaacaatagaacattgattaagacaatctgtttaactgttatcattacatctatgtataaattcatatatatacatgaatatatatatgaatatatatgatgctgagtatatttagtgtagctatatttttagtgtgtatatattttcatggctgaccacttggtattggataaccgattaaaggttcttgccgactgattctcccaccctcagagtggttagctgcccatagttctttgccacaaggtggggccctatgagatttccctcttccacaatagcatgtctactagctttgtcattgtccaggtgttttttaggctgtcatattgttgaggtatcatgagtgtagcttccctatcattactaggagagctgatttcatagcaggtctcctagtcttacggctctcataatgattttactctctcttctgtgaagttcccccgagctttagaaatagtcaatacagaagaagacggagtggggtgaagaaaaaccaattgtaaggaggcttgaaaacaatcataaagacttcttcctttataatttgtataaacatgctataatccacagacccagagaagctaggtagcagggagggctcaagagggggatacatgactctccctgaggagaggattgaggcagagtactgggagagacaactggaactggtgggcatcttagggacaagatagaaatctagtgcaatggaaactccaaggaatctagtaggatgaccctagctaagacacctagcaatggggtatacagagcccgaaacagctatcaccttgtaagtaggtaagacttccagaggagacattaggacaccaacctatccacaaaaccttgtacctacaatctgccttgcttgtaagatatactgtggtcaaggtgtatcagaaattgtttgagtggccagtgactggtccagaattaaacccatgtccctggagtaagtccacccttgacattgtcttgtgtccaagatccagaggctggatagcctaaagacctaggacagaactaaacatgactggcacccccttgaagccctcaattaactgatttctaatgatattctgctatatttaatagagtggtgccagctgggcgtggtagcacacgcctttaatcccagcacccgggaggcataggcaggtggatttctgagttcgaggccagcctggtctacagagtgagttccaggacagctagggctatccagagaaaccctgtctcgaaaaaccaaaaaaaaaaaaaaaaaaaaaaaaaaaaaaaaagactggtagactggtgcctagttcaactgtcatcagagaggctttgtccagcaactgatggaaagagatgcagagacccatagccaaacattaggcagaactcagggaatcctgcagaagaggaggaggaaggacccagaggggtagaggaaaccacgagaaaacccacagaatcaactaacccggactcattaggggctcactaagcctgaaccatcaactagcaagcctgcatgggattgacttaggccctttgcatatatgttatgtatttgtagcttggtcttcttgtgtgactcctaacagtgggagcaggggcggtctctaactcatttgctggcttctggaaccttttcctcctactggattgccttgtctagtcttaatacaaggggaggtgcctagtcttactgtaacttaatatgccatgtttgactgatatctttggaagggcttcctatttctgaagagaaatggaggcggagtgagtgtgggagaacagactggaaagagagaagggaggggaaactatggtcgggatttaaaataataacatagaaacataaaaataaaatgtccctgggcggaggtggcgcgtgcctttaatcccagcacctgggaggcagaggcaggcggatttctgagttcgaggccagtttgggctacagagtgagttccaggacagccagggctacacagagaaaccctgtctcgaaaaaccaaaaataaataaatgaataaaataaaataaaaaataaaatgtcataataaaatgccattatctttttatttacatataactgtatgtatgttccccattgtgtgtagcttcaatgaagttgtgccacttgggctgactatgctatcccaagccatagactaacaaaacccctaatactagtcatggaaatgctcctagtaagttgttggtcagggaagtccaagagactcccctaaacaaaacaggctattgctactgtccttggttgcctcctagaagtggaaggtaagtccctactgttgtagacaccatctacatttggacattggatcaagttaggtcggacctgaaagtctcctccctgaggactagctttctttttttttttaaatttattttataattttttattagatattttctttatatacatttcaaatgctatcccggaagttccgtatacccttccctcctccctgctcccctacccacccactcccacttcttggccctggcgttcccctgtactaaggcatataaagtttgctagaccaatgggcctctctgcccagtgatggccgaataggccatcttctgctacatatgcagctagagacacgagctctgggggtactggttagttcatattgttgttccacctatagggttgcagactccttcagctccttgggtactttctctagctcctccattgggggccgtgtgaggatactttacaagcttccaagggagggacacaaccaatagtgtcaccctgctgtgatgcctacaaaccatatcaatgacctgtaaggtgggatatccttaaatgtgaaatagtggcactcttatttggccagtacccaagaacagtcttggttacttatagcccactcaacaggaggggtgtagatctgaatctcctaagcacccaattaaaaaagttgcactcacatttgctccctcatcacaagtcagcagcctagctaatcagtcaggccaaagtgaatcatgcactaaagcagcgattttcaaccttcctactactgtgaccctttatgtaatatcattccctgtgttgtggtgactcccaaccataaaattattttcattgctacttctgctactgaatgatgtctcagttcctaagagcactggaaataatgttttctgatggttgtgacccacaggttgaggactgctgcattaaaaccataagcttcacttacttcatgggtgtaaagctcttcatcacataatgagatcaaacctcaagagtccagtgtccaagtctagaaacccaatcaatgccctgttaagtttattgcagccccagaagccatgacttattttcctacaaagacctgtgggtggtacacactgcccaagtgtcaatgcaaatttaggttgcattagctgcttcagtggcagtaggggctgaaagttggatcttttccccctgcaattctttctttttcttaggatttccaagggctggcagtcttgtaaaggagtgacaaagggttacattatttcaacctgcctccaaagcctctctgcatagtaataagtcataaacatattcaccgagttttgttttgtttcttgtttttttgagacagggtttctttgtgtagttctggctgtcctggaactccctctgtaaaccaggctggcctcgaactcagaaatctgcctgcctctgcctcccaagcgctgggataaaaggcgtgcgccaccatccccggctttcactgagatttttatctcccattcatttgtgatggttttatatactttagactgacctcaaacttaccctcctgccttcactccctgagagcaggcttctagttgtataccatagccagttcatgcagtattgggagagagaactcaggctctcctgaaatgctaggtaagcactccaccaactgagtgcctctctgttccctcattttcatgtattgccactagttctatgaggggtgctcatttctgcaaggtatggttctgtttgatcccttctatagtctccaaagggcaagtaatacatagtttgtaccagttaggcatcttctgagaattagtgggttaaagcaaaccacatagcatatacaagaaatgaaggtttgatgaggacaacttactggcaaagggttagaaggaagaagcacatggattcattcactccattcttccatgttaacatgaaggcatatctgactacatctgtactccaaaagtgcttctttatgagtatctgtccacagcacaaggccctatggcagccttgcaatatagagattcaaactggggcttacatgccaatcagcctgattctagatgacagctttcagcagagttgtctgtgaacaccagctgctagcaactgtaaccttggttgtcaaggggtttgcactgcagtgcacttaagtcttttagttagactggcctagtatttgggcaaagtcctgttggcagtcaagactatcattccttttggactcccacacgtaagtgcaaatctgattgtttacagttcttcaaaggctttcctcacattcaacttcaatctgactttttatatcctcaacagtagctcctcactttccaattttaagtaccttagttataccaaacttgaaagtttcctgaaaatactgggttttccatgtatagatcaatgccataggcaaacctgtttctcttgcctttttcactgactccatgccagtcctgtttgggttgtggccctctcatgtggttttatttgtgtcttggcagtggcaatacacagtggataggaacagtcaattaattcaataactttcccatcataattttatctttaagaagctttctccacataaaacataactattaatgtggaataagaatgctacccacctttaatcttaatccatgaatttaacggcctgagagactgctccactatgacagagcttattctaagttctagtcaaatgtgtaatacagttccccatctccccatctttaccttcagttgtattttgtggtaactgtgctatactaactagttctaatgacagattcctttgagtcctagcactgttccttgacacagtatcttttacatgtccttatctctggagaaatatgacaagaatgccttagagtttaccaaaataattttgattttgaacaaatgggttccattttcccactcagcaagtaccatctgaattctgtataatactgaataatgataataaattctaattctcaggattccttggaatgacctgttgatatttaaatcttgtttcatttctcaatctactccagtaatcaaggatctagtatatagaaattggtcacaaaacctttaaacactcagttctgaaacttagtacgttttatcatgtggcaagtgaaaactttaaaggcttttataccttgccactaatgtaaaactccttggcataaaaaaaaggaagtatttaacagtccaacaatacacactgaggaaaaaaaagatgtctaggacttaaatcctgcatctgattacgctttccaagtaaccaagaattgcgcctggtaaatggctatttcaaaagaacctttggctacatagactacaagctcgagaaatctagtactattattctgataaacgaacatagtattaaacggcctcttaaagtatgttttacattcaaccctcatcagtcatcagaggattccttttgtagtagatagtagacaggggtcaatacagacttaaaactggccaaactgcaaagagtgaagactgaaaagtacacagccctaattgggagactggtatcacacatctaccgcaagacagaagactataagagccagaggtagggaaggactttttatggagtgttttctggacatgacagggttgttacataagtgaactcacattgactgattatatgcacaggactggcctcagtatcaaaccagccaaaattctagcattgctggaagtttaacccatatctgatggttactggaggaggaagagtaaattgtcttcaggggacccagtccctgacaggctacccatgctccagtagatgaccctattccaatgaacatactggtaatactaaatggattcattcagtgggtttataaaacacatggcctttggagggaaaagtggtagggagacaggaaagtaggagggaagggaatctgggatgattatattcatgcaaaaatttcaaacaataaatgattagttttgttgttgttctgaattcagagggtaaggaatatccaacaagcctgaggacttgagtttgattccctggacaccacagaaagaagaatcaatttctaaaaatgatcctctgacttctacatgcgtactttggcgcgtacacacacacacacacacacacacacacacacacacacactgaaataaaaatgtgtaaaaaatagcctttttaaactacaaaggcctgcttactctccctgtgatccaaatggcagggttttctgatatgtgtacaaacatgagtgaatgcataatttagtttaccggaatcctatgtctcagcatgggatcatggttttccctattccccctaggcctttcccacctcttgttcatccatccaaattgacccccgacccccgcctctttttagaaagcacacaaacttttgcttttgttttttaaaagcatagaaaccaggatcacagccatattaaatcccaacattcaggaggtaaggaaaaaaaaaaaaaaaaggactgtcataagtttgaggtaagaccagtctatacaatgaatctcaagccagcttagtaaacagacctggagggatggctcagcagctaagagcacactactcttctattaagacctgggttcagtttctagcacctacatggtggctcacagcaacccgtatctctagtttcaggggatctgactccctcttctaatctgttatacgcatgtacacatgcacacaggcatgcatgcacacacgcaccaaaacaaaaagaaacatgcaaaatgatcatttgctttgagtgacaaatatctcctccaaccccaacatattatctttgtcatttgtgtcgaaatttaaaaccggagcaaacatctgtcagactagtattttgctttttcataagtgcaactttttaataaaaatttacatctagataagataaacaatcttcagatttttgaaactttaataagattttaaaaacatgactttaaactgaaaaacatacacattttgcacacaaatattgtaatatgaatcaactccaactccatttgaaaagatgtgaatcaaattacagttttagaagttagtaattcacatttaagcaagttagcgccttgctgaattcagcctttgtaaaaaaaagagacttagtgcatattttaacggtacattgtgactgtgtaccaatcattgatatttcaccttattgaacaagattacgttcttgaaagttggtaaataacggctaacctcctttgacatgtgaaatttccaatggtaacagttacattttgtaacagaacactttctatagatttctttcctatcttaaaattttaaaagcaatcattgtaaggattgcatcaacatcaatttagcagaggaagatcaaactttattgaaactgtttgcatacaaaatatattgcactataaccaaacaaatgtcaacataaaatccaatctgttgtcgctaatatgtacagagaatattgcccaagagcagttacattacaaggtcattctaccttggttaattatctacagtattttaaactgaacagtttacagatgatgtgtgcaaggtaccaatttctgttttcaaatactatacattcccagaataaataactagaaatcaacattactgtttggcaatactttttaaaagacattttaatatttgtgaaatcatgtgcagtttgttgccattttatatgcttatttgtatgcaaggaaaactaaatgaaaaatgaaaattcaaagaaacaaattcacaaagtacatcagaggcagaacttcggtttgtacggctctgtacagattcagtggtacccctactcagagttatttttaaaaaaaaatataacatctcagagtgaaggtccttcacatatttttcttcagtgaatttcagtcatttaaaaaaaaagagagaaaaaaaccccacaaaaataagactcaacacatcaaaaaagaaaaaaaaagaattatttgttaaccaattgtcggtctgcttttcggttctgcttatgcattagactttgtatttcaaagttacaaaacatttaacctgctttcaatgtttctcagacaaagtacctatatacttttgagggttgttatgtatttatgaagatgaccttcatatctccccaaaataagctttaatgtaaaatatgaatgaaaaaacttgacaaaatttggggaggacaaaagaaaatgtttcaaagttgaaattcgtcatcaggccaaagagcaggcatatcctactaactttcgaccaggaagatttgcaagtagctgaaaacatctttagcctctcccaaatgaaaagatagttatttcttctcctgtctatacagaaaaattacacatcccttccaataacactatttgtcatacttcagtgcaacaaaacaaaaacaaaaaacaagtcctattttttatactgcctaagctgatgtttatgtaaggaaaaaaatatggaaagcatgcattcttctaaaaagtactaatgtttgacagggtttgctacatctttaacatttagtgtttccaacttatcttccctgaactctgcatccaaatataatattcctacctgccaagatataaaaaaggcacagatcatacaactcttttttttgctaatgaaaataacaaatgtcacatcacacacatttcagggtccactaaaatactggaaaagtggaccaaaacataaactgacacaggacatgaaatggcacagcatttcatgaagactttaaatgagactgaagacagagatctagtatgattatcacaaatgtgatttactccgaaagactgaaacatactgctgagttatatagtccaattcaggaaaatggtcctagttaataaagatcactgcttagtatttttaaaaaataaaagtaaaatcctgccctgaagtgttaagtgtacttaaaagttatgcatcaaatttcaagatctttttgtgcaaatctggaagattgttgattattgccaatatcaaaaaaattctttgcagaatttgtgttcacttcatgccctgtgccatcttgcctactatttgtctttggcctaacaaagttttctaaaatggagtaagaattacggaaatggtagaggaaatataacttcggaattatgtagcttatttagggtactccattcaccagcggttgcagcccatctacgctgtctggcttttccttcttctggttacgatctttacccgtgcgcagccggctcccttcactggaggcactctgtaatggtttagtatggacagtcttttcattattgcagttaactgtgatctaaaacaagttatacttgttatatatacatacacactagatcctatataaatggcctcacaagaaatattaagcctgtaatacatacgccacatgttaatggggaaagcagaggcagatggatctgagttctaggctacccagtgctacataagtggaatcttgtctcaaaaaaatagaaggaggatgcagatgaaaatagaactgtaagaaattaaagcatggtaggctctttctttattggtttaggtttttaaaacaatattatttagctggaaaacagtagccatctcactgtgtacaatctataagaaaaaaaatctcactttgtattcgtcacctttatattctaagcaaaaatcagtgaggccattcaaattaagttactattattggctaatagaaaatatataaggtataggcaaagtatacagcagatcatatggatacacatgcacacacacaaagcacacctcacaacaacatatttcaaaaggaatggcttattcagcaataactataaaatccaagagagacaaaaaaagcatgccttcctatgatagcttcacctgaatgaaaagtcaactaacccattcatgagctaacctttagttcccatacacatatattatagtatcagtaagtttttctataccaaaagttccaccccatcctttagaaacctcttttacaactccttcaaagtctaaatagtgggggctggtgagatggctcagcagttcagagcccctgttcttccagaggctctgggttcagttcccatgtgcccacatggtggctcacaatcacctgtaactccagtttcaaaggatccaatgcctgatgtacctacatactcatacacataaatacatacatggaaaaaacacagaaaaacactgaaattccaaataatgttctagcatacacttttgattttagtttgtatcagtctaggaacttgtacttcagtaagaagagtcagatggctctctaacttgaatcttgaaaaacagaatcacgaggagaaatctgaaaacaatgatttgtagaactaagatccaaggaaggtatgaagattaacgtataacattctaaggggtataaactattttaagtgtcaatggcaaacaatattagccttttctgtctggtccttcagaatggaccatgccatgaagttaagactcccttagagttggtttggattcagaagattctactgtaccattttgagttaaaattagctaattgtgtgtattggtttataggcagaaaggagctcttttttttttttttggtttttcaagacagggtttttctgtatagccctggctatcctggaactcactttgtagaccaggctggccttgaactcagaaatccaactgcctctgcctcccaagtgctgggattaaaggtgtgcgccaccactgcccagcagaaaggaactcttattacttgcttaaaaaatttagagttatcattacagataaagtgaaagagatcacataccaaagtttgaatgatcatcactctaccatatgctaggtaagtaactgtgggcaatgaactgcagcttctacttaatcacctaaaaattggataataaaacttcttgcctcagtggattattgtaagattaagtgagataaaatacacatgaagcacttagtaaagatgcctggatgtattcagggagtaaagctgaaattacttaacaaccgtttaagcactgacaatagctcacttgaaaatggatcctcagactagattgtgcacataaataaatagctgatccacagggcatggaaagctggacaccagaagcccgatcttatcaagactacaagacagataaggacaacaggttatctctgcagttaaagggagagggtacctgacttgagccacttagtacatttcattcagaatattttgtttgagagggttcgagaaccaccactgagtctgagaattacaatgtggctgccaaagtgttcacaaatacttaaaaccatatattcactggaaaaatcctcatacttgtacatttgtcacagaggactgagactgtctacaactgtaatgctgaagaaaaatatttcatatagtatgaatttatcatctttgaacatgctgaaaaataaagcacatattcaaactacttagatggaaactaggttttacctgcagggatccatcagctgttcttcctttagcctctcttggattacgtggacgattatctgttcgggaatgatcgtcgtttcctgtatattttaaaaatgtttaacagttagtgactcttaaaacatttgctcaaaattctctcttttcagattccccattcagaccaacaatagaagctaaaatgtaatgaagagcctaccaattccaattgtacaagtaaataatctattctggtaacaagaaacaaaatattctgaaggttgattcaacaggtcaatctgtctggattaacaaccagatgctggtaaggaactacgaagaatataaattagttatcactatttagtcatagtttccaaaaaatcacaaggaaggctgtgtaatattctgtcaaacaaatgaaaaagtaatcatttgctatgatgatgataagcccaaaacagactatatcaccaagattctttactcagcttcaaacagctaacagtttacttttaatctttctttctctctttaaaaacacttacagctgggcagtggtggtgcacgcctttaatcccagcacttggaggcagagacaggcggattgctgagttcaaggccagcctggtctacaaagtaacaggacagccagggctacacagagaaaccctgtctcaaaaaaaaacaaaaaaacaaaaaaacaaaacaacaacccacaaaaacaaacaaacaaaaaaccacttatatatctttgtagaggcacatataccatagttgatgtataggctaagagataagtagcaggagtcacttcactccttttaccatgtgggtcctggagattgaactagggttaagactggcagttagtacctttatccattgagccatctcactggccttaaccttttcttctcagctatacctttgaagcctcctcctcttcctcttcctccttgtcctcttcctcctcctccacgccgccgtccgtctcctctgcgcaggaagctctccctctcttcctctgttggagctaatgaccaatcactgagttcgtctctgtggtcagattctgtttcagaagcatttgatgcttcagaattagttcctatcgagagttaaaagttatataccattgtctgactttaaaaaaaaggttaacagaagcttccagagatgaagtttcaggggtgattcaatattcttcccaatttagaagcctaccaaagaatatacttatctgtgttttaaattcaaagtaaaaggcttgccatatttgaagtaatttttgttagacatcttttaaaaaggtgttttgttagctgtctaagttcagatctgaatgtgccatatttttaaatagctgtgatcaatagaggaaaaattgtctataacaatgtaatactttgataagcaaaacttctataatgagagcttttagtagacacagggacagaaggatgtacaatttggccaactctaaaagcagccaataaaggccaccatgattgttgtgtctcaggggaggggctactgtgggattatccccaatgaaaggggatatgcattcctgatgcatgccccacaatctccctcccactcccagtgggaagggctaaacaaaagatcactataaaacaactgtttacatctgagggggttaatgatatagggaatgggagtggggggaagagctccacagtgagatggaaattcattggtcaaaagaacaaactgataggaggagggttaagggttaggttcaagattggccttatgagtaggtgtctttccccactctggaatatcacctctactacctctctctcttcctctgttggagctaatgagcaattatagcttcaccattatagcgtcactcctgtggatcttgaaggcttttccatcttaaagagttcccttttgaaatgcaaatatttgtgagatggattacaccttataccatcattagcaagttacatagatacatagtcgagcaagaaagacagtaggaactcgtagctgggcactggtgtcactgaaagttactgggagaaaagaaagaagcagcaaggatagaaaagctgggaaggcaaagagtcacttcccctacttcttgactgtgcctatggctgactttggccatgccactcaaaatcatcttatgagccataggatgcagacccctgatttacacagtccatccagcaagtatgaccagcacatgcctgacaaaaaatgagccacagtacacaaatgaaaaaagttttggctatacagtaataaaatcaggagaggtcttaggtcatcaacacataagggcttaagcagatttatccccaattagaatatggacagaactcacaactgccctgtgaactatgtgtgtcattaacgggcttttattctacatgtctcttgaaacacaatttgacccactgtgagttggaaaacatgtagtgagaaattgttataatggagttctaatgaatattagagattagcagctattaagtctaggaacagataaagtaactgaggaaaatgcttagtttgtacctgaagtatatccaggaccgcgtctgccgtgccccctatttctgtaaggtctactacctcgacccattccttgaccatcatcagtcacatagcctttttccttatctgtacgatttggtggtggtctagaactagctccaatttgtcgcaactgctcatcaatttgtaatctctccaaacgcaactggtctacttcctatttaaaatatacaagataacagtaaaaataatttgacattttacttagtattacctttctccttttcatcagataaaaaagtatactggaaatatttcgacttcagttctaaatttatagtaaacactgttaacccagaattattaggaaattgaatggtctccttaaaaagaaagattactattgatacacttactgatgtcaagacttagaaatataacaaaaacactcagttttaaagttatattgaataaatttgagtgatttggcactgctattcaattagtctatggataaggcagagatacattagtttggggactttttgaaataagattgactaaaacaatactaaaaagtataaaaatacagataaatgacagacatttaagatttaatcaactaacctttaaaaatcacacataaatgagctcaatgaaattattttgtcagttaatattctaatttactaagtattgtacttggggtatattttttaaagagcatgtagtatttttagatataattacggatcacttattttcaatgaactaaacatgctaatattcctttatatgaaggggaggaaatccctaggtctcacatcaaaacacctagttctcacatcatgccttgaaaaacttttaaaatgctaaaactctgcttaaacaagtattacaaacaatatacattgagttgaacaaaatatatcaactccagaatccactgatagacccttatacatagcatgtacaaaaacatgggatctgtcgaatccagatgaaactttcacgttaatccttgcctttctagcatatccatgagcatctcacttattagctacagggcataagatctgtaactacagcaaatattcagtgtgtcaatcaagaagaggtcattgaaacaaagttgtcaaattttggttctgacatggggtggggggtgaaaaacggtcagactgagaatccacagagaacttgctctctaaaccagaatctgtgataaactgggtaggaaaaaggaaagactagtggcttcctgcaaaggtatatttctagctaatggaatgtgttatctagaaattgcataagagaatggtattccagttattgcacttaggtattgtacttagttttggtgagatgctagacccaaccaaaagatgatttggtgatgataagaatggcaacagaacagctgccagtaacagacaaaatattcaatagagaaaaataaaatatctaagaaaaagcattaattgaaagaacaagggacatgatataatgcagctctgtctatctaggtcacaataattatttctagtgaagattataaaggaaaacatacaacagattgcacataaaacactgtccaacaaaaaataaataagcaaatcaaagtggcatcctacccatgcaaaccttgctggatgaaaccttcccacttttatttattaactgaccaccattaagaatgaacaaaatgaccaggtactgcaccgttttttttcctttcactcttacttactagaagactgattcacattttattctttaagtcagcaaacacattcttaagttagtatcataaataaaatagaacttagattattttgtagactttaaaaaaagacctatagaataattctggcatatattttaacaaataagacattataacactaaaaacaattaagatttcatttcattaaattttatatttgggccaaagggaaattgaaaaagtacacatagctacttcacagatgtattgccaatcccatgctatttttactaatataatagcctctgggttcctacttcccagcttgcaagctaaggaagcataacagtaaaatcagtaagatgagcatatacaagaaagcacaagtagtttatattttgattaacacaatatagagaaaagtatgaagagtaaatatttaaagaggacttcatgaaatgctagaatttccttaataaataacataggagggacaacaaaggcaagtacacacaaaatttggatcagaaaacatccataaaagctagaaggttcaaatatatatatatatgcatatatatacacacatatatatgtatatataacatcattacctaaattgaatctaagggtttagcagaataactatatataaataaataaatatatatacatacacacacacatatatatacatatatatacatgtacatatatatgtatatatgaatgtattgagaactgggatattagccgtaagatttacaatgaaaaattaagtttttagaagaaataaactgaaacaatgtattttatctattatttttacaaggtcatatactgttatgcacagcttagaaggatcctagttttggaaggatttactatacagtttttaataattcagcacaagaagattagaagttaaaagtcatcctgtcctcacctttaaatagttcaggtgataatccaaaagaacagtggcattagcgatgctgtcttttgttcccacaaaaacaaatggtaccataccctgaaaaagaaattgtaacagtgaacctaaagaactagtgatggttcatctgaaaacaaaaacaaaaacacctaatgactaaatccctagtacaaggtctggcgaacacacaaacatctatttaaaatataaatcaatatgtaaaaccaagggcagatcaatatagtgatttcttagacatcacattgttttaaagactactgtttaatgttgacaaaataacaaacatttaactaagaattatacaatctttactgtggtaagcaagatgaatagttatgctttaattcactcactgtaagttctacctaaatcaaattcaatttaaaatcagataccaatgatacaaatttaaaaacctcaattttgccaaccaaatcaacaaaatccaaatcatgaacaaaaatgagaatttaaattaaaatacactgagtagtttgtagaagaacaaaaaccaaggcaaaattataagcataatatttaataagtccataaaatttcaaaaatatagtataatcttacaaagttcaatcataagaaatactttgatcttctatgtatagcattttaatatagggattgttttaaagatataatctaaatatttatatttctcatcagcataagagaagaaaaaaaaccccaaaccattcaatataataaccagtaggaaagtctagcttaaagaggggataaataagacacattctaagctgagaatagttcaatcattttgctactgaagaaatacatgattattggtactcacacactaatactgtaatactaataagtaataagtattacagttacaagtgtttggcaaaaatgcaggaggccaagaatctgtccctcgagcaaagtgtcactctttcctaaagaacgtttcttagaacatgtagctattgttgggatgctttccctgtttatattcagtatacagtaggttcaagaaaggaagggaaggacacaggattttctatatccttgtaaagaatgctactgttgatgaacaataaaactgaaccatcagaaagtattgcttgtaagctgattatcatatagtaggcaaggcacagcttcctagtagcagtgactatctgaactatcaggggatgaaaagaacttgtaaagattttcttttttgtactacaatataaaaagtgccctccttcaatattattccttttctcaatagcataatcacaaaggcattaattgtactttttccaagtgccaaatatcaagtcacgaaataatacatgctttccaagtaatcaccaaaataagcttttaattttgtgctgtagatttaattaggtagaatttgaagaacattatttaaaccaattttctcttataacatggtacaaactgttagagtacccaaggacaactcaaatgtctaatcagaagatctgaataaattgaaaatatagaataccaatattaggacaaagtgattctcttttctaagatgagaaagggatgtccaacagaaaggagtgtccaattcacttgcagttttagttcttggtataaaatggcatttttgcttttagtcttttctgagttataccatccttattataagcaattctcatataccaggcaaaggaccctgacatcaaggagcttacaatgtggttgaagagaccaacaagaaaacatctaaaaacatgctctgggtgagcacacaggaagatggaacaggtaggaaacctgtggtaagtacacaaggaaagcttcacatacaacagggtcaaagtgataaggcaaatacaggaaaaagaacagtctgggtagaataaacccacacataaagcagcagcaaaaagtatgttcaattttagagaattccaagaacttcagaaggaatcaagcttcctataagacacagtgggaagactggtagaaaatgacactggacatgtaagggaagaacttctaagtggaatgaagatgtttgagatttagcctagggctgtggatccaaatacccacaaatactcctccaccagcccccaaccatgaggctcatttgtagtctttcttaacaaggggaataaacattaaaatatcaacttaaaatgtatttttcaaggaatagtttcctacctgccaagccttgggttcaggtttctggggtccccctgctacaattgatgaaaccactaacacctaaagcagtataaggaatgcaagtgatgtgattaactataatgaacgatacacagaagcctgaacgcaggactttcactgcaggacttctaaatgcatttctaaataggtcagttcaaatagtgaaaatcagtttctaaaatatggctttaagaagtaactaacacatctaatagaaggtacactttgagttacaacacctgcaaaatttaaggagttatagtatgaaaaaaaaaaaagtccaccctcaacagaaaaaaagtgaccccattaggtttatagcttaagatttgtcactgtgaataaattgaaaaaatatgtattactttgttttgtaatctcatatggtaccaaacctatgtgaaaatatagagtaagagtagcctacaaatctaacgagaaaaaacagcccaaataccaaatgtggaatctgcgtcaaagaaattacttttagtgtggttagaggtgacaaattcttaccctctggacttttgtactgttaggttgagaaaaatgggtgttttcctttgtatctaaatgtttcttttcttcagaggagttaggtccaacccttgaattattggaaggtagggaacttggtggcataatttccttgataaaaaaacataaaacacaaaaaattccaattttatgagaacttggttctattaccatgtcagtgatattttttgttaagcatatccacttaattatttataaagaaatctgataattcaacatattaggaacaatgtttgaagttcatcttttcccattaacaatgatggttaagactatagattactataaagtgttttgacatataaaattacagggcataaatttttttaaaaggtttgtttgtttatttattaattatgtataagtacactatttatttattaattatgtataagtacactatagctgtcttcagacactccagaagagggcatcagattctgttacggatggttgtgagccaccatgtggttgctgggattttgaattcaggacctttagaagagcagtcggcactcttaaccactgaaccatctcaccagctcccatagagcataaaaattatgcaattaaaaaccaaatcagggattagagagagatggctttttgtagaggttaagagcatgtactgttcttacagtggaaccaagtttggttcttagcagctcacaactgagctcttctcccaacccctccaaacactcacacacacaaactttattgaattaaaccttaaaaaaaacactaaattgatttaacatcaattaaaataatctttcacaaaagacagctaattaatgtgaaaattataagcttgtgcgtggacagcattttgagagtacaactgcatcaagggttatactgtccctttccactttccatacaaatacttacaaggttacaccaataagcatatgtccaggtagataggactgagagttatcaaagtcatgttgggggaagtgatcatgtgcagaaaaagcacacacagaatgaacttactttaccacattaacactcaatcaaaagcatttataaaggctgtctatgcacgctttttgtcattcattaatggctgaaccagtgatatacaccttataatagcaaactcatgactacccattataagatcacaaaatgaagacaaatacaggataaatttacttatctaaagtccagcattagaaaacatagtcactgggtggtggtgcacacttttagtcccagaacttgtaaagcagaggcaggcagaactctgagttcaaggtcagcctggtctaagagtgagtttcaggatagccaaggctacactgaggaattctgtcttcaaaaaacaaaaaccaagccaaaccaaaacagatagtctagtatctatagtattaagcatgtccaatagtcagaacaattatcaaagtcctggatttgattctgagtaccacaaaaagaaaaaaaatattatatgcatgtaatacaggagcctctgtattaatacattaaaaaaataaaacaagacaaacaaaactctttctcttagacaaaaccagaaaaataagcactattacatacctcttcttgtgggacacttttctcattttcagcctcaatcctcaccctcacaactcctgacttgtccacgatctcttgaatcagctttccattttttcctattactttgcctaaaataaataattcatgtttgactcgaggacatcactcaaatcgtacaagcacactccactataaactatcttacacattcaaatacatatacatactggattataagattcaaaacagaagctttttaaaaaaatagtttaattataaattattctcgttgattaggtcatttttaaactcatttggtcagatactacagctgattaatacttgtgaactgattgggtaattctgaaaatttaaaggtaactcaaagagaaccccttatctcacataagaccgtatactttaaactaactggtactgtggtatttagcactctgtaaagctctacaaaaggaattaaggaaaagaaggataataaatgtatttgcttacttgacaatttcaattctcatctagctttgattcacatttcctcatatatacataggaactatttttagaattatgtatgacacatttgaaaatatgctcttaagtttcaggagcttagaaagctatctaaatatctaaaaggaacaaaaattcttcaagccaatgttaataacagaatattagttctatgcattggtcacaatgtagagtagcatacatattcataggtaaagcacactttcagataactccaaaactaccatgaaaaggcttatacgtattctttagtaacatctgttgaaattcagaaaaatctagtagtagttctaaatagcaattgtttgccccactgtgcaaaattcaattatatataaaactaggacatggctgctttcatagccactatcatacatgagtgtaaagcaagaatttacaaattaagcactactaattctagaaacctacacatgaggcaaaccagattctagggggacttaagcacttagataagccatgggtgaaatgcttctatatgctcattttgcctcctcagcgcaggcaaattgatgaaaagagagaagttgcttcctagctactttaaataacaaactagcaaaaggtcttgcagaaggactcatagttcttataatcagagccacagttttgacattattgctgtgtgtggctttcatactcttccaccttgagctctttggtcagtggtagaaaacaaaactcatgccactaaaccaggatttctaatctaaaaatctcattatgtctgttctattcttcttcaaatgaaatgaagaacgtacaaaaatccctacctggagtattctcagagtttgtttttttttttttttctgtaaaatccttacataaccatgaaagttgattttaataaagatgcaaattagcataaagaaaagtaggactttagcatgtttctattaagaaataactaagtacttcgtctaaacaaactcactgtcaaagtttagatagaacacacaaacttttaggcaagataaattggtgtgcatactgaagaaggcttgtgaaaaataggtaatcaatcagtagatgagactcaagtaatagtgattaagacgtcaccctgaaacctgcccagcaaaccgaactaacaaaaactgatttctgaagaagcccagtattcctagtgttgcagcattcctcatcaaaccagaattctcttgttttactaagtataaacgtaaagaaaactcaattctgcaataggtttttttttggtgcaaaccaactttaaacatcctctacacctaatgcaagactataggtataatctctttcttctttggtaatctaattgaatctagtttacttgtatattgcagttacttccaaattccaacagaatttactataaatctgctgtaatgaaatgaagaagttatgaataaacaaaagagaacatggagtttccttctgtacccagaactgtgctaagtactacacataacaacacctcattaagcatctagaccttgaataccacgttgatatcatgttaagtgaaggaaaagcattctctcaagagctaagtcagtcacccaaagtcacaatggtatcaaatatgtgtaaatattttcacctactatagcactatcaaaatttaatggataccatggttctatcataatcattagttcatcctgtgctatgcatgtatcttctatacaactggtatgtgtgttggtaacactacattcacattcttgtgttgcagcatacatgtaaactaatttcattagcatttgttctttaccttcaagtttttttttaattaatggtaaaaaataccatgactcttggacactattttggagtcaggatcttgctatccctaccccatactatccttaaatttgtgatctttgtgcctgtctcctgaatgctgggctattgctagtaattttaaatgacactgtaagatgattactattctattttgacaaaatgtagcctatgaatgttttaagctatatacataaactacacaggaagtttgttcactttatacttctacaagaggattaagaagcaatatgccccaaatttatttataaattcaaaccacatttttttttttttttagacagggtttctctgtgtagccctggttttcttagaactcattctgtagaccaggctagccttgaactcaaaaattcgccttcctctgcctcccaagtgctgggattaaaggtgtgcgccaccatgcccagctcaaaacacattttaaaaaataaacccatacctggttttagtttgttctactaaagacaactgaataatttgggaatactagtgaaaagttcctatgctaacagccatcacagtgatgattaggaaacagtatttatcaatttataaggagctactactgactccataaaatccaaagacagttggtgtgaatttatctttcaaactatgtctatgctagacatatccagattttgaacccagagataactgacatgaatgctatcattttctcaaatatcaccaaactataaaagcttaaatttttagtcattttagaaaaaaatctaatgctatgattaaaaaaataccttgaggaggctaggtaaaaattatcctttcagacatataagtctgaactatttcttgtatatcttctgaaaatataatctttgagtattattttctatacactgtaagaacaggctacatctcaaagattgacttaatcagattacactttcagtgatgaaacgaggtttaactagtatagaagttgtgtactaggattttattttttgtggtatatataaagttattttttacttacctactaagtttcgtggaacctgtatgacatcttcagcaaattccagaaagcttctagcctttttcactgcatcttgatcctaataaagaaggttgagtgggtgtaatatcaaagcaaaagatttggcatttgaaatactatttgtttgtttctatgagggggaagttggattatatggtgaaatatttacctctccataaatatgaaatgtgcaggtatcctcatctaaatcaatagcagtgacgccaggcacttttctagcttgctgaatattagcaccatgagtaccaatagctaaacccatcagatcttctcgtacgataaactgttcatgaaatcttgaggcaagctgccttgaactctgaagagaaatgcacaactgattaacatgttttatcaattattaagacaatttcatttaggtcagccatgtaaattatcttgaccctatatatcagggtcctataaattatcatagtagaaaaactaattttagaatcacacaagttcttttgaggctaatgaaggtctatgccatttaaaacattttttttgttaacaggaaaaagtttattgacagtttttcaaggttatgtttgcaaacctatttgcaaggctgcctttgttattcaatgatatccacaatgtaataattaagaagcagacaaaatattcccaattaagaacagctcactaggtctgacagactcaattcaatttaagcaacaattaaaaatggtatctttaataaaaaaatattcactgcacttattatggatatataagtactttttctagaaatggtgccattttcataatatataaccaggtatggtggatctaaacatccttcagctgaaatgtgacattaagacaacaccctctctcctcaaacccagggaaaaaaatccctaaaactctgtggtttaacagtaaagtgaacactcgtagaatacagaaatatcaattttatattacttttatattcagagtctgttagactttgtgatctgaatccacaaaagcttgatgaactctttaaaatattcagcaatgacaaaactatgttccaatgataccccatattatgtggataatcactgtctttaaaaagcatatcaaaactgaatgtttagttctagcatgccattaatgaaaaccaaacagattagtggctcatgttgaaaatgggtatttcttaaaagggtttatgaacctctttaatattagtagtgaagaaaataggcatgcacatagtttatcattattcaacacaccagataatttgaatgaataaatatatctaatgtaagcaattttaaaagaacaatagttgttttcaaaggtaatggtagtaaagtatataaaatcttcgaagattttccaagaagtcacgtttttggatcgtgattaccctggttcatttttcccattgataatttatggatacatgtaaaccaaaggtatggtaaagaacattcaagaagaattagatgcttaagaagagatatatgagtacacgttcataatactcacaatgaaattaagaaggctgctgtggcctaaaagttatgagaaaatcgctaaaccacaaaagtgtgaacatgggggacatcaataaagaatgagagaaaaaaaactaatcaaacagacctcaacagccatttggcaaacaaaagtaaatttttccttttctgttaagagttcatcattcatacacaaagttggtaattggcaattttcatagccttgactaccttttttcttaaactacaatttgaaactccccttttcttttgctatatcaactgatgattctccctaacgaaatgaataatgatgagggagactctttaaattgacagtaatctacttgagttggtacattaaaacaaactccatttagtttctatggtaatgaatggaagtactagatagttatcaatgaaaataaatgcatggtgatggcaattattggagaattaataaaagtagataaaatgcaccttaagagacgaaatagtaagttagggaaatagcctctggcaggaatctgaagacaggagttttaaagagtgacaaccaattagaatgaagaagttctatacccttttaaacagagataaacatacataatgaaaggaataagattagatatttaaatattctctagtactttaatgataacatgttacatagaagaagcattgtctcactttatagcagctttgacaaacttttggtaaaaatgaaatgtctaaaatttccttaaaatatatgactgttgtgtaatttcaggcatgaaaattttagtatgcttatattttgtacaatttaaatttccaaactagaggaaataggaaataataaaacaagctgtccatacttgaatttgagaaccatacagtagttatttctggacagccttaccaacagtgctagggaaaggaacatacctccagttgtttactggcttcttcatttctcagtataagagacaacttggtgcgcagacttcgaaagtgcatgtcaatcaacatgtgggctcgctttgaggtgacttcattgatggactgagtgatttaaagttaacaatattgttaccaaagcaaatgccccagaggaaataaaccaaactagacaattaaaaaacactcaccaaaattaccagctgataattttctggatcataagttacagagaaggcaccaactgcctttttaaaatccttatgtgctgattctttggcacacctagaaataaaacatattcatcattaacatgaatgatcaccaatcactagcacaaatatatgcagataaaattatactaaaaaccaaggatttatactaaatttcttttatgtaaatgctagttctatttacaagttatgtacttttactgtacacctgtgaaataaagcaaacatttgacacaataaagggtaaaaaagcagctaattaaaacatattttatttttttggaaaattttattcttgagcactgcatctatatgacccccatctcctgtgcccttttagctattattttaagcatttatttacccatgtgtttctgtgtatgcacatgcatggtgttatcctaggttagtcttaaactcaattacacaacttaggctggcctctacctcccaagtactgagacaacagacatgtaccacatctggctaaacagttatgctcttaaggaattgctattagggttagattgttgaagaagccacatttataggaaccacttttttttctgtataattcttgattttctttacataagtcaatattttctgtgagcaaactgaaaaattatggagataagctatgggtatcttaatcctctcctttctctcttgaagaagaacagttacatctgttgaaataaagatgaaaacataaaaattacttgcatacatcatctctagacttaaaaatagaatttctatgtattctgaactataatatgacttttatctagggtagtagtccacatcagacttattgtacctttaaaaattaatctcttctctgaattgtttaacatcattctagataaaagattagaaacagggcttttccaagcctctttagctttaacttagtatgtattttatctgaaaatattttctctaaaagggaaagcatcaggagaaaattttgtagtgtacaatgtgactttctatttatttatttttaccttttaaaaaaccttttatcatttgtattagatattttctttatttacatttcaaatgccatcccgaaagttccctatatcctccctctaccctgcttccctacctacccactcccacttcttggccctggcgttcccctgtactggggcatataaagtttgcaagacccaggggcctcttttcccaatgatggccaactaggccatcttctgctacatatgcagctagagacactaccctgcctggggatccatcccataatcagcctccaaacgctgacaccattgcatacgccagcaagattttgctgaaagaaccgtgctataggtgtctcatgtgaggctatgccactgcctggcaaatacagaagtggacgctcacagtcagctattggatggaacacagggcctccaatggaggagctagagtaagtacccaaggagctgagggggtctgcaaccctataggtggaacaacaatatgaacaatgtgacttttgatagaattctatcattttcaaaatcttcaaagcttatgaaaaaaaaaatctttgtttagagaactcagtgtagatttacacactttagccatatatcaagtaagtttaaacaaatacaggacttgcttgattatataactaggaaaaaaaatttttttccttcactactgtaaccaaactacttttgacaaagatacaaaacatatcattttaaaatttacattctgaattagtaacctggatataacatcttaatttatatatgcagtaacctatatataatattttaatttatatacacatatgtatgtgtatataaaatgtatatttgtaaaactacacacccttgcatgttcccagcattttttcatatagcattttttcttttggtttttttttttcaagacagggtttctctgtatagccctggctgtcctggaactcactctgtagaccaggctggcctcgaactcagaaatccacctgcccctgcctcccaagtgctgggattaaaggcatgcaccaccactgcccttctgatatagcatttttttaatgtatcaacttacatttgtcgtaaatcttctggcacctccagcttgatcttatggaaagtatcttttgtagcaggtttgttgggattaacagatcgtagacgctcaattgtgacaatttcattatacgtagcatcacatgctgcatattctatcacataaaactgagagaaataaacaagtcattcttagccatatttttaaaagaagggaaacctacataactttgactattgttttgagaaaggaactcataatagcccagactagcctagtacttactctatagccacggatgacttttaaccctgatctttgtgattcagccacttagtgctgggattaagggaatggatcaccatgcccagctcctatcattttaaaatataaactcttggggagggggaaactttaatcaatagaaacatatagcaagcatatagtaaacctatattgaaaacatttttataaaatgacttaaagttaggcagttattaaaaatagacaccaaaattaaaatgtgggcttagaaaatgtaaatagtatgaacaatatgcattttcctacctcaccctttatcatcctcactttagctaaccaccaacagcaaggctctttttcatttgctctggaataaacctacataaaaattataaaacagaatatttatgattaacataattcaaaagcagcagacactagacagtgaggaaatcttaaaaagtccatatttatctttgaaatcatataccatatgatttcaaccaaactttacatttatgttggcttagacaaaaatacataattggaaacaacttgagaactcacggttaaaagcactttgtttacttctctgatctatgtcagtaatatttagtactcttgacatgaacacttgagaaaagctgatatccatagcatgactagattttcttctgtagctattcaataatctacaaaaatgtatctgaaaccatgtaagcatcatttttattataacaaggaaaaccaatccaaagttacagacaaaggcaataactacctgtactctaagcagataggttagtgagttcactgatcactcagcttactagggtcctggccttcatctcttttgaaggctactctgcttttctggctcctcctctccatgaaaaaagacaaatctattccagcaatcttctgaatatcacttttctggctttcatacacagctctaataattatctcttaggaaacctttcaagttcatttgcaatgtgtagcatgcaatcttttgtgaagacaataacaaataaatattaatagaacctaagttgccatgatctgctgtgccatctcactagcttctgaggtaagttttatgatgcatctcattgggcttcaactgtcatgcaactaagttgaaaaaaacaaaatggttttctttacccctccaaagtcttgccataaaaacatacacataaactggcctttgctttaacacagcaagaagcccacagggaaggagataccagagggtttttgaaagagaacaaacacatacattcacttggtaatgttataggtgtacaattggaggtcagaggacaatcccccatgtgtctgtgtctctccttctaccatgccaggactggggatctaactcatatagtcagccctgggaacaagtacatgttatctactgagcttaaaggcctgtagaggtttagataacatctgtatttacaattaagatctcttgcaaagccaaatccagaatacactaagtacagttttaggctttattatttattaattattatttattataagtatttatttatgttatttattattatatattatataatatattatatattaatattatatattatttatatataatatattatattattatttatattattattataagtatttatattataagtatttattataagtatttattataagtatgttattcctcatttaaattgcagagaaaagaacataggtttgaacattcagagacctccaactagactctgaaatagcattgctgcccctgtattatcttccatttagctttctcttccttcatataactttcacctgtcatgacattagctattccagctagaatgtaacctcatcaaaggaagactgtattgatgtacctgatagcctgagcagaaaattaacatttaaggacctaacttcacgttgcttacctcttaacaagtacctatttatttgctttatactacaaacatgcatgaaactataaaaattaatgcatttttaaaaagacctcaaaataaggcttgggaagtaggaggtaaaagagactacaaaattgtaagataaataagattataatagaaaaccaattttcaatgagtagagaatcataaatacaatgattttgatcaaatttcaacagcaccttttattctaagagctcaatggtagatgagcatgtagttcatagtatggcctattaaaggacatttgggatatatatatatgtgtgtgtgtgtgtatatgtatatatatgtatatatatatatatatatgtatgtatatatatgtatatatatatatatatgtatatgtatatatagatagatatatgtatatatctatctatctatctatctatatatgatataaaagatacagatttgaaaaatatatatcagaaagattcactactactaaaataaattttatattactagtctattatataaaattattttttgtttgtttttttttgaaacaaggtctctttatgtagacttggttgtcctagaactcagtaccatagacttggtgggcctcgaactcatgaggtccacatgcctgtttcctgagtgctggatttaaaggccatatgccaccacactggctctagaattcttaaaaaaattcttttagagttaaggctctcatgtatgaagaactggcctctaacttgctatgtagccaatgataaactctgaaatcctgatcctctaacctccacctcctaacggttaagatcataggcatataatatcatattcatgctttgttagaactattactttcctttgtaaaactatttttccaaattcattttgctgaaaaagtgaatagaatagcaacaaattttttttttttttgatgatcaaccacggcttttatttaaggatttcgaggcactgtgagtttcggggaggggactactggcattaatatcagcaatggcttttatttaaggattgaggtaccacgaagatgtgggaggagctgttgataccaatatttggaactggtgctgtcaggcactacaggatgtaaaagctgcctgctgacagatctgcctcccgctgtaggaggaggcaggtcaatcatgtttatctgctctgtgtaccccaccttcaccccacactcaatgctgcatttccttgtcaatgtgaggctggggtgtggttcattagggagcacgtgtacagcatctatgaatgaagccctagctcaatcctcagtgcccagaacacatacacagacacacagatgcacgcacgcacgcacacacgagaagtgggctggagactcttgatagcacagtcttctcccaacatgtgtaagtcacatgacctgtaactaggcgccctttccctgaaagcagacagcactagagattgcagaagttgcagaactctgagcagaaacagcggagaaaaactagaagtgctctggtctgcagacagcaacctgagtcgcatttcatgggctcacttaatgactctttctaacaaaagtattacctacacaaagatttagagatgaggcaaggatatgctaatggggtaaagaaacttgggacaagatatttcctgagtgtggctgaatagccaaatataagtaaccatataacatttcaaataattaactaaaagggattttaactttaactcaaggtagtttaaatactgttaaaagcaaggtatattttaaaagtcaaagaaaattacacacatgcccttagtcgctggttattttatggcttgggaactcacctcaacttcatcactttcgtttatatctttattataacctacaggtggtgggaatctcacatcatggaatggaatctgtctctctggttgccagctgcaaataaacaaaatatcattatttgacaagcttttggtgtttaatgcaaatagtgagcatgctgcaatcaactttggttaaatgtgactctttcttggtttaaagaagcaaatgccttcaaatggccagtttttgctgagtggtgcataatggcagtgcacagacattttaacgaagtctacatgcagcatagcaacctaggtttccacacagtttttctaaagacaacagatcaaaactattacttaaaaggtttttcttctaataattttaactcacactttagaaacccaagtctacaacagaaattcctttgatgcttaaattagtattgacaattgttagtattatcatcaacatagttctacttgcaaagtaattctgactacattccatcaaccacaataactatcctctactttccaaagcaaaatggcagtcagcacattagcaattctcaactcacttgtcccccttaaattttagatcccacgaagtagtcaattcttgccataggtagctggatgctgatctaccgatgtatcagcatggactggattggtgtgtgtgtggggggtctcctaaaccatagaaacccaatggagacagcctacaggagttcaattaaattgcctaatttcttaatttaaaatattgaatagttttaaaacaccatttttttacttacaaagatataacaaatactaagtaacaaaattttataagaacactagtgattcaatcatttagagcagtcactttttccattaagaaaacagttctgttctgtgtaaaaacttctatgcctgtgtgtctaagaatgtgcatggacagaggccagaagagagattcagatagcctggaattaaagtttcaggtgccgagaactgaatattagtcctttgtaagaacaacaagtatccttaactgctgagtaacctttttagcttcataaaatgcctatattttgatagaggacattttaataaaacaaccttgaggaatacttatttgtctcttttttttctttctgtttacaaagaactactgcacaagaggacaaataagtcagaatttgtagaaatctgttgaatgatgagattacactgactccccccattacttatgaatacagttgaaaagggtataattaaaatacagcagaatagcttttttatacccactgataattagtgacctttaacatgttatgaactgtcagttacgtttcacttgtgagacatacaatgcaaaatatacatttcttggttccaaagaagtaacaatgtctttaactctttaatcgtacagatttgaagacgttaaatacaggttaaaaactaagcaccctaactaagctattctttctaaatgaaaagatcctattctatgaaatactgtgttttctttcagtattcctgatgaatctttctcttcctttacccccctttttagtggaagccaaaagaggaaacacaaaacgaacaaagattctgcttaagagtttacagttcagaactacgagtagagaatcaaatggccatttttaaaaacagtgttttactagtgaaggaaataaaaagataaaagtataattgcaacgaagctagaagcatggcttagccattaaataacgcctacagcgaaccttaatttgttcttagcctccttgttgggcaacttataactgactctaactccagctccagagttgatgcttctagcctccattaacatctgcactcttgttgcacataccatacaaagatatacattcagaaacataattaaagtaaaaataatagtttaaatacaaaaaagattatccccttagttacccatgagaccttaaatagagacgcgatattatagttgtctattgtttaatgatgtaaaaaggcaattatggaacttttgtctttatacattcaggtaaagatattctattatttaaacttgtaaactaacattattagtctggagcatggaagagggcttaatattctgttagtactttcatctgtatctttctaaatgtgtatcaggcatcaaaggttactactttgtcttattgatagcttaaagaatctaagcttacggtctaactttagatttttctagacagtgaattgcaggtctattcttaatattttagaaccaaggtatttgtttttagtccttagtaactctgtgccacagactgcagtttgggaaatttactaagatataattaataaaccacataattcacaaattcaatagtgtatagtgtgttgtcatataatatacaattattgttagtgaattatagtatgtttttatctccacaacaggaagtattttatgctttagttataacctttcttacacattcctaacaagtctaagcaatcactatactacttttttttaatctacagattttcagactgccttggatgtactattattatggtagagaaaaactaaatgttgtaactgtcacttaccaaagtttagtaaaaatcctaataccaatactaaacatatgtacttcagagtctcaaatggctacctgaaaatggtctttattaatacttaatgaatttagtgactagaatttttcccccaatgaaatgataatatctatactattgactttttcatacagctcatatttctagatatttaagtactgttttatgatctagaacaaaaagcagtaaagattaactgtcataattattgattaaaaatatatgaaaaaaataaaaataacctaatgaggacacataatttcttctgataaaataaaccatataattaaaaatcagtataaaaacctataatcatttttattgtaaacatccataaattcccatattttcaacttttaataaaattacaaactatttaaaacttttagttcattgagacgaatggatcttttgttttcataatcaaatggacttaaggatcaagattatatagtaaggacctctaaggtcaatcattagcaaaagagggccttccattgatttaatcctgagctctctgggaactttgtttcataataggaaaaaaaaacccactaaaatcagacttcaatttaaaaaatgaagaaaaaaatgagcataaaacattaaaaatcttcaacattaagattatatagtaagaaacttacttgttttcaaaagcaactgttatagaatcttcatggacatcttttacaaatgcctgcaagaaaaaaccacaacaaattaacttttaagcttgaagaccaatgaaattaaattttagagatatttaagaatttaaggaactcacacaatatgtactcactgataagtggatattagcccaaatcctaggatacccaagatataagatacaatttcctaaacacatggaactcaagaaaaatgaagactgaagtgtggacactatgcccctccttagaagtgggaacaaaacacccatggaaggagttacagagacaaagtttggagctgagatgaaaggatggaccatgtagagactgccatatccagggatccaccccataatcagcatccaaacgctgacaccattgcatacactagcaagattttactgaaaggacccagatgtagctgtctcttgtgagactatgacgggacctagcaaacacagaagtggatgctcacagtcagctattggatggatcacagggttcccaatggaggacctagagaaagtacccaaggagctaaagggatctgcaaccctataggtggaacaacaatatgaactaaccagtaccccggagctcttgactctagctgcatatgtatcaaaagatggcccgttggacacgcaaactttatatgccccagtacaggggaacgccagggccaaaaagggggagtgggtgggtaggggagtgggggtgggtgggtatggggaacttttggtatagcattggaaatgtaaatgagctaaatacctaataaaaaatggaaaaaaaaagagaataaaatggatctttgattgaaaatccgtttctaatgcccccttcttcaccatatctattttgctaggtactatatattaggctttaagaatacaaataattacaatactaaataagaaaaaattatcttaagagtttaacatctcaaagagatagttacactggccattaaaattcagtgttgaatatgaagtaagaggtacgctttaagctacattattaaaaattaagaaacttattctagaaccacatgcctagcagtaaagataagcctgtaacttatccataagtgctctattgtcctttccctcttttcacttaactatcttctatttgctttttaggtttcaattcaggtagaaactacaactaagttaaatatagtatatgcatgattatcttggaaatacttagaatgaattcaatgaacatctactaagtggactgctgcctaagatgcttctcttctagacctggtgtaaggtctggttttttggtagtgctgttactttgaaaagggaagacatactggaaaggtgaagtttctactgacccttaaagtgtaaggatgaactagccaacaactagttggaggatggagaagcaagagtaaaaacagacaacaaaaaacagcttgagattgtttcaaaaaaaaacaaaacaaaacaataagaaagctgagacagaacaaagaatagaattttaaacccatgatgtatatatgtgtgcatgtgttaggggtgtgtctgtttggatgaatatctcttatctctacaactcaagcaataaatgttcctttgagaaggcagcagcaccagagaaactctgctcaaactagtgacaaagttatttccccaggattcatttcagcaatatggcattggtagcacaccttggtgattcaccagcttttatatgtataataaaaattatggaaagtcccacccaaattgcaaaagaaatattggaggccaggcaagtgatatgtgtatcagggataaaatccctattggagcccctaaatgatgttgtgaagccaacaatacaatggagacttcacaaatagcaggaatatggactatgaagtcattagtacaaggagcaagtactatatttatatctttatatttacaggtttaaatgatgatgaacccaaattttctttcccatccacttgatgttgcttatttctcagatatatttaaatcattaaaaatatttatttatatttaaatatatatttaaatcattaaaaattttacagtatatttgaacaactctggtttaatattattctgatactttagaatatgccctatttcataagcaagtatgtatcatgcgtccagtgtgctaagggattgtttgtcctattcaacaacaaatattcctgattttgaataaaaagttgtgagaactgttcactcaggatcttggttttatatactataaaacaaatttatggagaaggggaaggtgttctttgtcctcagacagtagctaataccaagttaataatgtatttctgggggagattattagactgccaactaaaatcaagactaagaaaaggaaaaggtaactacttctgtcttcatcctctttgaaagttgtatgatgtttgtatgccttggcagcagcacaacaacatacataacagcactagttcttctttccttttttttttttttttttttttttagtatagagtttatttagggtatggggaggggagttaagagggtgatagaggcagagaaaggcagagaggagagaagcagaggcaggccctggccatgtggagggggggaggggttggggagcaagggggaaagaggcaaaaaagaggcaagagcataagagcacagcactagttctttatagtacattatatgctgaaaaagttaaactctttagtcagcaaactgaactttggtacagctgggtagaaaattgtcctttgtaaagcaaagtctttccaaagctggtctttgctgtttgcattgtctgtggtaaccagaagtgacctatggctatttacattaaaattaactacaattaaattcagtcacccattcaccttccacattttgagggatcaagaactatgggtagatcagtggggtttgtagcatatcctattgatttaaaacatttacaacattaagagttttcaaactaaccataaaaatcagccttagtcttatgactttatagctgtattcttatttccccctacttgcctgaattattatctagcttaatcatatgcattcaatacatttgcctatttcttaaaaatgaagtgttccctttcaaaggagagctgtaaatggtataaagagagagagagagagagagacagagacagaaagcaaaacagccaaaaaataagaggcaaaaagaaatgttttcacagtcctagaatataattttggatgaaaagtgtcagaaatagtttgagtaatcatcacatccaacagagccactgcctctgagttaatgaggcttatctatgtatagatatttgcatgattgtttcaaaatcagtcattttagtcactgtttgcatagtaactgatatagaatgcatttaataccttctggttactgctttactaagtaaataaaagaatctcatctgtggactctgccccgcacacatactaaggataggacaagacatcctgtcagttctaaagtcttttagtaaaccttccccacaggtttcatatctttctatgtgttctcatcatactttttccaataatgctttttaaaaactctccgactctctcttaactcattcacaaggttcctctagagagctagcacctcacctaccaacttgaaaaacctcattttgctgtaattctttcctatcatgctaagttgatgtaaaaacaacaggctgagaagatttctgtgatatattcaaaggcagattagatgaatgcccaaagagcttcactggatctgacatgtagggctattaatgggatcagagaacttagaggttgagttttgttatgaattaaatataggctctaaaatcttggctctatcatataatagctgcaggatttgggaacctcagattcctcctcatttttaaactaaggacctagagactagccttttaaagttgtaacgtaaatatacatatgtaattttcataaaagatacagaactataaatgcctttgcatttcagaatgttaagtactccctctatactttaaaaaaggctttaatggggctatcaaaccagaagttcttaagggcatgactaaagattacagttctccacaggatgtcagtcactcaatagtgctaatgttttcctaaggagagaagagacttacccactcataatcatgacagatccaaagactgctatttaggaaagtaaatgaaagtcttaatggtcaaataaaggcttaaaaagtaagatagaacaagaaagggatagtcctacaaaattactaaataataatggttactttcactctagaaaggaaaaaaaaaaagctttagggtttgaaagaagtgattaaaaaaaaaagcaaaaaaaaaaaaaaaagcagtgaccaaaacacactaaggttgttcaccaggggaaaaacagaagttttaagtcatcatagcatcccttcatttaattacaattggaccaagtcatagtcctgaggatatataaaaaccaaaactatctaatgcaaacactgctttattaaagcagtacacaaaggacaaagagtccagtcctatttgggtaaacttttattcccctatcatgacttcttcacatatcttaagttttaagatatcaaactaggggttagaaaacctagtacctacattccagctcacaaccatctgtatcccaaggagatctgatacccttttctatcacttccttggtgcacagacatacatgtaggtaaaacactcatacacataaaataagtaaaaactttcctcctagagataaattatagggccatataagatgtataattcaaacccaaggcttcatatatacattgaatctttattctccccactttgtaaaacaacaacagttcttccataaattctaagaaaaatgattcactctaactaaagacaacaggtacaaagaaaacagcatccactgacttgttttcctgatgtttatatactgttcatataagttacagtttttcaggtttagtaagctcctagggtaactaacaaaagcaagctttacagcagagtaaccttatctttccttactaagaatttatgggaaaatatttcaagccagaaggttaataaaaaaagaatatggatacataaactggagattactgacatctttgtgtctacagttaaaaaagattatacaacaattgtagttatgggatgctaaggcaatgtcactgtacaaatatgagcaaagattataatgaaattgaaaagtgagcaacaaatgtaatctactttacttcttcaagctaaattttatcatttcattatcaagtctgatttcaaatcccagatccaaaacttttagcaccctgacaaacattagtaattatttatttcatctccctatatatctatatcccttatataaattaaaacagtgggaggaagttaatagaggcaaagtagtgcctaagactccccacttggtaactattaccataaccatgatcccaaacatctcccagagcaggccagaatctgaactcccaagtactacactgcacaaaattttgcacaaaattagtaattttgaggttatcagaatacatgagtatagaactggaattgcacatttctaaggtggggtgttacattcacaaagacactaaatcttacaaagggtgctttgatttgggaggctaaaatatggtaatttacataattcatctctttaacatgtaaattaacactcatacttcaagattgctggatttcagagaaaactatgaatgtgagttcatttaaattttatgtaggcttataaatttctaaacctgtgaaagtttatggtaaaacatttacttctacaagccaatgtagctaaaatgatatataggttgggtactaaatactttgtaagcccccacccccaaagtagggtttcactatgtagccctgtctggcatggaactcagaaatccattagtctctgcctcccaggtgctaggattataggtgagatctaccaaacctggcattaaaaaatgtcttgactgtatattattgtgtattaataaaccactatatatggcaacaatattcagctagtgggagtctattctcagatgctgagcttaaaattaagatgataatatatttgtgaatttgcatcattacacataataattagatattagccattatagtttgaaatttaaacgttttgtatacgtctctaatatggtttactaattttgatactagaatataaaacctagaaatctttgcatatgtagtattctcacatctgaacagcatacattctatatcaaaatgaatttaatgcattatcattctcaacatacccaaactgtaatacacaaaaaaactacatggggcagatgcaccttgaataaagatgtatagcagtgttttgcaacattactggctttttaaagatcatgtgagatacaaatcaaagtttcttcagattttaaatataacatgtctgaagggcttaaaaactagtacgtgtgaccaactttttccaggttaaagaaaaaaacaaagcttaaaactagaaattctggtgagtgctgagtctaagtttcaaatctttttttgtttgtttgtttttgtttttcgagacagggtttctctgtgtagccctggctgtcctggcactcactttgtagaccaggctggcctcgaactcagaaatccgcctgcctctgcctcccgagtgctgggattaaaggcgtgcaccaccactcccggtttgcaccaccacgcagggtcaaatcttaaaaaataaacaccaaaaaagagccacatcttgagatggctcagcaggtaaaggcttgcagacctgagatccatccccagtagccacatggtggagacagacaactcctgaaatctgtcctcttgacaagtgtggcatgggatgcaaataagcatccactcaccctcacatagtcacaaataaacctaatagttttaaaaattaaacaccaaaagaaaaagatccaaattagaactggttggctgttatcatgctagtagcatgatttgtgattttgaaatcttcattttagtgatcctcagagaaagaatcaaatcactgctaatatgtgttctatatagttattctgctaacttaatgttctcaggagatgtacaactatccttcacaatacagtagttctagtaagcaaatcaaagactgaattcaattatattgaatttgacttacttcactttaaatttttatttctaccaatttaatgaacaaggaccccagtttttccataatggtctttacctctcattttttgtaatcaatttcaccagaaaacgactcagcatgcttccactttatttttcctgttcacagtcaatattctaagtgttgtaaaatttgaacctctttcaggatagtcagtacccttccctttatatagaccagttgaaacaaacaaacaaacaacaccaaaaccaaacttaaacacaatagcaatttttcaatatacatttttaaaaagcactacatgtcccctcagggaatcaaaggataattcataacctattccttttttgttcaccttcaaatcaagaagttgttggaatacaaagccaagaaaaaaagcaaggggattaatagtggaaacagagcactttaaaaaaatatattccagtcagttttcaaggaaaattactggggccaataaatccttcaagagtaggatgtggtacttgccctcaatggcaagccaacttcattaaaagccactaacagcggactcaaatctaagctgttattagagatgaacaaaaatactacttaactattatcccttgctcatctgtgtctcagtgccccaactctagcaactaaaactgtcattctagaacctagaaaccttctaatgcaaactaaccaaaactaaccggaacattttttttattacagcaaattgaaaaataactgcactggtaaaattagtaacataaatgttgtgttctttctgtctcctatattacaacaaaagggtatttttagtataaattagtattttacaaatttccttgattcgagaattttatcttccactaaatgtctccataaacttggcaaaagcataatttactaaagtcactttcccgagtttagcttagtatgtcccacttgaaatgtccaagttattctataataaacttaaaactattggacaatggcaaaagctattttccatgcttccttccacgtgcaccttctgttactaaaatattctagtgaggtggggccttagagagcttataaacattcacaaaaggagaatttataatattgctagatctacatttatgcagtatcaaaaaaaaatcacacaatacttaagtttaaagttccttgaaaaatatacgatgttacttgatattcaatggtataaaaaaactctcagtagttccatgaatgcccatttaaaacctcaaatatagctcactgtaacaccgcaaaactcaaagcgaatatactcaagtttatgcacttcagcgcacagaacaaacattccaaaccgtcctggtaaaaattcagtagcaatcgtacagtccccgttaatttcctgaagttctgtggcacaaattcgggtcctcgagaacttaaacacaaagggaaatttaaaataagcagacttggtaatatttttagaagccgcgacatgcttatccctgaattgctcccagttagaaagagcctcggaggccgtggatataccggctctggctagcgtttgaaaccgctctctcagatgtcatggtctttccgaaacttttagatctaaaaccctccttggaaattcacaaagaggccactcaagagcagttgccattgtgattccgagctgccgcccgcttcttactactccctgcacacccctcgcccagaaccggggagctctccaaagtctggactgtgggccgaacgcggagcccaaacctcctaacggccgcccaagcctcgtaacggccgttcgtccagcagggctggcggcggccgggctgaagcgcccccggttcccgcacggctccccgcgtgtcaggccccgaacccactgggagaggattatttgggaaagctggactaagccgctgccgccacttcccgcggcaccggccccatggccgatcggatcccctgtcctcgcattcccgcttcgctgacaaactcggccgctcaaccgccctcggcaacccgcgcgttccgccaggcgccggggcctcaggcgggagtcggaacgctgaggcgggctctaggccccgactccgccgctccctcacatcccacagcccgccgctcccgccgcgcccgaggggcccgcccgccaccctggacacgagggagggagggaggccgaggaccgggcctgtccggtagccggttaccttgtagaaagcgccattggagccccgcacttccaccaccagctcctccatcttctcgtccgtcctcgcgccgggagcccgcctccgggaggtgggctgcaggcgcttgaggcccagccgccgtcgccgccgccgccgccgccgcgttaccgcacgccccccggcagcggcgccgccgtcactgccaccgcccgcgctcgccgtccgtttgcttcactgcccgccctctcaggcgcggcccctcaccggaagtgaaaccgaaacgctccccagcgcctgactgactgaggccaagggctccgctgcgcctcctgtaaacagtcaaacgatgtcacgtgacccgcgcagcccctcccctttggccccgccctctccgctccgcccttgcctcctctcgggcagtggagcacgcgcatgcgccctcctgggtacctgcctcagggtatcagggcgcaccctttggcgcgcgcacttggtgaaaggcgggaaagcgtaaagggcagtactaagtctggctgcctgtgcccgccgcggggactagaggcctcttccgtacaggaggaagcgaggacatgggaaaaggcctccagttgtcgaaaatggggcccgaccagaagtggaggggcattgggtagatttttcacggcactggcgtgggacctgtttgaactgcaagtcgcggcgggagggaagtaaaaaaaaagtgataaattccattggagaacactttgatctaggaacagtgataactacattgaccctgacttctgggactcttatggctaggatgcaaaataaatcgctctactacctagtgatttggggaagtattgtgggaactttgagtactttttaagggccaatagggtgtgccagaacttcaggaaatgttatccctttctcagacagtccccctcacactttccgttcatagttttacttggaattcgtaataaaaagagctgacagagagagttgaacacttgttaattcctttttactcgacttctgcctcttctacatgccccctgtaccagagggagggcatcagtaaagcagtcatgggatctgtctatgtgcatcattgggtcctttccatgcagctctctgcctttgccttctacagcagaaccaaaatcacctccccacccctttggcctctgtattgggcttatatccagcctgacccatgctcctttaatccagaaggcttgcatccaactgagaagttcattgaatgcctaccatgtgccaagcactgtcctaagtactagtgagtccttggtgaggtagcaacaaaaagactgtcactattgaaattggaacctacaggagtagatgtgcaaaattcaacttctcaaaaccgtaagtgtggagctggagaggtggctcaagggggtaaaacatttgctatgcgagcatgaaatcctgaattttctaattcctagaatctatagaaagctgggcctaagtgcctaaataagcactcccacaaagttgattccccagaagttcacaggtcagtgtgccttatctagtttcgaacaacaaaaagagagactctgggtagaaggcaaggactgcattagaagttgtactgtgacccccacacatgttttgtggcatatgtgtggccatactcacacacatggatgctacacacacatacacgcatgaagaagatataaatatggagtcacaactgtgatgtggtctataaagtgtggttatatcttttacagttggaaatgagcctgtctgtggtgtgagataagtgagcccggaagcaagatgattccaactggaatgtgacaagaaagacttatttggaagtgtgcacttgaaagagcaagggtgagttgtcctaagcagatggtagagggctaggatgtgaggcttccagttcccagcctgcctcagccggaacaatattaatgttgttgcaactccagctttaaagcagtggatcaagggccacattccttgaggctatggtaaacagaaatgacccattgaactaggatctttggagtagccacaatatattaagaatcctgtagggttgaatacaaatctcaccatagaccagatggggcataacattagctttaactccagtgatataaaaggggacatattgattgagaagattctatcttccaagtgtaagatatgtagttttctcagggctttcaaacatatcagtaattcgcaaaggttactgtcctaagacatagtttcatgatgtcatgacactgtgcataactttctttcccccttaaagttattaggtagagtccgattgtgtaattatttcacttcagttgcaaatatttcagtaagcatttatttcaattctcagcatgctcaccattagttcttacatggcccctcttttgctcatattattgtgtatattacttgtctcattctactagaaaacagttgtaatgtttgacatatcattaatagtttaagatagtgtttttaaggacagatttttttgtagggcaggttggccacaactcagaattagtagaggctatccttgaattccctgttctttctttacttctagtgtgctatatgtgtatggcttttgcatacacagacgtggtactggactgtaaatctgtttctcactgctaccattaaatctgtatttttaaaattgcttttgggacagtgtctcagtatttatccttggcaggccttgaacacatggtgatctatttgctcctgctaccaaagtactgggaataaaggcatatgccaccattcccagggtcacgaaaactcttgtgtcttcttcatgcactgtggcaagaattttgcgagtgtgctcttacagagttgtgtatgcacttcctgtttcttcttttgcactgattataaaacaggctctgaatgcttaatattttactgtcatttacaatacagtagaattatttatttacagttatttttctcattggactattagtactatctaggcagaaaagatatcttattcacccttgtactttaggtagattttaaatgtttggtgtttgttctcactgtggggatatgttgtggcattatctttcctcttttagatttctctggggtgggctcatactctacacctcacggtgtgggggggtctctcaatcctaatcggataccaaattctttcagagtcttagagtctactcatgcattatccaggctttcattctccacctgcttccctatagccactcttgccttctttttgtcaagtcgcaagacaaaataatacccctgcttatgtgccataccaatcaaactgccaccccaaacactctgatgggatttctggtaatgtttctttggctaaacctaaagtaattatttattcaagtcttaatgttttatacattctgacatcttttatcccttctgcctcacattctaaatttcacaatcatgatacttcctttgatgtcttgaaattatcaggcaagttgttagtctttttcactggaatgtaaacttaattttgaaaaaaaaaaaaaaagattggtcttttatgtattgcttaagtgcctgtgtcaccaatgtcgggaacacagtagatggtttctaactatttattgaatgaatgggtaagtgaatgaatgaatacatattgaagactcagcataaatgacatctgctccatgcctatacttcagcatgtctggccctactttggcccctatcttccattaaataactgtctgttgtctctgcatcgatttcttctatatttcatggttttgtaacttgagccctctatgcctttttattcctcagtcctagctgaaatgcccttcaagacactgcttaagtcagacttctttcatgttattttctctgaacatatcacctcgatttgacctctcctctaaaacagatattcaaaaaatagaataccatgttttagatgcatgcctctaaacccaatccaacatggagatagaagcagaagaatcagaagttcaagggcatcttcagctgcataatgagctcttgtccagtagtaggtacagaccccatctaaaaaaaactatcaaggtaatgcttactgtaggaaaatattaaatgacagtgtatttgcatttaaatgataacaactatagttagaatggatggtatccaaacattctgatatattcctatgatattttcacaactgatatctagtcatatccagaagactcaaggaagaaaaagattggcataagttaattattcatgagagatgagaagcttatcatgaaagatgtatctggaatagataggtcagccaaatgtggtttaggtttagacgacaccttaagacagtgagactgattcaaaacttggtgtagcatttgccattcagattgtgctctgtaaccctaaccatgacttcttgatagaattcaagatctaagaggagcagatagagatgctatgtaaggcatcacttgtacttgtcctaagttcttttccaggcaatggagctaataccaactgcttttcaatcaactagtaagagtgagcatcttcaattccttcatggcaatggcttggcttgtgcacccatataagaattcctggacacagatagtagcactggtataatttgaagacagagaaattaccaggcattgtttgtctggcagtagtaaaagagttttagagataagagctatcagaataggaacagggaaatagaaagtgccattagaggagaactcattaagcattactaggggactcttcagagttagtcttaagaaagaggagagactacaacatcctctgaattatataggatggagcacagtcagagtaatacaattgtagcactgctattatcacttctatttttatatctaggttgatatgactgagaataaaaatacacaagaatttatgtcactaagccttgcagcagaattgattgctatttgatggtttcctttagcactgaaacctgacttatgaatgcgcactaaagtacaatatactgaagaatagaaggaaatgaaagtcagtttggtcagtttggcttgaaagatttatatttgataatgctttctcctggtaaatggtaattttgtcatataaataagaaaatagtaatatgcaccttggttgaactattattcatagaaactgaccaattaattattcaaaagaaattaattcttccaaattgaggctgggagctgattttaatctggtcactgacattttgaacttctgagaaagctatataaatactaaaaatggaacaaatcttgtagctttttaaaatcaggatctctttatagtaataaatctgaaatgcttctaataaaactggaggggaaattgggcagagttttaaaatttgaagtaaatttatggtttaatacttgtgcattacaaagttgtgcaagtgaaaagagatgctttgaataaatagttctcaattccaatcactcttcctctcttaggaaaacagatgttggaacctccaattgttggggacaaaagccttggattcttcaggagtaagtaagcagatagagaattttcttcttcatgagcttcaggaatatgtgggcattagcatcccagatctttgggccaagaaagagaatgctgggaggattttcctgctgttgtggggatccttggttgtcaaaatgagaaggaggtatgttgtttaattttggttatcttgacacaaactgagacttccccagggaagaagtattgtcttaattgaggtattgtctttgtcagattgcatgtaaccaagtgttgtagggttttactaactgatgtggagctgcccagctctctgtggatggtatcattctggccaggtagtactggcttattaaaaaaaaaaactgaggaagcaactgggttggagcaagccactaaagagcattcccccacaacctctactgtagttcctacctctaggttcctgccttgaattctggtccagacttcctttaatggtgagctgacctgacagtgtaagtcagataaaccagtcctttccccaagtagtttttggttgaattattttgtcacagcaatagaaaacaaattaggagggaaggtatgtctagtttctacttaacttgtgtctttctgtagtgttgttttgcagggagtcttcttgatcagcctcaccctgcctgaatctgaagttctattacattatacttttctaaaatccagaactgaagtcccccaaagcgaagttactgtagtataaataatcacttcatagattctgcagtcagaaagaaaattcatcagacacatccaggtaaagagacttgctaggaggcataggatgtttggaacagaaaggcgcatacaacatttgagaaaacgtgagagcaactaaaaggataatttgatagcccaaataaaggtcagaactgttaagatcaaaacattataacccaaaccctagctcaaaatataaaacacagagagatagccaccatgaataatcaggatatttggatgaaagataggaaaattggtaagaattctaggggaagaaaaataaagagagtaagttgaataaaattatagaagaaaatcttcctctaaggattaaagtgctgagtctatggattgaaggtacataataagttcctgactggcttggtaagaagagttattatgacagcctgtgttttctaagataccagaaagatggtgtagaaggaatttacttgttcctgaagtgaattaagttacttgaaaaaacagaaaagtgctgtttttatagatagcaccctgaaagaaagcatcccggttacaaaaattgtccaggtgatgatgatgcaaggctgaggaggaaagacagttctagattaagcaaccaatctgctgtcttctctgatctgcagagaaagtgatactaacaggagtactctctcagcctctatggcaaagcaaggccgaaaatgatgcatctgttcttatgctatagtaaagatcattgctgcatttgccaaacattgctagtgctttctagttacagaaatgtggtggtatcttatgtctgagttctttttgttgttgttgttgttgttttgtttgttttagtcttcccctttctctgtgaacatgatgtatgcacaagtagatgacatagatgtgagtgtagaggaaaaggtgggtgccagttgtttcttgcaactgctctcagtcttaggtttttgagaaagtctctgcatttctctggagctcacaatcttggttaggttggctggacagggaactatagtaattcacctgcctctggtccctactctcccaatcctggagttttaggtaggcacgaccacactcagctattacatgggtgctgctgatctgaacttaggtccttgttattttatgcaagcactttaccaactcagacatctccccagtcaccttagtttgtaatttttattatttttatttttcacttttgatattagagaagagatcttcctgcattgctttagctagcctggaactcatagatgtctacctgcctatacctccactgtgctcagattaaagatgtgtactaccaagcctgctttattatttccacttttgtgagtctttttatgcttatgtttgtgtgtaattttttggctgcatgtgtgtctatgtactttatgcatgtctggtgcccatggagactataagagggctttggactttctagaactggagttacagaaggcggtaagccactatgcagatgctgggacatgatgcttgaagaactaggaaaagggtgacattagaggtgaaaaagctttgaattccatggatctggtgcttgtagaaatagcatggagcatggagagtaagaaagcaaaggatttttaattttttttttatttaaaacaattttaaatgtaaatagattttgatcatattcttccctttcctcaagttctttctgatcctcccccccccacttgcccaactttaagttctttctcaaaaaagaaacccaaacagacaaaaaccaatacaagagaaacctccaaaaccaagaccaaaccaaaatgggaaaacaacaacaacaaaaacaacaaacaaaaacccaaacagaaaaaaaattaaaatcgccaaaaaagtacacactcatgtattcacaaacagacagacagacagacagacagacagacacatacacacagacacacacacacacacacacacacacacacaagcaaacagtggaatccattatattaggccagctgtttctgaacatgaagccttccctggagttgttgatataccgtgtgtcactccattgtagaatactgatttttcctcttccagcaggtataaatgacagttcagtttttaacttttatccaagtgtctagagagtcattcattcattcatttaataaatctgtaacaaaataaatgaaacaatgataaaataaaaattatcatattgaaattggacaggacaaaccaacagaagcaaaacagcccaagagaaggcagtgggtgggtaggggagcgggggtgggggggggagggtataggggaatttcgggatagcatttgaaatgtaaatgaagaaaatacataataaaaaattggaaaaaaaggaaggcacaacaaccagagacctacatgtttgtacattcaggaatcccatattatggcatccacagaagcccctgtgcatgctgcctaagtatctgagttcatatgagctttactcaggtgatttaaaggcccttgttcttctgcctcttatactcactccaccttctctttagcgggcttccctagccctgaggagaggtctttgatggagacatcccatttagggcttgttgttcaaaggtctctcactcaaaagcaaaggatctaaatagctttacttctaactgtggcatattataatagtaatgctaataaaatttttaaaatctttgtttttattgacttttccagaaaaagaaggccaagaaggaaattggatccaagttaaaagtatctctattcaaatatgtattaaaactttttgatcttcaaagcaacttggatctgattcataaaagtgaactctgtaccctttcaaaaatcaagaattcaggaatgactttctgcatagaacagaactctccaaaatatatgcaaatgagataggtttctactccttaaaggtaccaaaatactttctgtgtgaaattttacttgtaaggtgaaaggatccatgtcattgtctgggaaggtagataagccaatgtttaggttgtttatgagtctgagcaattggtggctgagtttccgggattttggagtgttctccacatcctatatgtaatgactttgagatttaaaggttcttctttatttggtaagtttagaaaatcaaaatcaaatgtttaatgattttatttttaaaacgagttaggcataactagcattggggtgtggagaaattctaagtccagataactgttactgaatagttccttgggggtggggataatagtttatttttctcatttttgctttaacacatctcagcttttggttgtcattttgaatggacaaatgaagagttttggctgtacctttaaccaaaataatagaaacatcaattggaaacaataggagggagtgttaaatggacactgttggactggagggaaatttattgtattgacagtgtgataggagttctgggactggacacacacagcagataggtaaactcagcaagaaatctgagataccctttccttctccccttgctaggtcacaatgtgtgccttttgtttatggacccagaagcagccacaatgatagatgctataatacagacagataaaggacatcaaataactatatccactcttatctagggaagaaaagtgtcctttctatattatgttctaaaacttctatagttttatcttcgattagttctcccttgcattgtactttcccttttgtatgcggtttgttgtactgatttaacacgaagttttagcaaacagatagtacattgtttctggaccacatgcaaggttatgtggaaagatgggcagtgagaggaaataaaaacctttcaaaggacagggagaggaagatagactggaatgaaaacatactatatgtttcatcttactgcaatgggaaaatgagaaaaagaacgttatatgatagaagcaacactcaatatcttactcaaataaacagtaaagaaatatctgtgtcagaggaaagaaaaatagcaagcagaatgcaaaaataaataatgaatataaagcaagatgcaaacacaaagcaaaagatactagacatcatgttctatttgagtagatggatatttttcattagaatacagaaaagtccccagaagatattttatcaaagttgtttattcattgccaaaataatatgatttctcctggaatcccagtgaacattggatgactttttcccctgtatcagaaggcaatatgtaagtgtggcagatggcagagaccatttataatgatgaagaccttgaagtatggatccagaagtacaagaatctaagtcatgtttgcacttgggatttttagattccctgaaccctgaaatggacttaacaccgacttgagacacaaactttgtttagaccattacagtaagtgctgccaagaatggcattagtccaaacagtgggtgtttagcaaatcttaattggtgagacttcattctaagaagacaaagacttatatttatgttttctttggaaatttctagtaacaaaacgaggtgtaacgtagcttaagaaatgaggcatattatgtgttatttctcttcttaacctatatcctcacatttttcaaactgaaggccaggataaagaatcaaggcaagtgaggtaggtatctgagccatgaagtataaatattgaaagatatcattctatttagcaattacaagaaattcaagttatatagatttccactttaagtccctctcacccgacattacagaatgcacattttcctatatcaactagtctccccttcatttcttcagttaggacagcatgttccttcttccccaaatgtttttgatttctagtatatgtcctggcttactttcatatcattcatttcctttatgtaaaatgattgtgttttttaaaatcttgtgaccaccaagtttatagaaatgttgttgtttttgtctagcagttgtaccatagctgaactgtcaaattgagaagagtgaatagctagtttgtatttgttttttaaattaacaattaataaaattgaccttttaggggttagtcttttcctactttagttttattaacatcttcattttggagggcttatctctacatcaggcttgttactttgcaggaataaattgggtgtgatagtgcatgcttaaaatccaagcacttggggagtggaagcaagaatgatcagaagtccaaggtcatcctcacatctacattgtaagtctgagttaggagactccaattaacacacacccacacccacacccccccacacacacacacacgaacacccattgggactttagaattgcattttattacatactactagaccataatcaaggcatccctttctattttaagatatctttaatgggggtccccaatggaggagttagagaaaggactgaaggagctgaaggggtttgcaaccccataggaggaacaacaatatcaaccaaccagatccccccagagctcccagggactaaactaccaaccaaagagtgcacatggagggacccatggctccagctgcatatggagcagaggattaccttatctgacatcagtgggaggagagacccttggtcctgtgaaggcgcaatgccccagagtagtggaatgcaacggcagggaggcaggagtgggtgggtgcacaccttcatagaagcagggggagggaggatgggataggggatttctggaggggaaaccaggaaagggaataatatttgaaatgtaaataaataaaatatccaataaaaagatatctttaatgaataaaggatgtcagaagtaattataatatagtattaagccacgtagaattgcatctttatagatcctacacctaaaaaatattggactctgttcagatgccatctttgaggtagttattattgcttctatgcgcattctatcagcaatactctcagaaattagtagagctcttaatagagtttttaatgttacctaggtaactagataagaattaaaactagcaaagat

SEQ ID NO: 21 - DNA, 32546 bp, Homo sapiens
gtgaaggtggcccctccccagccccctcagaggcccagccaccctacccccatcccctaccccccatcccccaccttgttgcctctttggtcccaaacggtttggaaaatcctgacaggagcagatggtgggacagatggagggaaaagcatttcggggctgaattacacaaacaaacattgaaaaagtgattaaaaccccaagccacccctttccaaaaggccctgcccaccccagcctagagcacagcgggctctgaggtgggggcctgggggtctccgaataccccgcatctcagcgccagcatcccatcttctgcccagccccctctctgccagggaccacccccggaccagagcctagggcggcagagctgccaggagcacagcccgggagggggaggggacgggcctggctgttcccaagggagctgggccctaagaaacagcacgctggggcgggaggtgggaaagtcctgggagctggaaccgcagacccaaagtcagggatggagtgtgaggtgctgggggccctcaagcaaagtccctcactttatatgcggagcccaggtcacacagcagcgttacccaccccgtagaggagcgggacaaggtccttgacctctggaagcttcggttggtttcctggtctgtaaatggaaacaataataatagcactggaagggctgctgtgaggattaagagggagggagctgcgaggtgcctggcatagcgcctgcgcccagtcagtgcccagctaatgttggctgtcagtactcacagggctccacgtggctcctaggcaacccctggtgttgggagatcaggaaggctggggctgcttgaggtggtccttctccaaacagaagtctaggcttgaagatcctgctgggagagcccctgaggctgctgagctctgcaagatggagatggctccaatgggtccccaagaagagccctgactcctgggtaaaagcacccagttccatgccaagtccactgtcagggagcccaagagatagagaaagtgctgcatcttagctggttcctcaatatgagagtacagatttcccggggtgacagatccaggttcaaatcctggcatggccttttgtcttttggggaaagttggcaaaaacaacccctctggtccattttctgtaaaacctgcctttccagccacttccgggacttgctgccagaagcccgcagacaccctgacgtaagcctgccagtggtcaccccatcaccttctcccacagcctgtccggcccttgggccccctccatccaccaaaggaggctgaggccccaccccatctaggacccctccctcttcctcactcccacacctgccttcttcccaagtccggcccattgtagcagaggaggtctcaggcctgccctcttctccacagtgccactcacttcctggtcatatctgcctggtattacagctctggccttcccacagctcccctgctctgatcagtttctctaaatctgattaccttcctccctgcttaataaccttccatggctccctgctgcctaccagaggctctctgagacatgccttaaccctcaccttccaccccatctcttctccctctaccttcctttcccctaataatgtcccaccagcccagcaacccctgccccggatgaccaggatcttccccacaccagatgaaggggctccctgaccctctctcagccctaatctctcccatatgggagttggccttggtgggatgggtgaagtaatgccagcatctggggtcacatccaggccacacttgcccagcagagtagtcacttttctttttgctggtgaaagcaactcatagctggaagggcctcaggagttgaccagagagggacagtgacttgcctgagatcacccagccaggcctgccctgtttctgctcccctcaattagaagtggccccttcacagcctctgtaatcaaaacattgagatctttcttccataattccattgctggggagctcaatcctgccacttctcttggtctatcctggacgggaccgtttgaaaatcattcctgggtcatggcaaagggaccagtcacttcttggaagtggagtggagggcaggaggctgagtcttcacttctaactttatattcccttctgtctgaatgtattaaaacctggacatggaggatatttgagacttgagtcaaaattaagattttttttttttgagacggagtctcgctctattgcccaggctggagtgcagtggcgcgatttcggctcactgcaagctctgcctcctgggttcgtgccattctcctgactcagcctctcgagtagctgggactacaggtgcccgccatcacgcccggctaattgttttgtatttttttttttttagtagtgacgaggtttcaccgtgttagccaggatggtctcgatcttctaaccttgtgatctgcctaccttggcctcccaaagtgctgggattacaggcatgagccaccgtgcccggccaagatttttttttttttttgacacggagtcttgcactgtcacctgggctggagtccagtgatgcaatctcagctcactgcaacctccgcctcccaggttcaagtgattctcgtgcctcagcctcccaaataggtgggattacaggcatgcgccaccatgcctggcttcttggtttttgtttgtttgttttttgagatggagttttgctcttgttgcccaggctggagatggcgtgatctcggctcaccgcaacctctgcctcccaggtgcaagtgattctcctgcctcagcctcccaagtagctgggattacaggcatgcaccaccacgcccggctaattttgtactttgagtagagacagggtttctccatgttggtcaggctggtctcgaactcctgacctcaggtgatccgcccgcctccgcctcccaaagtgctgggattacaggtgtgagccaccatgcctggcctaattttttgtatttttagttgagacagggtttcactatgatggccaggctgttctcgaatgcctgaccttgtgatccacccgcctctgcctcccaaagtgttgggattacaggcgtgagccaccaagcccagccccaaattaagattttaaaagaaacttcctcgggccaggcgcggtggctcacccctgtaatcccagcactttgagagaccaaggcaggcgggtcacgcggtcaggagatcgagactggctaacacggtgaaaccccgtctctactaaaaatacaaaaaatcagccgggcctggtggcaggtgcctgtagtcccagctactcgggaggctgaggcaggagaatggcgtgaacctgggaggcggagcttgcagtgagcggagattgtgccactgcactccagcctggtagacagagcgagactccatctcaaaaaaagaagaaagaaacttggggaagccgaggcatgaggattgctctcaaaaaaaaaaaaagaaagaaacttggggaagccgaggcatgaggattgctcgaggccaggagtttgagaccagcctgggcagcatggtgagaccccatctctacaaaaaaaaaatttttttaattagctgggtgtgtaatcaggaggctgagccaggaggattgttgagcccgggaaatggaggttgcagtgagcgagaccctgtctctaaataaataagtgaaataaaaattaaaaagtgccccctaaaccgggatttgcctcccagaagccttccagcggcccagctctgctggggttgtccaggctgaacgctgcatccactgcccatagccctgggggattctcctcccagcctgctcctcatgacccagaaaagtggttggaattcccagccacctgtgtggtgtggctctgggggcggagggactgtgcatgtagctgagccttgcctcccttgcagagctgctgtggggaacctacaagacactgtggagggtagtgcatgtgaaggaggctgctccgtgacacttcagggctctgggatacacattcacacagctttgccggcaggtgccctagtgagaggaaaggtcacaccccagctctagactgctgctggcaccccagttccctccctgagactatgcatggggttagagccagaggcaagctagaacccagctctgtctccgagctctttccagtgggccaggcttccttggaggagtgagaagacttcccagagggtccaggggtacccagagttccagaaccccacccggagtccgaggttgccctatcccaggaaccctgtgctcccaatttgtctccctccctgggaagaccaggccagctctcattcctggcaccttaggatctaccggaggctgaggattgcctcattgtttccatagtaacagtgaacagcagggcctcctgaatcactgctgggagactgcactggtacctgcaagtatgcatttgccccaggaatgcctgggatggggcagcctttggtgcatgcacacaagcatatgcacacctttgcacacatgcacatccaatgcacaccccttcctcctcccaaacacacacacacacccttgcaaatgcaggcacgggcatggcgcttcaagccctggcccgctgacccagaagtgggtcagaacatcatcctgcctgacataacccactcccacagccaccctggcccactcagatgcagagagcatctcggggaaatgagggacttgcactttataataatacccactgcaacatttatagatacttagcacgtgccaggtcctgcgctttcctcttcacatgtaacatctcctgtgttccccaaacaccacgctgggatggatgccaggagagtgatttgccagaggtcacactgtagtgcggggctgagccaatgtgtgagcccaaactgtttggctccaagccttggactcttgccttcctcaccagaccccttgatgccagacccataagcactcaccccgggacccacaaacacagatgggtgtgtctggcagcaggtgggaccagagccaactagaatgccagcattcctgggcttgtcactctgggccatcatattccctcttcagcctccagccattcctgggtcggaggtatgaggggaggtttagacaacacagggattttttctttcacttatttcttcccagtgtgcagaaaaggaactttgagcagcaagaacaagacccactgagaatctcctgcctgggaagccacccgggttcccttcccttccagcaaagggatgagtccagctgctggatctgtcctccagccttctctgagacctctcatgcagacttttaacaaaggggcctgaggccagaggctgggccagctgcatcatcctgagcggggagttgggtgggccaggtagggggatggcttccaggaggcaattttcagcaaaaggatggtctggcagtgttgccaggaaggcagcaatgcccctcactagaggcatcccaggttggcaggcactggatacaccctggtgaggaaatttgagacaagcaatgaccgagtccctgcaacatcctcgtcatcatctttgtcgtcatcgtagctaccactgattggacacactttgtgtcaggcgctttaagatatgatacaactgccactactgctaataaaaatggcagctgctaggaactcagcccttatgtggctgatcttcattgactcctcacagaaccctatgaggcaggcactattgttaggcccatttatagatggggaaactgcggctcagagaggttcagagacatgtttacaggcagaggcagcaagatgcaggctctacctggctgctgcgtctgtggtcggctcgcctgggagttgacctcctgagagctaagcagcaggcaaggcagcctctgccagccggggcctcctcctggggctgttcctgcgctggggcaatgtgggcttcactgtggctgaggtggcgccctctgctggctgtgcccaggctgtgcagagccacgagggaggtcctccgtggacttgggttgtgggaggtggaccgaccctggagactcagggtcagaccttcactgcggatggccgctgttcgccagtgagaacagatgccaaggtcactccggcagtctggggctgagctgaggagtgaacgtaaaggcagtcttcactcccaggcttttgtccttctacccctctctcatcttcccctagctgcctccacctcttccactgccttccactctgagcctctaaaatggggcctctggccccactgtttctgaggaatctgggtgactggtgtgcagctgagaatctgtctccaaaggcaaagccagggtccaggctttgaggcctggagctgccactgactggctttgtgatactgggtgagattctcaacctctctgagtgctgttggatgggagccttcctgtgtagactctgaagaactgaagagatttgaggaggtctcctttacccgattagaaggctctattctgccgctcctccttctcccttcccccctccccgtcctcctccctccccatcccccccaccccccgcccccgtcctcctacctctttctttctctcttcctcttctccacccctgaccagaggaggcattttaggctcagaaagctagagttacttggccctatgtcacccagccaggggtttctggcttcagaatctggactttggagggctgacctctgccctgcttccttttcatctcctcctatatgtctgatccatcagctcctcctgcaaaaaaaaaaacaaaaacaaacaaaaaaaaaacatcccaaatcctccatcgacttctctctctgtcccctgccaccacccaggccaacactgcatcctttctggccgtgagaccgcagcaccctccttgcttcctcacagggcacctggccccccactcctgttctctgccatccagcctgcacactggagcgggcaaagtgagccttttaaaatgcaaatcacatcccatctcatctcccctcgaagcttcccattgtgagtgggatcaacctaacctcccttccacacctggaggcatgtgttatccaatcccacctgccctcactgcctccttcttgcttataaagctccaggctcactggcttctttctgtttccccaacatgcaagcttgctcctgccccagggccttggtacttgctcttctggggctggagctcccttcctgtgctgtgtgctgctgcctcctttgccttcaggtgtcagttcaggtgactccccctcagcccacaccatgtaacgtcgccccacccagccactctccaccacatgacttcattgttttcatagccactctcggtctctgaagatatttcatttggtcatcagctcacttgtttattgcttttctctccccctggaatatgagattcacatggggcagggaccctgttgtcttggtcacagctgtgatgctgctggcagttagtaggtgctcaataaatgtttgttgaataaataaagcccttcctagccccagcttctcttgcaagctcagaacaatctttccaatctagttctacttttcctgctcccaatgtcacagctcagagcctacagcaaacgcccacataaacattctgcctctcctgctttccctccacagaaacactccacttttccagacctcagggctaatgattcctctttccctctgtttctttcctctcacttggctaacttccacctgactgtcagtacttattaagctcaagcatcacctcttcccagaagcccttcctgctttcctctcaagttaattaccttttctgtccctgtaggccccaggtgcctcctattccagaaggcagtcccctctttgtattttaagagcatctctctcctcttccccggccatgagaactccctaaggactaggaccagtctggttcatcactatgtcctcagcaccaccagcactcaggaaatactaaactggcctgacttcatcattgccatgatggggattttgaggattagagaggctagatcagtgtctcccagctgtatgacccatggcaagccccttcttctcttcaagcctcagtttcctcatctgtaaaatgggtataattccaactcctctgaggattcaaagagtcttcccttatgtacataatgtgtcagcacgggaaaagtgttgggtgagtagggggtcccttgtcttggccctgggattagcaactgcctctgtgagcaataagtccccttgagcccttcagggaaggagattgatgtgatgtcctctggtgagccctgagccctggatccttgtcctcagaggtccttagaggtgaggggatacggtaggcagactggatcaagccctcaacttgcagccgcataatttaatttgagacatgtctctatagttcactggctgtgtgacacagggcaagtccccttacctctctgatcctcagcttcctgatatggaatggaagttaatgacacataccagcctaagactcaaaataacatggataaagtccgggcgcggtggctcacgcctgtaatcccagcactttaggaggctgaggtgggtggatcacctgagatcaggagttcgagaccagcctggccaacatgatgaaaccccgtctctactaaaaataaaaaaattagccaggcatggtggtgggcacctgtagtcccagctactcaggaggctgaggcaggacaatcacttgaacctggggagcagagattgcagcaagccaagatcacgccactgcactccagcctgggcaaaagaatgaaactccgtctcaaaataaaataaaacaataacatggataaagtaggtgctcaattattatatccccaaagcaactcctgacctcctgattcttcctgtgatttgcagggcgggtgaggggtgtctagtgaccatccttgactggggccatgaccatcctaggctataaaaaggaaacttcctattctaaatgggtacccggggctggcttgggcacctgcagcctgagttaggtgctgagactctggacacgcaggagggtccaaatgctggtgaccccattaggtgtcaatgtgtaagtgaccggccagccctcaagggggtctctgtggagtcctccaaatgaagcccagtgagtgcagcttgggaggacagaggcgcacccttagtccctacccaggtcctcatggtttcactcattctttcactgctgtgtttccagaatattacacagggcctggtccataataggtgctcaataaacatatgatggaagaatgattttttttccatacagtcaacaatcatttaatgagccccaactgcatcgtaagccttgcgctaagggatggggtacataaagtggctgggtttttttgagatggagtctttctctgtcacccaggctggaatgcagtggtgtgctcagctcactgaaacctctgcatcccaggttcaaatgattctcatgcctcagcctccagagtagctgggattacaggcacacaccaccatgcccggctaattttgtatttttagtagagacggggtttcaccatgttggccaggctggtctcgaactcctgacctcaggtgatccacccacctcggactcccacagtgctgggattacaggcgtgagccagcgccctggcctgcagtggctgcttctgacagctccctcccaagttcacccagggctccactaaatcctcccagccagctctcactggctgccagattccaggcaccagggctttccccagaattaaggcccaagcaccccatgcatcatgaggactgagaaggctgtacccccacagtcacaactctccaaatcctccaagccccctccttcagccgccttctctctcaagccctcaggcactgccatctcctccctcccaatgccctacatctatctaggttttacccaaagaggccagcagatggcgccaaggttcccctttccccagcgctggactggaggccaagaccccaccaggaccctccctccttttctcccctgcagggacgggagtagattctgtgtcctctaactgaaccctctccttcctgctggttcctgtgctggaggcctgaagaggctccagttgctcctgcgggcctcctggttgtcttcctgtctgatggatggggggtggggggtccctaggggctaagctgcagctggtggggcggggccgggtggggtggggcaggcagcagctgcggggagaaagagagagaagataataaggggagagaaagagaaagagagcaaagagaaaagagagagagaggtgctctggctccggggctcttctcccaaacgggtcgaggtcccagctgaggctctcccaggacaaggtatgtggcgggggaaatgatagggctgggcagtgtcaccctgccgagtggggcaggtctgggggcactgaggggatgggcaggaaaattctgctgctcaacaagagcccctaagctcgcttccatctcaccccttccaaggtgaccaaggaggaacacagggccagcgaaggagtcctgggtgggcataaggagaggagggttgtctatcgctcctcttgacccactgtgtgaatctgcaccaagctcttcccatcggtagacctcacttccttaatgtaaaaccagggggatggagaggaagaccctgaagacgtttctgtggcagaactttgcaagacgtctcctttccaaagaaaattagcccttccagggcttctggaaaacctttaagacccaaaggaatgccccgctagtagtggaatttcggatagtcgtgggagggggctcaggggttcttgctgagacaaaaggccctgagccctggtccatgcctctctcctccaccttgtttctctggctgagatgagggaagggggctggagccactccccttctcagagatgctcttagagattgctgcagactgttttctggctggggaggagctggccccggccaattctagagtctcacgaatctccggatgggtgaagtcactctgggtggggagacagttcagttaagcacagctttgggagtcagatcagcctgtgttcaaatcctggctctgctgcgggtccctggacaagtcaagtagcctgtccaagctgcaggctcctcctgtgcaaagtgtgcagagtatgactttacagggttgccctgagaattaagccacataatgcaaagaaagctcagcatagtatctggcccctggtagacgctcattactgccctcactatggggatgaaaatgaaggaaaaggactggcctggggtcacagagctggactctccagtgagacagagcagcctcttcccaaccccactggaaacacggagccctagtgtccacttagcactctctgctcaccccagccttactgtgatctctcccctctgctcccgtctgccccagccgcaaggcctcgggtctaccgtggaatgaggggatccctaggcccagggaagggaggcgcgcttaggggtgggggcacaaacgggcatctcggtggcacttgtcctctctctaccctgggaaagggcagaaagcggcagccaagtcagggctgtgcacgggagagagagtgaccgcggcgggggcgcggagaaccccgctgggctcccgctcggtgagagggcgggagccgtgggtccgcgaagccccttcctccccggcagaggacctaataggcagcgggggcgggagtgggggcgccctccggtcctcaccccgcccccgcacctctccccgcagcgggggcgccccgccccccgggcgcccgacgtggacgcggccgccgccaccgccgccgcgcgggagtcgctgtccgcggagccgacatgcaggcggctcggggcggcgcagggcggccggagcggccgggccggccgggccgggggccggagcgcgagcgcgagcggccgccgggcgccggagccgcgtccccctgcgccgccccgggcctgccggccggaggagccaccatacaccccgggtcgccgagcgcctggccgccccgcgcccgcgccgcgctccgcctgtggctgggctgcgtctgcttcgcgctggtgcaggcgggtaagggggcccggggcggggggccggcgccggggcaggctcctctcgagcccagctacctgggagtcccctggtcctttctctgccccctagggactcctgtctcggcccaaacactgctcccctaacccagcccccagcgtcttcctacctccttgacccccagacctgtccttcagtttccaaatctcccctgtcacctcagccctgggtttcctagggtcttgtggtccccagtcccctaatcccattcccctaaccccaggtctttgcctcagcttccctagctcccttctttgacccagggagcagctgaggacaccagttcccccacctgggcctctctctgtgtccccaggacctctcaaagccctgcaagccaactctgcaggggcagatggggtcccgctgtgcaggagcacgtgtgaaggggatgggggctggcacctgagggcgcagggcgtggggtgggccccggcacccctgatctggtacagtgtctggcctgccccatggggccggcccgtccttgcccagcctctcctgccactctgtctttgtccctcctggctgccgctgcccggctcatctctccctccgtggctcggggagcgctctctcgcagctgtctttctcagatgccccacttctctgtcctctggttctgtgtctgccaccacctgtctgtgtcctgtctctccacctccccctccatgtctggctctgtctccctcaggtcccaggcccagccccctgggtctcaagttcactctctgtggggtgaggggtgctgctcaggcgcagctctgccccgtgctgcacctgccccttggaagatactgagccttatgtgactgcactgcccctctcctggacggttttcctcactgacccccactatccctatcactctcacccccacttccctcctgtctcttctggagtgattcctcattcatcctcttcccctacctgttctctcctctccactcgccatggaggggccctgctctgagtgaccccatcttcccctgccacctccccacctgcatcttggggctggaagagcatggataagaggctcacacagactcttccgcaggctttattctgcctgggccaccacagctctgaggatacttctgttctcctcactcccagtccagggctcaccccagcctgacacttctcgatctctgggtctttctccttcgcgcaaggtcactcattggacagggcagtattgtcaaaagagcactggactggggagtccttttgtctgcttttcatcagctaaccttcagtttctgtccacctatgtcccctacataactctctccacaactctaaccacccatcccttagatagggccccggcccaggcccatcactttgagccttggacccctcatggggccggcctgtggccagcaggggcttccgtcccagtcatgaggagcctggggcctcttgggcttggttcttcaacccactgaagagctgagagccatgtcactggaccccacttgaggccttagtttcttccttcccctcctgcatggccttccccaggtttccccttcttacttatgagacagtgggtctgggcctcacaataggggatgctcaggcttaggtgcctccccgtcccccagacagtccctcagccccagtgaacgtcaccgtcaggcacctcaaggccaactctgcagtggtgagctgggatgttctggaggatgaggttgtcatcggatttgccatctcccagcaggtaatgctccactgtccttaggagggaaggacacatcaagacagtagtggcagatgggggtaggagtgtggcagtggtggtgatggagaaatagaaaggaaataggaacttggggcaagggagatgaacagcaatttggacatatgtctgaaaattggggccccattcagacatatgtctgaaaattctctagaagagaatcagtcagtgagggagggtttgggaactttcaagtggaacacagaaattaaggttttgatctcagagacatctgcatttaggacctagctccagtgcttactagatgtgtggccttgggcaacttccccaacctctctgaacctgtttccttccctgtaaaatggagatattgatagcggaggtgatggaatgatgaagattgtgtatgtaaaggctttgtcaccactgggaggtgggcaggagcggggctggtcaccgagtgttgacagcagtgaccggcgcttgtctgcagaagaaggatgtgcggatgctgcgcttcatccaggaggtgaacaccaccacccgctcatgtgccctctgggacctggaggaggatacggagtacatagtccacgtgcaggccatctccattcagggccagagcccagccagcgagcctgtgctcttcaagaccccgcgtgaggctgagaagatggcctccaagaacaaaggcaggcccgggtcactgttaagaggaatggggtggggtgaggggtggtcaggaccagaccagtgggtggcttgaggaaagctctgtctcctcccccttatcccctgctggcaagtaaagcagtacctgagagagggttcacgctagtccctgacaagacgctgagcatataaactccctttagacttggtcctatcactgccaccccaagtagccatcagtgcattctagaatgtatgttagatgtgtgggcacctgtagaaatcagcactgttgtcttgggcttggccctagaggagtggctgagggaggaaaggagtgctggatctagtgtctctctccctgcagatgaggtaaccatgaaagagatggggaggaaccaacagctgcggacaggcgaggtgctgatcatcgtcgtggtcctgttcatgtgggcaggtgagtctggcctccgagaccttcttcttccctcagattctgggaaatggaggactctgaccagccccttctctcatgaaaaaaagggtaaggggtttggacatctctaaggtgaaaagtctccaagtcctgccaacgacagttctgggaaacagatctgaccccttctctacctcactcttcaccaaaaaaccagcatattgttagctgccttataggattagatgagtacttgccttcgccctccctcagaagaggttcagcttcttggggctggacacttccacaggccttttacctctggtcatggccacagcctttttttcttctggggtgctgtgcctccaggggtccaggcctgggaagctcaggggaagtcactgcctggcctggggacattctcctaacctactcacccttctagacccagccaccatggctgtgagacagccaccgtgaaaactccctcaatccatccattagaatggccctcctgcttccacacccccaccgcatactgttcactcctctctttagcccttctttaaccctctctttagcccttgtgttagttcgttcggctcatgtctctcctttacctgtggtctgtgagctccctgagaatgaagaccaagtttttttttgtttgttttgttttttgagacaaaggttttgttttttgagacccaggttggagtgcagtggtgcaatcatagctcactgcagccttgacctcctgggctcaagtgatcctcatgccttagcctcctgagtagctgagactacagacatgtgccaccatgcctggctaattttttattttttgtagagatagggtcttgctatgttgtccaggctggtaaaggccaagtttcattcatctttgtactcaattcaaccagcatttactgaacaatcactccagcccaaacagtagtgctacaatcatgactaagaagacccctctgcttgcaaagaactatctgggcgaagccaggcccaaacttttcttttttcttttcgtttactcttcttttttctttttcattttcttgggctgaacttaaactataatccagtgtgatgagtgctatgatagtaccatgtaggagagcagaggagagggaataactgtgggttagaaatcaggaaaaacacagagaggagataacatgggaattgagctttgaaggataaataggagttcaccaagcagccaaaagaggaatagtgttcagggcatggtgtgttcaagaaacaaagtaagctcagtctggttcagggcagctgcaatccaagaaagaaggtagaacgtgggggagtaaaggatggtgaggctgcagactggagtcttttgagggatttgaataccatgctaaagctttattaccatggtggttgagaaaggcaggctgtattgtagaagcatttgggaaaaaaatgctccttaggcacacagaaaaacaggcacttggaaaaatgagggaaaaacaaagggttgtacaaaagaggaggtttgcttatggtgcgttattagatttggcacagacagtatttatataatcataacaatataaacatagcgaattaacccaaaattgtgatgtaattttgttaggataatagggagggaagtagaggaagttgttatgctttatctaccatgtttggaagtcaacagacttctaaaatagatcaagaaataacattctaaatatagaggtaaaattgggaaaacacctagaaggactggagttggctgccttaatactgtctgacttttaaaaaacattctgttcatgtattattagtttgataaaactaaacatttaacagactgcaggccctggagttcatgtcctagttccaccactgtgtgaccttgagttaagttagtgaaactctctctgcatcagtgtcctcacttgtaccctgggaattataataataggtatcctcacagagttgtgaggattaagtgagatagaatatgtcagtgcacagcacagggcctggcacgagctcaacaaatgctattattgtttctattttcccctcaaggaaaacaggagctgtcagaggtttttttgtttgtttttctttgagacagagtctctctctgttgcccaggctggagtgcagtggcctgatctcagctcactgcaacctctgcctcccaggttcaagctattctcctgcctcagcctcctgagtagctgggattataggcacctgccaccacgcccagctaatttttgtatttttagtagacagggtttcaccatgttggccaggctggtctctatttcctgacctcgtgatccacccatgttggcctcccaaagtgctgggattgccgggcatggtggctcatacctgtaatcccagcactttgggaggccaatgtgggcggatcacctgaggtcgggagttcgagaccagcctgaccaacatggagaaaccccgtctctactaaaaatacaaaattagccggacgtggtggcgcatacctgtaatcccagctactcgggaggctgaggcaggagaatcacttgaacctgggaggcagaggttgcagtgaaccgagatcgcgccattgcactccagcctgggcaacaagagcgaaactccatctcaaaacaacaaaaaaacaaaaccaaagtgctggaattaacaggcgtgagccaccgtgcctggccactgtcagaggtttaaaggaaaggagaggaggaggtatgatcagacgcatattgtaggaagatcagcctagcagcagtgaaggggtggttggtgagggcacaggtgaaaacaggagccagagggcagagggagggtgctgcagtagtacaggtgaggtacaatctggagagaccattggcaagcactagtgggaaagaagcaggggaggcaggaacccaggctctggcctctgactgctcacttgtcccccctcaggtgtcattgccctcttctgccgccagtatgacatcatcaaggacaatgaacccaataacaacaaggaaaaaaccaagagtgcatcagaaaccagcacaccagagcaccagggcggggggcttctccgcagcaaggtgagggcaagacctgggcctgggtgggccaccctgtgcctcatgctctggtaatccctggactgcagagggggtcagctcggggactggcatggcgacagctgggcagagccagacttggctgctgcctgtgtgacacagggacactgcaagttgattttggatcctctccttttgcagggtgccaggggccagtggtgatttgaagaaaaaaaaaaaaaagcagtgagtggggagggcagaattcttggttggcgcgggacaataggagtggggtgtctggcccattcctgctcctgctgtgccttgtgaccttgggcaggtgctttaccgctgtaccttcatttcctcttctgtaaaacagatatgaaaaccttttcagtgcttgccctcagcagctaagaagacagacagtagagaatgtgagaggatctcatggttctgatgatgattatccaacaaacatctggccctctctacatctcttccctccatctccttgtaccctctggcttactgtcctctctctggcgcactttcctgaagcctcttattaactcccatctccagaagcacctcaacaatgtcagtggctgaggctgcactcagagggatgactgctgggggtagactgggtgccaggggccatgggcccaggacccagtcttggccattcagttgagtgaggctgaaggctgggtttgaaaaggcaaaaagacaagacatccaggcagggcttctcttttctttccacaagggacaagagcttggcttatttaggctacagccctgctgctgctcccttccttcttctgtcctgtttccagccttgcaagaaggctattcacaattaggcctggctgcttctctcatttttttcctcccagtttccaaacaagccctcagtgaacatcattgaagcgtgactgcctgtctgcagggagaaggattccatttttcttctcagctggtccccaggcccacgggcacagggagagggacaactgcagcagtggggaggaggcacagctagctgcacagttctctcttctccttgtcctagtcagatgaaggaggctgcactacaaacccaaattctgcaaaaaaataaaaataagccacaaaactaaaaggcctggccccattctggaaaaggcaaagctgcatgagacacagccttctgcctcctcgcctctcctggactggcttcctctttgagaaaatgcacaaagccctgggagatgacaagcacaaggactgactcaagctgtgtctttcagaccaaggaacatcagagaagctgtggggctgcctgccaggcaggatcatggctgccatcaagccttttctggatccagccatcaaggacatgtttgtggtgtgatgcacacttttgcaagcgtgtaagatgttacctggtttgtctcttttggaaaacaaaaatcagaaggctgcattctagagggcagagaaattcccccgaagactgagctggttgcctgcatcctctatcttctttgacccttatgactgaaagatcatcagtttggaaggtactggtccaatttatttaggaagtatctcttggagtttcagaaatgctagcttggacaactgaaaagtcacatcacagctggcattctgggggctaccaaaacaccccttctggagtagaagctgctggaaggcaggcctgagccattcaccacggacaggaagagcagctctggctatcaccactggcctctggggtcttcatatcttgccatctcatccagggttccatgaaagttacccagggtcctcatgtccttccttagagcctgagtggtgtgaggtgacaggtctctctctccactgcccctttctggtttaaaaaaatggtgcttgatgagggaaggtagactcttccctaggactgacgagttacggctgccagatgcctgcatgggaagaggtggacatctgcatcttccattggtggtcaaggatgggtgtgggagaaccacacctagtgcaagcctggtactcagtaaatatttgttgaaatgaatgataagagcattggtccccaagccagagagccagaagccatcacccaatgaccgccccttccttccggtctacaagagctctcaaggctgggtctgccaccactctgctttgcccaagtgtgacagcactggggaggagagacaggataaagggcagatgtcagcaatactaagggcttcctcatgggagggcatgaggctccactcattgtcttgtgacttccatccctgctgaatggggctgcaaggccaaggctccttaggggagaggtccttacctctgatccacttagagcaataaccactttttaaatgtaaaataaaaagacaaatgaaaaggcacatccttgtcttctggtaaatgcccaaatgttgccctctttttctggcaattggcagcaagtcaggatgtgtggaggagggagtcagtttctctccattttggcctgcagcttcttagggacatgcctgccagccaagctggagttggaagggaaatctcaaacagatgggggtgcacgtgtaggagaagaaaatagctgctccatcatcctattactgaggctcccccaaaccaagcttgggctgcctcactagataggtatgcaggctggtacttagtttttaaaacaaagggttttcccctctggatggggctgggtgcttttcctggccaaaggaatacaattcttgtttctccccagggtaaggaaggaagtgaaggggaacagcaaaagctgctttctgcagctcagtattcacagcgtgctgttctaggctgttaaaggaacaccattatgatcccaacagtaggctgaaagagtaatgatgacattagccaaggagcaaaaaccagtaaatggggtacctcgaacattcctgtccagagccaggaagaagcttggagagaaaatgtccggtgagcagggcttagagttgactgctgtaggttttgaaagcagagggaaagaaggtttagaggctgcacagcaaagtaggaaacttgagttgcacaccgactctaagccaaacctcagagaggtacttcctaggccctctgtacccatctagtgccaaatgatggaaaagcccccaaatcagcactaggtatagtatagtcagtggggctcagggagctctgctaatgggggtttccagtcttcaacttaatctgtgcctgtggtacatcataaagggtatgagagaaaaggaggtaacactcttggcttagataaaactccattccctttaattacctccctaaactcccaattgtataacaattgagccttccctgaatccactgtagttgcaaagtcgaaccctacacagctagacttgggatgtgatcctttcaccaccatcacatagatccatggacattttctcacaactgtggaaaggcacaggcaggtctttgagaccaagagacctcacttggagactaccacaggcctgtgggagaaatgctggtctgagagacaggagaccctgccttgtaatcacctaacacctcaggcaagttaattctctgaggttaggtcgtggtgtccttatctgccaaaaacagaatttagaagattcccagactctacctacttcctacaataggagccaaggtgcatcctcctaggagcacgagggaaacctcagggtctgagggaaggaagacagactggtgagtgtttctatgaggcaagagtccttttctcctcctactcttgtcccctagtttttcagaatgggccttctcaagaatgcatttttaagagttttggttcaaccctttacaaaaatgtgcaaaatctcaccaacccattaacatgagctttagatttctgactctctttaaacctatttgatggttactggaatgtgcatttaagtagcctccaagaacaaattgcttctataaatgggacaccctgctcaccctcctcccttgcccagctccatcaagctccatccatacaaaatattaccaaaccttcaaatgtgacttgaagttaagttgaaggaaaactgtacacaaatagttcctaaccaggtgcagtggctcacgcctataaccccaacactttgggaggccaaggtggggcagatcacttgaggccaggagttcaagaccagcctggccaacatggtgaaaccctgtctctactaaaaatacaaaaattaactaggtgtgttggcgcacacctgtaatcccagctactcaggaggctgagacatgaaaatcacttgaacccaggaggtagaggttgcagtgagccaagatcgcgccattgcactccagcctgggcaagagagtgagacgctgtctcaaaacaaatagttccttagtgatatatttcaggactatcacttagactgctttaaaggttatccaaaatattatattccaccccctttcaatgggtgctgggaagggccagattttccgtctatggcatgtcccagttgtcacagggggaggacaggtggggaggaaggacaaggcaggagcctattcatttaggaattccaccactgaccagctgatacttcctgtgacaagtggaatttttttttttttttccctgacaggtgctctggcatacaaagcaagcatacactaaaatcagcttaggaataattgttttctcttagaaaagcagaacattactaagagaagcagggaactccactttctagctttaggtggttgggttttttcttcctataaaagctcaaaataggctaattagagaatgacccccttcctcttggagaaggtccatctctccttttcctcttcacttttccgtaatgtaaaatggacaaaagatcctatctacacctgataggaacaaaacagatatgcataggttaaggagagtgcctcagattgagacaagaatgtcaagttgctgagtacttagcaaacttatattgagtcttttgcatggactcaatattatattttgtctagaatttatagacaaaacttatagcacagcaggccagatagcatggctaaacatgttgctacttgttttctcagcatgaactcagatttttaaagcactggctaatataggtgacaagttattattgccttcccttttttccttgcttctgggggtaagtctaagaagctttggttcacgaaagggatctaaggaacactgtgtctcccacatctacccacgcttatccaaccttcacccagtttttagaagccgcagtttctggagaaactgggttatgaacaaccatcaattctgtaccactgattctggtttcttacatccccttcaaagagagaatgctcttggatagcatggcttcttccacaatcaatgctagctctggagaagcagagatagggaggccaatcacacagccatgggaaggaataaaaggcaatgcctgcctgatcacggctgagccatcttccccctctgcaaaaactgaggcataatgatatttcaggctctccctatgtcaggctcctgacatgcaccatatgtagctgcaaatcccaatcaatttcaacatttcttaactgctagaacacctttctcaacactgtaatttaccttcaaaagaatagggagcaagcaccctcgcctttccagtaccacattctactaactgccgcccccctccccaccccactaacctacctacgcaaaggaagaaggcaaataaccctccatcgaagcctacgacagaccgccacagtacatatgtcactgacaaagaacttttatttctttttaatgacattaaacacaactgctacaagggaaaaaacatgataaagaggaggcaccaaacttcagtttcataattgaaactgacaacgccagtaaatcagggcctgcattcgaaactacaggttatttcaggctccttacttgtaagtaaacaatgtaaacagcatatttttactctgctttgtcaagacccccatggtgggaatgtcgtcatggatgaagaaagcagttaaatgcacctaacacttgcttaaaaaataatacagcaagaattccaactgcaatattagacttagaggccaataccaaatataagagatatgcagctttgaaaagagatgaaaactccagattctacccagtaccatctttaaggcgaacatgccagataatgagttttctttggctttgttttttcttcttaaagaataccatgttaaccactagagaacagctctctcctcccccagtccaacagatttaattaagctgctaaagctttggaaaaacagaattatttgagctaagaggaaatgtgattgtcacattttctagttaacctgtcactcatttgatttggcaaaggcagtgctcctattacacattcagtcttaaaaccccatgtaccaggagggcacgagtcttagatttttgcctaggcaaaatcctgtcccttcactccttgggttttctgtagggaactagactacagttccctactgtagctgcaatgctagctattccaactacatttaattttaactatgctatggtcccaaaggtggatgtttggcatgtctcactccatcaacctaatttagggcagcctggagaagtgaccgatgtagtaaatgccaagtaggctaactaaaataatagatttcaactactgcctttgaatagaacttctcctttgcattttggccccagaatttaaaacaaatgttcaaggaaaagcaaatccttgactggataaaaacagtaaacacttagggacattcacctaaatttattgttggcttaaatgaccaagcgttccccacgtccgtttctaaagtggggtaggatgtttagaatgcattactcacacagaaagatgggattgatgaaatcacaaaactaaacacaggctatagcaactatgaacagccttcacagagaatgaacaatagcacaaatgccagactgcaacacttcctaaaatgatgtctatagctatctgtaaagagagaataaccggccaggtgcagtggctcatgcctgtaatcccagcactttaggaggccgaggtgggcagatcacctgaggtcaggagttcaagaccagcctgaccaacatggagaaatcctgtctctactaaaaaatatgaaattagccaggcatggtggcgcatgcctgtaatcacagctactcaggaggctaagacaggagaatcccttgaacccaggaggcggaggttgtggtgagtggagatacgccattgcactccagcctgggcaacaacagcgaaactccgtctcaaaaaaaaaagagagaataaccaactcctaagacatccattaagacagacgcacagtctgtcaactttggttagaataccaaaccttaagatcaggtaatgcttttgtgcataggctgtcacaactatattacatccacgttagcatccatgtgaaactaggtatcaggggcttgaccaaatgagatggtaacatccagggcctaaagacacctcttgttaactaatatggagaaaaaagagtgcctttccacactctcccacagaatggaggctccctaactaacactcaaatttggggttcagcaaatgaaactaaatatcaactgacaccacaatagcactagcctgccctagagtcaagactctgggtgggcagctcttcaataaagacagcaaggaggccatcctgaagaggtatatccacgtctaacaggttacaagaatactgccactagaatcctaaagagcagagtggtcactggggggtaaaaagaaaaaggaaaatccttgaagaaaggcaaaggagacaaccagtctcaagaccacaaggtattataagtcttctgtcaaagtaagatgtataagatttgtaaacactattgtgcaaaataagttcaataaggaatgaaaaaatcccccccacccacaaaaaaaaatcaaggcagctagtacctacagaagggagaggagaggatttactattttaatttgtcctttcaataggattcttctcctgctccatcctacttataatgtcctggattgccaactttaaaatactgacaggtattcagaggattcaaataaaaaagtaagaggggttgttaaaagtaacttatatccattcacaagttatctaacactggctcacagcctggtaaagaatctcttccttatggaagattgaacaatgatttctttgaggtaccagaaagtagactttgcctctgcagagaggtgggtcttttgcttgaacctgggtgttctggcttaatgctggctttcaggaggcagctaccttcaatttaaattaaaaaaacaaaaaaaaactataccaaccgaacgcttgcttaaacacagacacacacacacaaaatcaggagggacttcatacaaaaaaattcaagtcggcaatgggcatttccaaaaggtgacgagttttttaaataaaaattttgtgaaaaataaaatccaaaatcggcaaagcacaaaacagcaaaagaacatgaaatgctgctccaagcaggaccctggatagggaccttcattgctgatgggatgacacaaattaactgtacgagaagtctgggagacgctggaaccgatggtggcttcgcatgttcctgtcaacccactgagtcagactgtatctttgcagatgtttctgtcggcgggcgtagtttctatcgagagagggagagtacaaacaggaaggctatttcaactagaatggctatttgtacacaaaaaaaggccagcacaacaattttaagaagatctttacttttggaaatcagatattaattttatatttcaattctcacaattttagaaattttatactatttcatttatatgaacaccacaccgtaagtgctatttctttccaactcccaaagccacctaattcccataggtattatggtgatatgtgccatatacacaatattctaaggaaaactaatgtagaataatgtttaagtaggggagaaaaaaaaaaccattttattcctccagaagaatttaggataggatctatattttattgtttgcatcacacctgtacctccaaaaggacctcattgtctgacacagctcaaggttgctcaggacacagcagttaaaattagaataaattcccagaaaggtaagtcatcatgtgagtttagagactgaaaaattaacagcacagactcacagtaaaatttcttaaaagtctcatttagttatgtgctgggctgcagttctgagcaagacgctctgagataatctgatcccatttttgactctgaaagtgctcctaataatctaggaagctttctgaagatacgcattctaaaatttaaaaaaagaaaaagaaaaaacaaatacagatatggattcttggcctctccctcctcccagacttaatgacttagaatacctggaatcaggatacaaacatctgtatttttagatatctccacaggtaattatgagtagtcgccagggttgaaaataactgtaacagtacctgacatttatctatccctatatgcaagtacttgctgaattctttaaatacctctcctcacttaatactgtgacaatcctactagtattttcattaagtccttgtataggtaaggaaattgattgagcctcaggttaataatttacccaaggtcatagagtagagtaagcagaactggatttgaattcacatctgactccagaatttatctattaacaattacactacactgcctttccttctgagaaatgctatgattttgacaactacagagggaatatgactgtaaaggccctgaagcaagaggaagagtattaggagatgaggtcggtgagcataggccaaagcatataggcctttgtaggggattacgagaatgggaagatgtgagatgggaagccactgggaaatattgagcaaatgtgatttatgctttaaaagaatctctttctttggctgctgagttgtgaacagtgcactggcaagggcagaagcagggaggccatttaggagacttgcaacaatccaggtcaaatgatgagaaatagttaggctttggatatacagctgaccctccatatccatgggttctacatccatggatttaaccaaccatgggtcaaaaatattcaaagaagaaaaatgaatggttccatctgtatcgaacatgtatagacatttttccttgtcattatttcctaaacaatacagtataacaactatttgcatagcatttatactgtattagttatcataagtaatctagagatgatttaaagtatatggaaggatgtgcacaggttatgcaaacactatggcattttatataaggaacgtgagcatctgtggattttggtatccagagagggtcctggaactaatccctcatgaataccaaggacaactgtatatgcagaacctatgggatttgctgatagactgaatatggggtgagagagaaaaaagtaaaagatgattccaaggtttttgagtatctgaatcaaagtaactgaataaatttgtacagccacactgcatcaagaatccagaaaactgtaatactaaatttgagtcttaaaaaaaaaaaattccagaagatttcagaattaggaaggtcctttgacaccaagttgcaaagctagtattagaactcaggtttcctgaatttcagtccagtttttgttttgtctgtttgttttttgagacagggtctcgccctgttgcccaggctggagtgcagtggcacaatcattgctcatcacagcctcaagctcctgggcttcaagcaatccttttctctcaggcactctcagggactacagacacacaccaccatgcccagttaagtttttgtattttttgtagcgacggggtctcacattggccaggctggtctcgaactcctgggctcaagcaatcctcctgccttggcctcccaaagtgctggaattacaggcgtgagctactgtgctcagcctcagtccagttcttattccattatactgcatcactttttccccctgcctcttgaattaaacaattccaacccctactccccactacattcctcctgcagccaaatttcacgcgccccccccccaccgccttttctttttttttttttagacggagtcttgctctgccgcccaggcttgagtacagtggcaccatcttggctcactgcaaccttcgccaccagattcaagcaactgtcctgcctcagcctcctgaggctgggactacagatgcttgccaccacacccagctaatttttgtatttttggtagatatggggtttcaccatgttagccaggatggtctcaaacgacccacccaccttggccacccaaagtgctgggattacaggtgtgagccaccgcgcccagccattctacccttttccatcttcttctaatcacccactcaccgcgtggtgaggtccgaaggatgctgccattttgagtgctgcatatgatgaacttgatccatcaaggcacaaagctcccccgagatacctgtgatacagagggatcagtggttaggaacagctgagtgaactacgtcagccaacgtcaaagtatgtgttttcagggaaagagaaaacaggcactgttctcaacaatatatacttacaattatcacaagcagtgagcacagaaactataaaccagaatggggagattactcttggagggtgaaggtgaagcaataatagcagccaccattcattcattcaacacttagctcctacaatatacagggaactttacttgtccctaggaatatggcagtgaacaagacactacctcaatgaagtttatacaggagacagatgattccaaagtggtgtgataaatgcagtgatagaaatacagactgctatagagactgggggggtgggggttagggaaagccccctccagggggagtaactatagcagggatctaaaggatgtataaaattagtgaggtaaagaggggtaggaggttggatgccaaaagataacagttaatacaaagccccagagacaaaagacagcaaatacattcaagaaacaagaggagtttagaacagatggaggtgggcgctctttgctaacaagaaaaattgctagatgcaatttctcaaacacctgggatcctagcaatgtactagacactttacatattatcttacttaattctaaaaaaaatcttacatggagatagatgttattaatatcatttcaaagatgggaaactatgggaggtgaacttgcctgaaatactttttttttttttgagacagagtcttgctctgtcgtccaggctagagtgcaatggcatgatttcggttcactgcaacctctgcctcttgggttcaagtgattcccctgcctcagcctcctgggtagctgggactacaggcgcctatcaccatgccaggctaatttttatatttttagtagagatggggtttcatcatgttggcgaggctggactccaattcctgacctcaaatgatcctcccaaagtgctaggattacaggtgtgagccaccatgcatggccctgaaattcttgatgacccaggattcaactagctcctgtgtgactccatgtccttgccactatgcaataatgctaattttgcactcaacgattgagacttaggctaaaactcaatagaagcagaaataaaacactagttaggaaataatttccctagaccagtggttcgcaaattttaacatacattataatcaactggaggtattgtaaaacagattgctgggcctagcctccagactttctgattatacataatcagaaaactacagatctgggtagggcctgagaatttgcatttcaagcaaattcccaagtgatgctaatgctggtggtctaagaaacactttttttttcttttttttgtgggtagtggggtgggagatggagtctcactctgtcacccaggctggagtgcagtggtgtgatctcggctcaccgcaacctcctcctcccgggttcaagtgattctcctgcctcagcctcctaagtagctgggattacaggcgcctgccaccatgcctggctaatttttgtatttttagtagagacagggtttcaccatgttggccaggctgttcttgaactcctgacctcaagtgatccacccaccttgctctctcaaagtgctgggattacaggcgtgagttactatgcccagctgagaagcacactttgaaaatcaaagccctagacagtggagacttttcagctcgtttacatgtttttcattaccttatctactgtgctttcgggaatcaaaagcagtctcagtaggctacagactcatattttcaagttctagtaaaagtaatgtcacttttaggataaatgtaatttatttgaagcctcaaaaagtagagctttgtagagaaagtatactgtatactttggagttaggcagagttgagttaaaattccaatccatcaattagctctgtgaccctgggcaaattatttcacttcttcagggctcactactcatctatgaaaagcagataatacaatttagcttgaagctgagttttaggaatattgaacgtaaaagacctagcacattgctatggcacacagcgtgtgtgcagtgagtggtagctattatgatgttagcacctcaggtctatgttagcttgcaaagactctgcaaatcctgtgaaattttaaggaaaaacgtttattaaatggatccatccacacataaactatgacattttatggcactcaaatatttttctaaccataacactttttaggaaaaatttatagatttcattaaaagtttctctactgttaaaaaagcacgaccaaatgaaacataattgacaaaatgaaaaatatatttgaaacatacttggcaaaagtttaatgtcctttatctacagtctctttattttttaaaaaaggtcaagggcatgaatagacaacttgcaaaattattacaagtgatcaataaacatgataaaaacaatgttcaatctcattcatggaaagaaaaggcattactgtcactccttgagaaggaaaaataaatcagaaatgagtttcctcatgaagggaagtaactcttgattagaaaattccttacctgctggatttgtaaagctaaaatcaaaggtctcaattcaaattgcctttccaataccccactttcacctcgctagcactccactccctgtggtcacccaaaaaggacatttcagtgggaggcaggggaggggagaatcagctttataaaaatttcaagatacatttttcctaccaaagcttcacaaaggaggg

SEQ ID NO: 22 - DNA, 32546 bp, Homo sapiens
ccctcctttgtgaagctttggtaggaaaaatgtatcttgaaatttttataaagctgattctcccctcccctgcctcccactgaaatgtcctttttgggtgaccacagggagtggagtgctagcgaggtgaaagtggggtattggaaaggcaatttgaattgagacctttgattttagctttacaaatccagcaggtaaggaattttctaatcaagagttacttcccttcatgaggaaactcatttctgatttatttttccttctcaaggagtgacagtaatgccttttctttccatgaatgagattgaacattgtttttatcatgtttattgatcacttgtaataattttgcaagttgtctattcatgcccttgaccttttttaaaaaataaagagactgtagataaaggacattaaacttttgccaagtatgtttcaaatatatttttcattttgtcaattatgtttcatttggtcgtgcttttttaacagtagagaaacttttaatgaaatctataaatttttcctaaaaagtgttatggttagaaaaatatttgagtgccataaaatgtcatagtttatgtgtggatggatccatttaataaacgtttttccttaaaatttcacaggatttgcagagtctttgcaagctaacatagacctgaggtgctaacatcataatagctaccactcactgcacacacgctgtgtgccatagcaatgtgctaggtcttttacgttcaatattcctaaaactcagcttcaagctaaattgtattatctgcttttcatagatgagtagtgagccctgaagaagtgaaataatttgcccagggtcacagagctaattgatggattggaattttaactcaactctgcctaactccaaagtatacagtatactttctctacaaagctctactttttgaggcttcaaataaattacatttatcctaaaagtgacattacttttactagaacttgaaaatatgagtctgtagcctactgagactgcttttgattcccgaaagcacagtagataaggtaatgaaaaacatgtaaacgagctgaaaagtctccactgtctagggctttgattttcaaagtgtgcttctcagctgggcatagtaactcacgcctgtaatcccagcactttgagagagcaaggtgggtggatcacttgaggtcaggagttcaagaacagcctggccaacatggtgaaaccctgtctctactaaaaatacaaaaattagccaggcatggtggcaggcgcctgtaatcccagctacttaggaggctgaggcaggagaatcacttgaacccgggaggaggaggttgcggtgagccgagatcacaccactgcactccagcctgggtgacagagtgagactccatctcccaccccactacccacaaaaaaaagaaaaaaaaagtgtttcttagaccaccagcattagcatcacttgggaatttgcttgaaatgcaaattctcaggccctacccagatctgtagttttctgattatgtataatcagaaagtctggaggctaggcccagcaatctgttttacaatacctccagttgattataatgtatgttaaaatttgcgaaccactggtctagggaaattatttcctaactagtgttttatttctgcttctattgagttttagcctaagtctcaatcgttgagtgcaaaattagcattattgcatagtggcaaggacatggagtcacacaggagctagttgaatcctgggtcatcaagaatttcagggccatgcatggtggctcacacctgtaatcctagcactttgggaggatcatttgaggtcaggaattggagtccagcctcgccaacatgatgaaaccccatctctactaaaaatataaaaattagcctggcatggtgataggcgcctgtagtcccagctacccaggaggctgaggcaggggaatcacttgaacccaagaggcagaggttgcagtgaaccgaaatcatgccattgcactctagcctggacgacagagcaagactctgtctcaaaaaaaaaaaaagtatttcaggcaagttcacctcccatagtttcccatctttgaaatgatattaataacatctatctccatgtaagattttttttagaattaagtaagataatatgtaaagtgtctagtacattgctaggatcccaggtgtttgagaaattgcatctagcaatttttcttgttagcaaagagcgcccacctccatctgttctaaactcctcttgtttcttgaatgtatttgctgtcttttgtctctggggctttgtattaactgttatcttttggcatccaacctcctacccctctttacctcactaattttatacatcctttagatccctgctatagttactccccctggagggggctttccctaacccccacccccccagtctctatagcagtctgtatttctatcactgcatttatcacaccactttggaatcatctgtctcctgtataaacttcattgaggtagtgtcttgttcactgccatattcctagggacaagtaaagttccctgtatattgtaggagctaagtgttgaatgaatgaatggtggctgctattattgcttcaccttcaccctccaagagtaatctccccattctggtttatagtttctgtgctcactgcttgtgataattgtaagtatatattgttgagaacagtgcctgttttctctttccctgaaaacacatactttgacgttggctgacgtagttcactcagctgttcctaaccactgatccctctgtatcacaggtatctcgggggagctttgtgccttgatggatcaagttcatcatatgcagcactcaaaatggcagcatccttcggacctcaccacgcggtgagtgggtgattagaagaagatggaaaagggtagaatggctgggcgcggtggctcacacctgtaatcccagcactttgggtggccaaggtgggtgggtcgtttgagaccatcctggctaacatggtgaaaccccatatctaccaaaaatacaaaaattagctgggtgtggtggcaagcatctgtagtcccagcctcaggaggctgaggcaggacagttgcttgaatctggtggcgaaggttgcagtgagccaagatggtgccactgtactcaagcctgggcggcagagcaagactccgtctaaaaaaaaaaaaagaaaaggcggtggggggggggcgcgtgaaatttggctgcaggaggaatgtagtggggagtaggggttggaattgtttaattcaagaggcagggggaaaaagtgatgcagtataatggaataagaactggactgaggctgagcacagtagctcacgcctgtaattccagcactttgggaggccaaggcaggaggattgcttgagcccaggagttcgagaccagcctggccaatgtgagaccccgtcgctacaaaaaatacaaaaacttaactgggcatggtggtgtgtgtctgtagtccctgagagtgcctgagagaaaaggattgcttgaagcccaggagcttgaggctgtgatgagcaatgattgtgccactgcactccagcctgggcaacagggcgagaccctgtctcaaaaaacaaacagacaaaacaaaaactggactgaaattcaggaaacctgagttctaatactagctttgcaacttggtgtcaaaggaccttcctaattctgaaatcttctggaattttttttttttaagactcaaatttagtattacagttttctggattcttgatgcagtgtggctgtacaaatttattcagttactttgattcagatactcaaaaaccttggaatcatcttttacttttttctctctcaccccatattcagtctatcagcaaatcccataggttctgcatatacagttgtccttggtattcatgagggattagttccaggaccctctctggataccaaaatccacagatgctcacgttccttatataaaatgccatagtgtttgcataacctgtgcacatccttccatatactttaaatcatctctagattacttatgataactaatacagtataaatgctatgcaaatagttgttatactgtattgtttaggaaataatgacaaggaaaaatgtctatacatgttcgatacagatggaaccattcatttttcttctttgaatatttttgacccatggttggttaaatccatggatgtagaacccatggatatggagggtcagctgtatatccaaagcctaactatttctcatcatttgacctggattgttgcaagtctcctaaatggcctccctgcttctgcccttgccagtgcactgttcacaactcagcagccaaagaaagagattcttttaaagcataaatcacatttgctcaatatttcccagtggcttcccatctcacatcttcccattctcgtaatcccctacaaaggcctatatgctttggcctatgctcaccgacctcatctcctaatactcttcctcttgcttcagggcctttacagtcatattccctctgtagttgtcaaaatcatagcatttctcagaaggaaaggcagtgtagtgtaattgttaatagataaattctggagtcagatgtgaattcaaatccagttctgcttactctactctatgaccttgggtaaattattaacctgaggctcaatcaatttccttacctatacaaggacttaatgaaaatactagtaggattgtcacagtattaagtgaggagaggtatttaaagaattcagcaagtacttgcatatagggatagataaatgtcaggtactgttacagttattttcaaccctggcgactactcataattacctgtggagatatctaaaaatacagatgtttgtatcctgattccaggtattctaagtcattaagtctgggaggagggagaggccaagaatccatatctgtatttgttttttctttttctttttttaaattttagaatgcgtatcttcagaaagcttcctagattattaggagcactttcagagtcaaaaatgggatcagattatctcagagcgtcttgctcagaactgcagcccagcacataactaaatgagacttttaagaaattttactgtgagtctgtgctgttaatttttcagtctctaaactcacatgatgacttacctttctgggaatttattctaattttaactgctgtgtcctgagcaaccttgagctgtgtcagacaatgaggtccttttggaggtacaggtgtgatgcaaacaataaaatatagatcctatcctaaattcttctggaggaataaaatggttttttttttctcccctacttaaacattattctacattagttttccttagaatattgtgtatatggcacatatcaccataatacctatgggaattaggtggctttgggagttggaaagaaatagcacttacggtgtggtgttcatataaatgaaatagtataaaatttctaaaattgtgagaattgaaatataaaattaatatctgatttccaaaagtaaagatcttcttaaaattgttgtgctggcctttttttgtgtacaaatagccattctagttgaaatagccttcctgtttgtactctccctctctcgatagaaactacgcccgccgacagaaacatctgcaaagatacagtctgactcagtgggttgacaggaacatgcgaagccaccatcggttccagcgtctcccagacttctcgtacagttaatttgtgtcatcccatcagcaatgaaggtccctatccagggtcctgcttggagcagcatttcatgttcttttgctgttttgtgctttgccgattttggattttatttttcacaaaatttttatttaaaaaactcgtcaccttttggaaatgcccattgccgacttgaatttttttgtatgaagtccctcctgattttgtgtgtgtgtgtctgtgtttaagcaagcgttcggttggtatagtttttttttgtttttttaatttaaattgaaggtagctgcctcctgaaagccagcattaagccagaacacccaggttcaagcaaaagacccacctctctgcagaggcaaagtctactttctggtacctcaaagaaatcattgttcaatcttccataaggaagagattctttaccaggctgtgagccagtgttagataacttgtgaatggatataagttacttttaacaacccctcttacttttttatttgaatcctctgaatacctgtcagtattttaaagttggcaatccaggacattataagtaggatggagcaggagaagaatcctattgaaaggacaaattaaaatagtaaatcctctcctctcccttctgtaggtactagctgccttgatttttttttgtgggtgggggggattttttcattccttattgaacttattttgcacaatagtgtttacaaatcttatacatcttactttgacagaagacttataataccttgtggtcttgagactggttgtctcctttgcctttcttcaaggattttcctttttctttttaccccccagtgaccactctgctctttaggattctagtggcagtattcttgtaacctgttagacgtggatatacctcttcaggatggcctccttgctgtctttattgaagagctgcccacccagagtcttgactctagggcaggctagtgctattgtggtgtcagttgatatttagtttcatttgctgaaccccaaatttgagtgttagttagggagcctccattctgtgggagagtgtggaaaggcactcttttttctccatattagttaacaagaggtgtctttaggccctggatgttaccatctcatttggtcaagcccctgatacctagtttcacatggatgctaacgtggatgtaatatagttgtgacagcctatgcacaaaagcattacctgatcttaaggtttggtattctaaccaaagttgacagactgtgcgtctgtcttaatggatgtcttaggagttggttattctctcttttttttttgagacggagtttcgctgttgttgcccaggctggagtgcaatggcgtatctccactcaccacaacctccgcctcctgggttcaagggattctcctgtcttagcctcctgagtagctgtgattacaggcatgcgccaccatgcctggctaatttcatattttttagtagagacaggatttctccatgttggtcaggctggtcttgaactcctgacctcaggtgatctgcccacctcggcctcctaaagtgctgggattacaggcatgagccactgcacctggccggttattctctctttacagatagctatagacatcattttaggaagtgttgcagtctggcatttgtgctattgttcattctctgtgaaggctgttcatagttgctatagcctgtgtttagttttgtgatttcatcaatcccatctttctgtgtgagtaatgcattctaaacatcctaccccactttagaaacggacgtggggaacgcttggtcatttaagccaacaataaatttaggtgaatgtccctaagtgtttactgtttttatccagtcaaggatttgcttttccttgaacatttgttttaaattctggggccaaaatgcaaaggagaagttctattcaaaggcagtagttgaaatctattattttagttagcctacttggcatttactacatcggtcacttctccaggctgccctaaattaggttgatggagtgagacatgccaaacatccacctttgggaccatagcatagttaaaattaaatgtagttggaatagctagcattgcagctacagtagggaactgtagtctagttccctacagaaaacccaaggagtgaagggacaggattttgcctaggcaaaaatctaagactcgtgccctcctggtacatggggttttaagactgaatgtgtaataggagcactgcctttgccaaatcaaatgagtgacaggttaactagaaaatgtgacaatcacatttcctcttagctcaaataattctgtttttccaaagctttagcagcttaattaaatctgttggactgggggaggagagagctgttctctagtggttaacatggtattctttaagaagaaaaaacaaagccaaagaaaactcattatctggcatgttcgccttaaagatggtactgggtagaatctggagttttcatctcttttcaaagctgcatatctcttatatttggtattggcctctaagtctaatattgcagttggaattcttgctgtattattttttaagcaagtgttaggtgcatttaactgctttcttcatccatgacgacattcccaccatgggggtcttgacaaagcagagtaaaaatatgctgtttacattgtttacttacaagtaaggagcctgaaataacctgtagtttcgaatgcaggccctgatttactggcgttgtcagtttcaattatgaaactgaagtttggtgcctcctctttatcatgttttttcccttgtagcagttgtgtttaatgtcattaaaaagaaataaaagttctttgtcagtgacatatgtactgtggcggtctgtcgtaggcttcgatggagggttatttgccttcttcctttgcgtaggtaggttagtggggtggggaggggggcggcagttagtagaatgtggtactggaaaggcgagggtgcttgctccctattcttttgaaggtaaattacagtgttgagaaaggtgttctagcagttaagaaatgttgaaattgattgggatttgcagctacatatggtgcatgtcaggagcctgacatagggagagcctgaaatatcattatgcctcagtttttgcagagggggaagatggctcagccgtgatcaggcaggcattgccttttattccttcccatggctgtgtgattggcctccctatctctgcttctccagagctagcattgattgtggaagaagccatgctatccaagagcattctctctttgaaggggatgtaagaaaccagaatcagtggtacagaattgatggttgttcataacccagtttctccagaaactgcggcttctaaaaactgggtgaaggttggataagcgtgggtagatgtgggagacacagtgttccttagatccctttcgtgaaccaaagcttcttagacttacccccagaagcaaggaaaaaagggaaggcaataataacttgtcacctatattagccagtgctttaaaaatctgagttcatgctgagaaaacaagtagcaacatgtttagccatgctatctggcctgctgtgctataagttttgtctataaattctagacaaaatataatattgagtccatgcaaaagactcaatataagtttgctaagtactcagcaacttgacattcttgtctcaatctgaggcactctccttaacctatgcatatctgttttgttcctatcaggtgtagataggatcttttgtccattttacattacggaaaagtgaagaggaaaaggagagatggaccttctccaagaggaagggggtcattctctaattagcctattttgagcttttataggaagaaaaaacccaaccacctaaagctagaaagtggagttccctgcttctcttagtaatgttctgcttttctaagagaaaacaattattcctaagctgattttagtgtatgcttgctttgtatgccagagcacctgtcagggaaaaaaaaaaaaaaattccacttgtcacaggaagtatcagctggtcagtggtggaattcctaaatgaataggctcctgccttgtccttcctccccacctgtcctccccctgtgacaactgggacatgccatagacggaaaatctggcccttcccagcacccattgaaagggggtggaatataatattttggataacctttaaagcagtctaagtgatagtcctgaaatatatcactaaggaactatttgttttgagacagcgtctcactctcttgcccaggctggagtgcaatggcgcgatcttggctcactgcaacctctacctcctgggttcaagtgattttcatgtctcagcctcctgagtagctgggattacaggtgtgcgccaacacacctagttaatttttgtatttttagtagagacagggtttcaccatgttggccaggctggtcttgaactcctggcctcaagtgatctgccccaccttggcctcccaaagtgttggggttataggcgtgagccactgcacctggttaggaactatttgtgtacagttttccttcaacttaacttcaagtcacatttgaaggtttggtaatattttgtatggatggagcttgatggagctgggcaagggaggagggtgagcagggtgtcccatttatagaagcaatttgttcttggaggctacttaaatgcacattccagtaaccatcaaataggtttaaagagagtcagaaatctaaagctcatgttaatgggttggtgagattttgcacatttttgtaaagggttgaaccaaaactcttaaaaatgcattcttgagaaggcccattctgaaaaactaggggacaagagtaggaggagaaaaggactcttgcctcatagaaacactcaccagtctgtcttccttccctcagaccctgaggtttccctcgtgctcctaggaggatgcaccttggctcctattgtaggaagtaggtagagtctgggaatcttctaaattctgtttttggcagataaggacaccacgacctaacctcagagaattaacttgcctgaggtgttaggtgattacaaggcagggtctcctgtctctcagaccagcatttctcccacaggcctgtggtagtctccaagtgaggtctcttggtctcaaagacctgcctgtgcctttccacagttgtgagaaaatgtccatggatctatgtgatggtggtgaaaggatcacatcccaagtctagctgtgtagggttcgactttgcaactacagtggattcagggaaggctcaattgttatacaattgggagtttagggaggtaattaaagggaatggagttttatctaagccaagagtgttacctccttttctctcataccctttatgatgtaccacaggcacagattaagttgaagactggaaacccccattagcagagctccctgagccccactgactatactatacctagtgctgatttgggggcttttccatcatttggcactagatgggtacagagggcctaggaagtacctctctgaggtttggcttagagtcggtgtgcaactcaagtttcctactttgctgtgcagcctctaaaccttctttccctctgctttcaaaacctacagcagtcaactctaagccctgctcaccggacattttctctccaagcttcttcctggctctggacaggaatgttcgaggtaccccatttactggtttttgctccttggctaatgtcatcattactctttcagcctactgttgggatcataatggtgttcctttaacagcctagaacagcacgctgtgaatactgagctgcagaaagcagcttttgctgttccccttcacttccttccttaccctggggagaaacaagaattgtattcctttggccaggaaaagcacccagccccatccagaggggaaaaccctttgttttaaaaactaagtaccagcctgcatacctatctagtgaggcagcccaagcttggtttgggggagcctcagtaataggatgatggagcagctattttcttctcctacacgtgcacccccatctgtttgagatttcccttccaactccagcttggctggcaggcatgtccctaagaagctgcaggccaaaatggagagaaactgactccctcctccacacatcctgacttgctgccaattgccagaaaaagagggcaacatttgggcatttaccagaagacaaggatgtgccttttcatttgtctttttattttacatttaaaaagtggttattgctctaagtggatcagaggtaaggacctctcccctaaggagccttggccttgcagccccattcagcagggatggaagtcacaagacaatgagtggagcctcatgccctcccatgaggaagcccttagtattgctgacatctgccctttatcctgtctctcctccccagtgctgtcacacttgggcaaagcagagtggtggcagacccagccttgagagctcttgtagaccggaaggaaggggcggtcattgggtgatggcttctggctctctggcttggggaccaatgctcttatcattcatttcaacaaatatttactgagtaccaggcttgcactaggtgtggttctcccacacccatccttgaccaccaatggaagatgcagatgtccacctcttcccatgcaggcatctggcagccgtaactcgtcagtcctagggaagagtctaccttccctcatcaagcaccatttttttaaaccagaaaggggcagtggagagagagacctgtcacctcacaccactcaggctctaaggaaggacatgaggaccctgggtaactttcatggaaccctggatgagatggcaagatatgaagaccccagaggccagtggtgatagccagagctgctcttcctgtccgtggtgaatggctcaggcctgccttccagcagcttctactccagaaggggtgttttggtagcccccagaatgccagctgtgatgtgacttttcagttgtccaagctagcatttctgaaactccaagagatacttcctaaataaattggaccagtaccttccaaactgatgatctttcagtcataagggtcaaagaagatagaggatgcaggcaaccagctcagtcttcgggggaatttctctgccctctagaatgcagccttctgatttttgttttccaaaagagacaaaccaggtaacatcttacacgcttgcaaaagtgtgcatcacaccacaaacatgtccttgatggctggatccagaaaaggcttgatggcagccatgatcctgcctggcaggcagccccacagcttctctgatgttccttggtctgaaagacacagcttgagtcagtccttgtgcttgtcatctcccagggctttgtgcattttctcaaagaggaagccagtccaggagaggcgaggaggcagaaggctgtgtctcatgcagctttgccttttccagaatggggccaggccttttagttttgtggcttatttttatttttttgcagaatttgggtttgtagtgcagcctccttcatctgactaggacaaggagaagagagaactgtgcagctagctgtgcctcctccccactgctgcagttgtccctctccctgtgcccgtgggcctggggaccagctgagaagaaaaatggaatccttctccctgcagacaggcagtcacgcttcaatgatgttcactgagggcttgtttggaaactgggaggaaaaaaatgagagaagcagccaggcctaattgtgaatagccttcttgcaaggctggaaacaggacagaagaaggaagggagcagcagcagggctgtagcctaaataagccaagctcttgtcccttgtggaaagaaaagagaagccctgcctggatgtcttgtctttttgccttttcaaacccagccttcagcctcactcaactgaatggccaagactgggtcctgggcccatggcccctggcacccagtctacccccagcagtcatccctctgagtgcagcctcagccactgacattgttgaggtgcttctggagatgggagttaataagaggcttcaggaaagtgcgccagagagaggacagtaagccagagggtacaaggagatggagggaagagatgtagagagggccagatgtttgttggataatcatcatcagaaccatgagatcctctcacattctctactgtctgtcttcttagctgctgagggcaagcactgaaaaggttttcatatctgttttacagaagaggaaatgaaggtacagcggtaaagcacctgcccaaggtcacaaggcacagcaggagcaggaatgggccagacaccccactcctattgtcccgcgccaaccaagaattctgccctccccactcactgcttttttttttttttcttcaaatcaccactggcccctggcaccctgcaaaaggagaggatccaaaatcaacttgcagtgtccctgtgtcacacaggcagcagccaagtctggctctgcccagctgtcgccatgccagtccccgagctgaccccctctgcagtccagggattaccagagcatgaggcacagggtggcccacccaggcccaggtcttgccctcaccttgctgcggagaagccccccgccctggtgctctggtgtgctggtttctgatgcactcttggttttttccttgttgttattgggttcattgtccttgatgatgtcatactggcggcagaagagggcaatgacacctgaggggggacaagtgagcagtcagaggccagagcctgggttcctgcctcccctgcttctttcccactagtgcttgccaatggtctctccagattgtacctcacctgtactactgcagcaccctccctctgccctctggctcctgttttcacctgtgccctcaccaaccaccccttcactgctgctaggctgatcttcctacaatatgcgtctgatcatacctcctcctctcctttcctttaaacctctgacagtggccaggcacggtggctcacgcctgttaattccagcactttggttttgtttttttgttgttttgagatggagtttcgctcttgttgcccaggctggagtgcaatggcgcgatctcggttcactgcaacctctgcctcccaggttcaagtgattctcctgcctcagcctcccgagtagctgggattacaggtatgcgccaccacgtccggctaattttgtatttttagtagagacggggtttctccatgttggtcaggctggtctcgaactcccgacctcaggtgatccgcccacattggcctcccaaagtgctgggattacaggtatgagccaccatgcccggcaatcccagcactttgggaggccaacatgggtggatcacgaggtcaggaaatagagaccagcctggccaacatggtgaaaccctgtctactaaaaatacaaaaattagctgggcgtggtggcaggtgcctataatcccagctactcaggaggctgaggcaggagaatagcttgaacctgggaggcagaggttgcagtgagctgagatcaggccactgcactccagcctgggcaacagagagagactctgtctcaaagaaaaacaaacaaaaaaacctctgacagctcctgttttccttgaggggaaaatagaaacaataatagcatttgttgagctcgtgccaggccctgtgctgtgcactgacatattctatctcacttaatcctcacaactctgtgaggatacctattattataattcccagggtacaagtgaggacactgatgcagagagagtttcactaacttaactcaaggtcacacagtggtggaactaggacatgaactccagggcctgcagtctgttaaatgtttagttttatcaaactaataatacatgaacagaatgttttttaaaagtcagacagtattaaggcagccaactccagtccttctaggtgttttcccaattttacctctatatttagaatgttatttcttgatctattttagaagtctgttgacttccaaacatggtagataaagcataacaacttcctctacttccctccctattatcctaacaaaattacatcacaattttgggttaattcgctatgtttatattgttatgattatataaatactgtctgtgccaaatctaataacgcaccataagcaaacctcctcttttgtacaaccctttgtttttccctcatttttccaagtgcctgtttttctgtgtgcctaaggagcatttttttcccaaatgcttctacaatacagcctgcctttctcaaccaccatggtaataaagctttagcatggtattcaaatccctcaaaagactccagtctgcagcctcaccatcctttactcccccacgttctaccttctttcttggattgcagctgccctgaaccagactgagcttactttgtttcttgaacacaccatgccctgaacactattcctcttttggctgcttggtgaactcctatttatccttcaaagctcaattcccatgttatctcctctctgtgtttttcctgatttctaacccacagttattccctctcctctgctctcctacatggtactatcatagcactcatcacactggattatagtttaagttcagcccaagaaaatgaaaaagaaaaaagaagagtaaacgaaaagaaaaaagaaaagtttgggcctggcttcgcccagatagttctttgcaagcagaggggtcttcttagtcatgattgtagcactactgtttgggctggagtgattgttcagtaaatgctggttgaattgagtacaaagatgaatgaaacttggcctttaccagcctggacaacatagcaagaccctatctctacaaaaaataaaaaattagccaggcatggtggcacatgtctgtagtctcagctactcaggaggctaaggcatgaggatcacttgagcccaggaggtcaaggctgcagtgagctatgattgcaccactgcactccaacctgggtctcaaaaaacaaaacctttgtctcaaaaaacaaaacaaacaaaaaaaaacttggtcttcattctcagggagctcacagaccacaggtaaaggagagacatgagccgaacgaactaacacaagggctaaagagagggttaaagaagggctaaagagaggagtgaacagtatgcggtgggggtgtggaagcaggagggccattctaatggatggattgagggagttttcacggtggctgtctcacagccatggtggctgggtctagaagggtgagtaggttaggagaatgtccccaggccaggcagtgacttcccctgagcttcccaggcctggacccctggaggcacagcaccccagaagaaaaaaaggctgtggccatgaccagaggtaaaaggcctgtggaagtgtccagccccaagaagctgaacctcttctgagggagggcgaaggcaagtactcatctaatcctataaggcagctaacaatatgctggttttttggtgaagagtgaggtagagaaggggtcagatctgtttcccagaactgtcgttggcaggacttggagacttttcaccttagagatgtccaaaccccttaccctttttttcatgagagaaggggctggtcagagtcctccatttcccagaatctgagggaagaagaaggtctcggaggccagactcacctgcccacatgaacaggaccacgacgatgatcagcacctcgcctgtccgcagctgttggttcctccccatctctttcatggttacctcatctgcagggagagagacactagatccagcactcctttcctccctcagccactcctctagggccaagcccaagacaacagtgctgatttctacaggtgcccacacatctaacatacattctagaatgcactgatggctacttggggtggcagtgataggaccaagtctaaagggagtttatatgctcagcgtcttgtcagggactagcgtgaaccctctctcaggtactgctttacttgccagcaggggataagggggaggagacagagctttcctcaagccacccactggtctggtcctgaccacccctcaccccaccccattcctcttaacagtgacccgggcctgcctttgttcttggaggccatcttctcagcctcacgcggggtcttgaagagcacaggctcgctggctgggctctggccctgaatggagatggcctgcacgtggactatgtactccgtatcctcctccaggtcccagagggcacatgagcgggtggtggtgttcacctcctggatgaagcgcagcatccgcacatccttcttctgcagacaagcgccggtcactgctgtcaacactcggtgaccagccccgctcctgcccacctcccagtggtgacaaagcctttacatacacaatcttcatcattccatcacctccgctatcaatatctccattttacagggaaggaaacaggttcagagaggttggggaagttgcccaaggccacacatctagtaagcactggagctaggtcctaaatgcagatgtctctgagatcaaaaccttaatttctgtgttccacttgaaagttcccaaaccctccctcactgactgattctcttctagagaattttcagacatatgtctgaatggggccccaattttcagacatatgtccaaattgctgttcatctcccttgccccaagttcctatttcctttctatttctccatcaccaccactgccacactcctacccccatctgccactactgtcttgatgtgtccttccctcctaaggacagtggagcattacctgctgggagatggcaaatccgatgacaacctcatcctccagaacatcccagctcaccactgcagagttggccttgaggtgcctgacggtgacgttcactggggctgagggactgtctgggggacggggaggcacctaagcctgagcatcccctattgtgaggcccagacccactgtctcataagtaagaaggggaaacctggggaaggccatgcaggaggggaaggaagaaactaaggcctcaagtggggtccagtgacatggctctcagctcttcagtgggttgaagaaccaagcccaagaggccccaggctcctcatgactgggacggaagcccctgctggccacaggccggccccatgaggggtccaaggctcaaagtgatgggcctgggccggggccctatctaagggatgggtggttagagttgtggagagagttatgtaggggacataggtggacagaaactgaaggttagctgatgaaaagcagacaaaaggactccccagtccagtgctcttttgacaatactgccctgtccaatgagtgaccttgcgcgaaggagaaagacccagagatcgagaagtgtcaggctggggtgagccctggactgggagtgaggagaacagaagtatcctcagagctgtggtggcccaggcagaataaagcctgcggaagagtctgtgtgagcctcttatccatgctcttccagccccaagatgcaggtggggaggtggcaggggaagatggggtcactcagagcagggcccctccatggcgagtggagaggagagaacaggtaggggaagaggatgaatgaggaatcactccagaagagacaggagggaagtgggggtgagagtgatagggatagtgggggtcagtgaggaaaaccgtccaggagaggggcagtgcagtcacataaggctcagtatcttccaaggggcaggtgcagcacggggcagagctgcgcctgagcagcacccctcaccccacagagagtgaacttgagacccagggggctgggcctgggacctgagggagacagagccagacatggagggggaggtggagagacaggacacagacaggtggtggcagacacagaaccagaggacagagaagtggggcatctgagaaagacagctgcgagagagcgctccccgagccacggagggagagatgagccgggcagcggcagccaggagggacaaagacagagtggcaggagaggctgggcaaggacgggccggccccatggggcaggccagacactgtaccagatcaggggtgccggggcccaccccacgccctgcgccctcaggtgccagcccccatccccttcacacgtgctcctgcacagcgggaccccatctgcccctgcagagttggcttgcagggctttgagaggtcctggggacacagagagaggcccaggtgggggaactggtgtcctcagctgctccctgggtcaaagaagggagctagggaagctgaggcaaagacctggggttaggggaatgggattaggggactggggaccacaagaccctaggaaacccagggctgaggtgacaggggagatttggaaactgaaggacaggtctgggggtcaaggaggtaggaagacgctgggggctgggttaggggagcagtgtttgggccgagacaggagtccctagggggcagagaaaggaccaggggactcccaggtagctgggctcgagaggagcctgccccggcgccggccccccgccccgggcccccttacccgcctgcaccagcgcgaagcagacgcagcccagccacaggcggagcgcggcgcgggcgcggggcggccaggcgctcggcgacccggggtgtatggtggctcctccggccggcaggcccggggcggcgcagggggacgcggctccggcgcccggcggccgctcgcgctcgcgctccggcccccggcccggccggcccggccgctccggccgccctgcgccgccccgagccgcctgcatgtcggctccgcggacagcgactcccgcgcggcggcggtggcggcggccgcgtccacgtcgggcgcccggggggcggggcgcccccgctgcggggagaggtgcgggggcggggtgaggaccggagggcgcccccactcccgcccccgctgcctattaggtcctctgccggggaggaaggggcttcgcggacccacggctcccgccctctcaccgagcgggagcccagcggggttctccgcgcccccgccgcggtcactctctctcccgtgcacagccctgacttggctgccgctttctgccctttcccagggtagagagaggacaagtgccaccgagatgcccgtttgtgcccccacccctaagcgcgcctcccttccctgggcctagggatcccctcattccacggtagacccgaggccttgcggctggggcagacgggagcagaggggagagatcacagtaaggctggggtgagcagagagtgctaagtggacactagggctccgtgtttccagtggggttgggaagaggctgctctgtctcactggagagtccagctctgtgaccccaggccagtccttttccttcattttcatccccatagtgagggcagtaatgagcgtctaccaggggccagatactatgctgagctttctttgcattatgtggcttaattctcagggcaaccctgtaaagtcatactctgcacactttgcacaggaggagcctgcagcttggacaggctacttgacttgtccagggacccgcagcagagccaggatttgaacacaggctgatctgactcccaaagctgtgcttaactgaactgtctccccacccagagtgacttcacccatccggagattcgtgagactctagaattggccggggccagctcctccccagccagaaaacagtctgcagcaatctctaagagcatctctgagaaggggagtggctccagcccccttccctcatctcagccagagaaacaaggtggaggagagaggcatggaccagggctcagggccttttgtctcagcaagaacccctgagccccctcccacgactatccgaaattccactactagcggggcattcctttgggtcttaaaggttttccagaagccctggaagggctaattttctttggaaaggagacgtcttgcaaagttctgccacagaaacgtcttcagggtcttcctctccatccccctggttttacattaaggaagtgaggtctaccgatgggaagagcttggtgcagattcacacagtgggtcaagaggagcgatagacaaccctcctctccttatgcccacccaggactccttcgctggccctgtgttcctccttggtcaccttggaaggggtgagatggaagcgagcttaggggctcttgttgagcagcagaattttcctgcccatcccctcagtgcccccagacctgccccactcggcagggtgacactgcccagccctatcatttcccccgccacataccttgtcctgggagagcctcagctgggacctcgacccgtttgggagaagagccccggagccagagcacctctctctctcttttctctttgctctctttctctttctctccccttattatcttctctctctttctccccgcagctgctgcctgccccaccccacccggccccgccccaccagctgcagcttagcccctagggaccccccaccccccatccatcagacaggaagacaaccaggaggcccgcaggagcaactggagcctcttcaggcctccagcacaggaaccagcaggaaggagagggttcagttagaggacacagaatctactcccgtccctgcaggggagaaaaggagggagggtcctggtggggtcttggcctccagtccagcgctggggaaaggggaaccttggcgccatctgctggcctctttgggtaaaacctagatagatgtagggcattgggagggaggagatggcagtgcctgagggcttgagagagaaggcggctgaaggagggggcttggaggatttggagagttgtgactgtgggggtacagccttctcagtcctcatgatgcatggggtgcttgggccttaattctggggaaagccctggtgcctggaatctggcagccagtgagagctggctgggaggatttagtggagccctgggtgaacttgggagggagctgtcagaagcagccactgcaggccagggcgctggctcacgcctgtaatcccagcactgtgggagtccgaggtgggtggatcacctgaggtcaggagttcgagaccagcctggccaacatggtgaaaccccgtctctactaaaaatacaaaattagccgggcatggtggtgtgtgcctgtaatcccagctactctggaggctgaggcatgagaatcatttgaacctgggatgcagaggtttcagtgagctgagcacaccactgcattccagcctgggtgacagagaaagactccatctcaaaaaaacccagccactttatgtaccccatcccttagcgcaaggcttacgatgcagttggggctcattaaatgattgttgactgtatggaaaaaaaatcattcttccatcatatgtttattgagcacctattatggaccaggccctgtgtaatattctggaaacacagcagtgaaagaatgagtgaaaccatgaggacctgggtagggactaagggtgcgcctctgtcctcccaagctgcactcactgggcttcatttggaggactccacagagacccccttgagggctggccggtcacttacacattgacacctaatggggtcaccagcatttggaccctcctgcgtgtccagagtctcagcacctaactcaggctgcaggtgcccaagccagccccgggtacccatttagaataggaagtttcctttttatagcctaggatggtcatggccccagtcaaggatggtcactagacacccctcacccgccctgcaaatcacaggaagaatcaggaggtcaggagttgctttggggatataataattgagcacctactttatccatgttattgttttattttattttgagacggagtttcattcttttgcccaggctggagtgcagtggcgtgatcttggcttgctgcaatctctgctccccaggttcaagtgattgtcctgcctcagcctcctgagtagctgggactacaggtgcccaccaccatgcctggctaatttttttatttttagtagagacggggtttcatcatgttggccaggctggtctcgaactcctgatctcaggtgatccacccacctcagcctcctaaagtgctgggattacaggcgtgagccaccgcgcccggactttatccatgttattttgagtcttaggctggtatgtgtcattaacttccattccatatcaggaagctgaggatcagagaggtaaggggacttgccctgtgtcacacagccagtgaactatagagacatgtctcaaattaaattatgcggctgcaagttgagggcttgatccagtctgcctaccgtatcccctcacctctaaggacctctgaggacaaggatccagggctcagggctcaccagaggacatcacatcaatctccttccctgaagggctcaaggggacttattgctcacagaggcagttgctaatcccagggccaagacaagggaccccctactcacccaacacttttcccgtgctgacacattatgtacataagggaagactctttgaatcctcagaggagttggaattatacccattttacagatgaggaaactgaggcttgaagagaagaaggggcttgccatgggtcatacagctgggagacactgatctagcctctctaatcctcaaaatccccatcatggcaatgatgaagtcaggccagtttagtatttcctgagtgctggtggtgctgaggacatagtgatgaaccagactggtcctagtccttagggagttctcatggccggggaagaggagagagatgctcttaaaatacaaagaggggactgccttctggaataggaggcacctggggcctacagggacagaaaaggtaattaacttgagaggaaagcaggaagggcttctgggaagaggtgatgcttgagcttaataagtactgacagtcaggtggaagttagccaagtgagaggaaagaaacagagggaaagaggaatcattagccctgaggtctggaaaagtggagtgtttctgtggagggaaagcaggagaggcagaatgtttatgtgggcgtttgctgtaggctctgagctgtgacattgggagcaggaaaagtagaactagattggaaagattgttctgagcttgcaagagaagctggggctaggaagggctttatttattcaacaaacatttattgagcacctactaactgccagcagcatcacagctgtgaccaagacaacagggtccctgccccatgtgaatctcatattccagggggagagaaaagcaataaacaagtgagctgatgaccaaatgaaatatcttcagagaccgagagtggctatgaaaacaatgaagtcatgtggtggagagtggctgggtggggcgacgttacatggtgtgggctgagggggagtcacctgaactgacacctgaaggcaaaggaggcagcagcacacagcacaggaagggagctccagccccagaagagcaagtaccaaggccctggggcaggagcaagcttgcatgttggggaaacagaaagaagccagtgagcctggagctttataagcaagaaggaggcagtgagggcaggtgggattggataacacatgcctccaggtgtggaagggaggttaggttgatcccactcacaatgggaagcttcgaggggagatgagatgggatgtgatttgcattttaaaaggctcactttgcccgctccagtgtgcaggctggatggcagagaacaggagtggggggccaggtgccctgtgaggaagcaaggagggtgctgcggtctcacggccagaaaggatgcagtgttggcctgggtggtggcaggggacagagagagaagtcgatggaggatttgggatgttttttttttgtttgtttttgtttttttttttgcaggaggagctgatggatcagacatataggaggagatgaaaaggaagcagggcagaggtcagccctccaaagtccagattctgaagccagaaacccctggctgggtgacatagggccaagtaactctagctttctgagcctaaaatgcctcctctggtcaggggtggagaagaggaagagagaaagaaagaggtaggaggacgggggcggggggtgggggggatggggagggaggaggacggggaggggggaagggagaaggaggagcggcagaatagagccttctaatcgggtaaaggagacctcctcaaatctcttcagttcttcagagtctacacaggaaggctcccatccaacagcactcagagaggttgagaatctcacccagtatcacaaagccagtcagtggcagctccaggcctcaaagcctggaccctggctttgcctttggagacagattctcagctgcacaccagtcacccagattcctcagaaacagtggggccagaggccccattttagaggctcagagtggaaggcagtggaagaggtggaggcagctaggggaagatgagagaggggtagaaggacaaaagcctgggagtgaagactgcctttacgttcactcctcagctcagccccagactgccggagtgaccttggcatctgttctcactggcgaacagcggccatccgcagtgaaggtctgaccctgagtctccagggtcggtccacctcccacaacccaagtccacggaggacctccctcgtggctctgcacagcctgggcacagccagcagagggcgccacctcagccacagtgaagcccacattgccccagcgcaggaacagccccaggaggaggccccggctggcagaggctgccttgcctgctgcttagctctcaggaggtcaactcccaggcgagccgaccacagacgcagcagccaggtagagcctgcatcttgctgcctctgcctgtaaacatgtctctgaacctctctgagccgcagtttccccatctataaatgggcctaacaatagtgcctgcctcatagggttctgtgaggagtcaatgaagatcagccacataagggctgagttcctagcagctgccatttttattagcagtagtggcagttgtatcatatcttaaagcgcctgacacaaagtgtgtccaatcagtggtagctacgatgacgacaaagatgatgacgaggatgttgcagggactcggtcattgcttgtctcaaatttcctcaccagggtgtatccagtgcctgccaacctgggatgcctctagtgaggggcattgctgccttcctggcaacactgccagaccatccttttgctgaaaattgcctcctggaagccatccccctacctggcccacccaactccccgctcaggatgatgcagctggcccagcctctggcctcaggcccctttgttaaaagtctgcatgagaggtctcagagaaggctggaggacagatccagcagctggactcatccctttgctggaagggaagggaacccgggtggcttcccaggcaggagattctcagtgggtcttgttcttgctgctcaaagttccttttctgcacactgggaagaaataagtgaaagaaaaaatccctgtgttgtctaaacctcccctcatacctccgacccaggaatggctggaggctgaagagggaatatgatggcccagagtgacaagcccaggaatgctggcattctagttggctctggtcccacctgctgccagacacacccatctgtgtttgtgggtcccggggtgagtgcttatgggtctggcatcaaggggtctggtgaggaaggcaagagtccaaggcttggagccaaacagtttgggctcacacattggctcagccccgcactacagtgtgacctctggcaaatcactctcctggcatccatcccagcgtggtgtttggggaacacaggagatgttacatgtgaagaggaaagcgcaggacctggcacgtgctaagtatctataaatgttgcagtgggtattattataaagtgcaagtccctcatttccccgagatgctctctgcatctgagtgggccagggtggctgtgggagtgggttatgtcaggcaggatgatgttctgacccacttctgggtcagcgggccagggcttgaagcgccatgcccgtgcctgcatttgcaagggtgtgtgtgtgtgtttgggaggaggaaggggtgtgcattggatgtgcatgtgtgcaaaggtgtgcatatgcttgtgtgcatgcaccaaaggctgccccatcccaggcattcctggggcaaatgcatacttgcaggtaccagtgcagtctcccagcagtgattcaggaggccctgctgttcactgttactatggaaacaatgaggcaatcctcagcctccggtagatcctaaggtgccaggaatgagagctggcctggtcttcccagggagggagacaaattgggagcacagggttcctgggatagggcaacctcggactccgggtggggttctggaactctgggtacccctggaccctctgggaagtcttctcactcctccaaggaagcctggcccactggaaagagctcggagacagagctgggttctagcttgcctctggctctaaccccatgcatagtctcagggagggaactggggtgccagcagcagtctagagctggggtgtgacctttcctctcactagggcacctgccggcaaagctgtgtgaatgtgtatcccagagccctgaagtgtcacggagcagcctccttcacatgcactaccctccacagtgtcttgtaggttccccacagcagctctgcaagggaggcaaggctcagctacatgcacagtccctccgcccccagagccacaccacacaggtggctgggaattccaaccacttttctgggtcatgaggagcaggctgggaggagaatcccccagggctatgggcagtggatgcagcgttcagcctggacaaccccagcagagctgggccgctggaaggcttctgggaggcaaatcccggtttagggggcactttttaatttttatttcacttatttatttagagacagggtctcgctcactgcaacctccatttcccgggctcaacaatcctcctggctcagcctcctgattacacacccagctaattaaaaaaattttttttttgtagagatggggtctcaccatgctgcccaggctggtctcaaactcctggcctcgagcaatcctcatgcctcggcttccccaagtttctttctttttttttttttgagagcaatcctcatgcctcggcttccccaagtttctttcttctttttttgagatggagtctcgctctgtctaccaggctggagtgcagtggcacaatctccgctcactgcaagctccgcctcccaggttcacgccattctcctgcctcagcctcccgagtagctgggactacaggcacctgccaccaggcccggctgattttttgtatttttagtagagacggggtttcaccgtgttagccagtctcgatctcctgaccgcgtgacccgcctgccttggtctctcaaagtgctgggattacaggggtgagccaccgcgcctggcccgaggaagtttcttttaaaatcttaatttggggctgggcttggtggctcacgcctgtaatcccaacactttgggaggcagaggcgggtggatcacaaggtcaggcattcgagaacagcctggccatcatagtgaaaccctgtctcaactaaaaatacaaaaaattaggccaggcatggtggctcacacctgtaatcccagcactttgggaggcggaggcgggcggatcacctgaggtcaggagttcgagaccagcctgaccaacatggagaaaccctgtctctactcaaagtacaaaattagccgggcgtggtggtgcatgcctgtaatcccagctacttgggaggctgaggcaggagaatcacttgcacctgggaggcagaggttgcggtgagccgagatcacgccatctccagcctgggcaacaagagcaaaactccatctcaaaaaacaaacaaacaaaaaccaagaagccaggcatggtggcgcatgcctgtaatcccacctatttgggaggctgaggcacgagaatcacttgaacctgggaggcggaggttgcagtgagctgagattgcatcactggactccagcccaggtgacagtgcaagactccgtgtcaaaaaaaaaaaaaaatcttggccgggcacggtggctcatgcctgtaatcccagcactttgggaggccaaggtaggcagatcacaaggttagaagatcgagaccatcctggctaacacggtgaaacctcgtcactactaaaaaaaaaaaaatacaaaacaattagccgggcgtgatggcgggcacctgtagtcccagctactcgagaggctgagtcaggagaatggcacgaacccaggaggcagagcttgcagtgagccgaaatcgcgccactgcactccagcctgggcaatagagcgagactccgtctcaaaaaaaaaaaatcttaattttgactcaagtctcaaatatcctccatgtccaggttttaatacattcagacagaagggaatataaagttagaagtgaagactcagcctcctgccctccactccacttccaagaagtgactggtccctttgccatgacccaggaatgattttcaaacggtcccgtccaggatagaccaagagaagtggcaggattgagctccccagcaatggaattatggaagaaagatctcaatgttttgattacagaggctgtgaaggggccacttctaattgaggggagcagaaacagggcaggcctggctgggtgatctcaggcaagtcactgtccctctctggtcaactcctgaggcccttccagctatgagttgctttcaccagcaaaaagaaaagtgactactctgctgggcaagtgtggcctggatgtgaccccagatgctggcattacttcacccatcccaccaaggccaactcccatatgggagagattagggctgagagagggtcagggagccccttcatctggtgtggggaagatcctggtcatccggggcaggggttgctgggctggtgggacattattaggggaaaggaaggtagagggagaagagatggggtggaaggtgagggttaaggcatgtctcagagagcctctggtaggcagcagggagccatggaaggttattaagcagggaggaaggtaatcagatttagagaaactgatcagagcaggggagctgtgggaaggccagagctgtaataccaggcagatatgaccaggaagtgagtggcactgtggagaagagggcaggcctgagacctcctctgctacaatgggccggacttgggaagaaggcaggtgtgggagtgaggaagagggaggggtcctagatggggtggggcctcagcctcctttggtggatggagggggcccaagggccggacaggctgtgggagaaggtgatggggtgaccactggcaggcttacgtcagggtgtctgcgggcttctggcagcaagtcccggaagtggctggaaaggcaggttttacagaaaatggaccagaggggttgtttttgccaactttccccaaaagacaaaaggccatgccaggatttgaacctggatctgtcaccccgggaaatctgtactctcatattgaggaaccagctaagatgcagcactttctctatctcttgggctccctgacagtggacttggcatggaactgggtgcttttacccaggagtcagggctcttcttggggacccattggagccatctccatcttgcagagctcagcagcctcaggggctctcccagcaggatcttcaagcctagacttctgtttggagaaggaccacctcaagcagccccagccttcctgatctcccaacaccaggggttgcctaggagccacgtggagccctgtgagtactgacagccaacattagctgggcactgactgggcgcaggcgctatgccaggcacctcgcagctccctccctcttaatcctcacagcagcccttccagtgctattattattgtttccatttacagaccaggaaaccaaccgaagcttccagaggtcaaggaccttgtcccgctcctctacggggtgggtaacgctgctgtgtgacctgggctccgcatataaagtgagggactttgcttgagggcccccagcacctcacactccatccctgactttgggtctgcggttccagctcccaggactttcccacctcccgccccagcgtgctgtttcttagggcccagctcccttgggaacagccaggcccgtcccctccccctcccgggctgtgctcctggcagctctgccgccctaggctctggtccgggggtggtccctggcagagagggggctgggcagaagatgggatgctggcgctgagatgcggggtattcggagacccccaggcccccacctcagagcccgctgtgctctaggctggggtgggcagggccttttggaaaggggtggcttggggttttaatcactttttcaatgtttgtttgtgtaattcagccccgaaatgcttttccctccatctgtcccaccatctgctcctgtcaggattttccaaaccgtttgggaccaaagaggcaacaaggtgggggatggggggtaggggatgggggtagggtggctgggcctctgagggggctggggaggggccaccttcac

SEQ ID NO: 23 - DNA, 31534 bp, Mus musculus
agctggccacgaagagggaatgactggggaggggtggaaagtctggggctctgagctccaggcccgaaatcagggccagcagggtaggtgtgggaattccggggctagggtctctctgaggaagctgtgagggactcggtctgtccagatcacgctgccgtccggctgcccacagagcaaactgaatcctgggcctcttaacagcttgagctggttcccactcttacatggagacaatatctgtaccagccctggaggggagactataaagataaggagaagcagcctgtatatggtgcctgggttcacccagtacaggtacctaggtacaagtaccaaggtaacaagaggctggaactgccccgtgcagctcgctacaaagcagagatctgggcacgaacatctcctgcagcatcctgtagctgttgggctcagtagtagagaaatggttgcactgagccccaggaagcacaggcttcctgggccaaggcagttgagtccagtgtcaggatccaagtgatagtgttagcctaaccagacccacattcaaatccctttttggcccttttgctagctgtggaaggctgacagacatcaaccacccctcttcccttctgggtcattctctgtgaagccaacatttccagcggcttcctgggctcgctcccagaagcccccaccccacccacaacacccctgactcaagccaggcagtgactagccaagcccatggcttcccacctgcagcttgtcctccgccagccagccaagaagcccgatgagactccaccacacccaggaccctccttcctgtggacttgcatctgctatctccccaagtccagctcattctacacgggtgggcggggcctcagcctgcccctccattcatcccctctcacttccggccggcaatgcttccgatccctcagctcgccttctcgcactcctgcctgccgggatcagtttctctaatctgattagagtccttgttgctcaataaccccccactgccttccagagtaaagggacatctgaggctcgcgcactcccgccccactttgtgactcctcaacagtacctctgtaccacatgaccagcctcgcctccgcagggtgaagacgttcctggccctctcccaaccctaatctctccatgggattgaaactagatgggggtggatggagtgactctggcagctggggccccatcatcccagccaactcttggccaatacaataattgctcttccctctgccggggggaagctacgcttagccagaagccagaggggacatcctttgccagaggtcacttggctgggcccactgtcccctccacagtttcagatagctgaaacactgggatcgctcttaggcagttcatgacctgggcactccatcttccagtcctttgggtctgactggtctgtctcaagcccgctccccgctgccttcctggggccacagcaaaggcaatgatcacttatgaaagcagtgaaggggacagggagcggttttctttaataactttttcctcctcgagacaggatctcactatgtagcccagactgaactcattgtaatccccctgcctcagcatcctaaatccctggattattggcacgtgccaccacatccagcttttctaccacttgtaaatcgatacacatttctgtgtgcgtgcattatatacaactcccgtgtagaactcgggaggtctgagtcaagatctaaggggtcaggttgttgttgttgttgctgttgttagtttgagacaagggctcattagttagccctggctgtcctgaaaggagctatagagaccatcatcaaaattggggagattaacctgcctctgcctcccactgcctcccactgcctcatctcccacatgctaggattaaaggcgtaccctattctcgactgaggtttgtgtgtttttcattgttatttgtttgtctgtttttaagctttaattttttttacgtggttatgtagccggtcatggtggcacacgcttttaaccccagcactcaggaggcggaggcaggtggatctctgtgagttcaaggccagtctgatctacaagtgagtttcaggatagccagagctacacagagaaactttgtctcaaaaaaaaaatttttttttaatgtggcgcgcgcgtgtgtgtgtgtgtgtgtgtgtgtgtgtgtgtgtgtgtgtgatgtacagatatacatgggccaatgcgccaaaggacaactttgtgagcctggctctccccttccatgggtttcaggaaatcccagcaggcttgtgcagcaagcaatttacctaccaagttgtctgattagccagagtcatgatcctgcagatgtcatggtttgtgctgtaactgcagcactcgagcggaagaggcgggagaagcaggagctcaaaattctccttggctgtgtagtaagttcgagcctaagctgaaccatgtgagaccttgactcaaataacagttaagatagtgactggggagagggagggacagttcagtaaaggaatgcttgactagtaagcatgagatcctaggttcaaactccagtatggtgtgtgtgtgtgtgtgtgtgtgtgtatgtgtgtatatgtgtgtatatgtgtgtatatgtgtgtgtgtgtgtgtgtatgtatatgtgtgtgtatgtgtgtgtgtatatgtgtgtgtatgtgtatatgtatatgtgtgtgtatgtgtgtgtgtaaacatccatcaagcttttttttgtttttttttttttttgttttttgtttttgtttttcgagacagggtttctctgtgtagccctggctgtcccagaactcactctgtagaccaggctggcctcgaactcagaaatccgcctgcctctgcctcccgagtgctgggattaaaggcgtgcgccatcatgcccggctcttctttttctttaaaagtcaagattttgaagagaaaatgtctcctgaactacattctgcctcccacccagcagccctgccttggggcctggctaaagccgggtgctgtctccagaaaggatggctctaatgtgaccgtcttcctggccaactccccatttaaaatccccaactgcctctatggctgactctgtggagagagcagacacaggctcaccactgagcagctgcgcctcccagggcctcggctctctgaggaatattccctttctatagccatgaggcccctgcaagacactggagcgtgtgtgtgtaagagagagagaacaagagagagagagagaaggggctgctgggtgacagaagtgtcaccattggcctaggaatgaccacaaaggcgagaagatggtgtctcagacaggggagggtgcacactcctcttctggacttgtttctgcagctacctgctaagttctcccattttataaaagtggaaactgaggcacaaacaggtcaagttctcagcctgagccttgcttgaagtcagagtaagatccaagatgagccctagttagttctgcctctgggagccagtgagccagattaccttaaaggaatgagggtcccccaggggttccagaggtacccagagccccagacccctgactcaggaatctcccaagctgtgtctcttcctgggaaaacccagccagatctcaattctagcacctcgagttctctggaggcaggcctgggattgcctccttgtttccatagtaacagggaacagagagcctcctgcagcagtgtggggataccacagacaccagtacctgcaggtccacacgtgccccgggaagccttgggatgggacagcctctcgctaagtccatactctcacatgcctttgcaccgcatgcatctccagggctgcgaatgcacactccaccagaaatacacagatactcttacacatgcaaatacgtgcaccggtgacccagaccttggctctcccatccacagatgggaccagatgatcatcctgcaggatgtgacccactcccacaaccacccagtccaccccagtgcagaaaagggttggggaaggagaagattccatttacagcacccactgccacacagttaactgatcacgtgttggggattgcatgtggcatctccttcagttctcacaacaccacgggataagaaccagataaggaaacagactccacgaggcagggtaatttgcctgtggtcacacagtgagggtggattgtatcacggtttaagcgtaggactgttgggctgcaagcatctgaattctttccctcatcagaagacaccccccaccaatgtcagagccaggagcactaaacacacacacacacacacacacacacacacacacacacacacacgggttgggggggggggtgcttcccaatccaaacagcaggaataatgagcttttttgttcccagtcaactctggcttgtgtggtgtttggctgtccccggaatgaaggcgtgtgggaggccaggttatcctaggggctctccttccgtggagttctgccgagtcagctgaaaggaattgaaactgcaagcaagcacaagacctgtgaagccaccggggtcaccaggcagttcccagttactgttcgttccctcgttaggaaattcaagatgatgcctgaatccctgcctttatcttaataactaccacatggtggttacaaatagaaggcatcttcaggtgacataactggggctagggtgtggctccgtggcagagcacctgatggtgttaagagcttgggttcaattcccagccatacaaataacaacagcaagcttgcaagaggtggggcatctgcctgtaacctcggcacttataaggtaggggcaggaggatctggaattcaaagccagctacatacaagcctgtctcaaaatatcgataaataatgataacaaaatgatgacccgtgtgccccaagggccactactactaacacttggatagcttccacaccacctttaactcacaccgaatcctcacaaaactgcctgaggcagacattatggaaggggccctctgatagacgagaaaactgaggcttgatgacttattcacaaggcccttcctggtgctagtggctgagcctttaatgggttccctgagaactgccattctgggtggtggtcgccagcttcatctgggtctctagggtcttcctgtttttagaaaaagtgtggattcactatggccggagtgggcgccctctgctggtcatattctggctctgcagggccatcttccagggggtgggggaagccctcagaataggccatgtgagaggtgggggttttctggagcctcggatcttcactctgtgtggcgctacttggtccgtgaaaacagttgaggtgaactagacaggctcagctgaggagtgagccgaagtgtactgtgctccccagccctgttgggaacaaggccttatccctgaacctccactccagttctgcaggaccccttatgagaggacctcgggtccacactcttgggatatccggatgactgtggggtgtggctgagaaactgtatccagaggtaacgctagagttgaggtttgaggcacagagccctgggctcagattgaggttgaggctttgtgagccctgggcaagatggcctatgttccagtcccagagcactgtgaaatggcaggaatgaagatctgaggagatcggaggattccttcacctaattacaagcctcctccttctcctcctctgcctcctcccctccccccacccccgcccccggcttcctctcttcctccctcctcttcaccccgactgtcagatcccattctgtggcgtaggtacttattaccatcctcctctaaaagaccacagcagtggctcaaagaggtggagttaccggcccagcatcacccaaccaggtgggctgggacagcggagccccgcccagcttcctgtccttcctccccacccctctcctcacgtctcctttgagttctacacactggctcctcctacaaaaataaaaaagtctcagctgcttcttttgtccctgttagttcggccacctctcggatccaaggtggtcatttctggctctgctaccgcaccagcctccttggctcttcacaggtcacctggtcccgaccctgttttctgcggtcccgcctgccggccctgtgagccttttaaaatacaacgtgagtcttttaacctgtaaatccatcacaccacagctggactttgcgaggcttcctgtagctagtgagccagtgaaacctttctcccacactctgccccacctcccgctgcccccatttcctctcactttgcaagtaaggctcctttcgatccttctggcttcttttcgtctcctgaataggccaagcacaccgctgtcccaggacctttgcactagctgtccccactgctgggacgctactgtggtttgatatacccgcctccctccagtctttgctctcagcttagatgccacccttaaaccacgttagctaaacttaccttctcagccaccttaaccatatcatctcagcccctgtcagcctcggaagatacacggatgtatgagtttgacattgagtctcatgaacccaggctggcctctaactcattatgtacccaaggatgaccttaactcccaaaccttgtgcctctacctccctagtgctgacatcataggagttgacaatcacatccaatttatatagtgctgaggattgaggccaaggtctcttgggtgctgggcagacactctaccaactgagccacacgtgtagcccagccttggaagatgtatgtatgtgtgtgcctctgtatgtgtgtgtgtgtttgtgtatacctctgtgtgtgaatatgtgtatatgtgtgccttgtgtatatgtgtgtgtatgggtgtgcctgtgtgcctctgtgtgtgtacttgtgtgtgtgtgtgtacacgtgtgtgtgtgtgtgtgtgtgtacacgtgtgtgtgtgtgtgtgtgtgtgtgtggcatgtatagatagatgttttgtttgcctgtatgtctgtgcaccacgcgcttgtcttgtgcctgaggacgctggagagggcatcggatctgtatctcccagaactggagttacagatgtttgtgagctgctaagaggttgctgggaacggaatccgggtcccctgaaagagcagtcagtgcttttaacgcctgtgccgtctgccctgcctctctcagaggtatctagtcattggtgctcacttagcgtgtctccctgaaacgtgaggcccatggagagctggccttgttcatagcatctaggaggttctcagcgagggttgaatgagtgaagctcccatagccccatcttctcttgcaagctgctcaggacagtctttttggttctctcgctccccgtgtttcaatccagtgccagtcactctcctgcctcacatgcacggcttcccctgcctcccctccacatgcaacactatgttctctacctcttccccagccttcctgctttatctcctagctggcccatgtatcgccttctcctagaagccctccttgctaagaccttgggaactatgaacctagccaagcctcaccataatgaggacatcagagactaatctcagagatatgacagaccagtgtctcctggctatacaacccacagcaagcccttttctccttctgaacatcagtttcttcagcaatgacatggacataacgttcccgaccataagcgttgtgaggacgatggactgtggaaagcgttggtaaatggtgggtcagtccctgggtttcaccactgcccctgggagcatcaagccccttatgtctttcagagaagagtgtcctcatctgtaggaggaatattaatcctgcaatatggctgccctgatcacatccaaagaccttcctggtctgtgtgatctggctagaatgcagacaacctctcagtacacacctttaatcccaaacaatgtaagtaaagttagtttgtaaaaggaagcagccatgtttgaaagtgatgtcaagttgagtggcagacaaagtgacaaatcagagatatataggatacactcgactctccagagaagagagaaggaagagagacaacacaagaggaaactgtgcagagagagagggagagaggagaaggaggcaggtttttttggttttttgtttgtttgtttttgttttgtttttttcgagacacagtttctctgtgtagttctggctgtcctggaactcactctgtagactaggctggcctcggactcagaaatctgtctgcctctgcctcccaagtgctgggattaaaggcatgcgccaccacgcccggcttgaaggaggcagttttaccaggacacttagagagacagatgaaagagaaaacaagctaaacacaggtgaagacagaatgagccagagaaggagaaggagccagaagattagaacagatggccaaagttagtatgaggtcaaccagagcagttcagtcagaggctgagagagaagtcagatggaatcagtcagcttgtcgaggagtttgagccagaacggctgagctgagccagccagccagaactcagagagaacgagaaagggtgagcttcttcatcggcgagtctcggaggctggaaacattctaggcccagattagattgtacagaggctagaagcttccagaactaggcagaggttagcagagggaggcagtaagcctgggagacaacagttacatcaggcaaataaaaaatgcttttacactaatcctctgaaaggtccttagaggtaagggaggtaaaaggtcaaatcaggtcctgaacttgaagccatggattttagacacagctccatagttcattgtctgggtggttgcagccatgtcccttaattctctgaggctcagcttcttgatctagagctgagactaacgacgcacatcaaccttaaaatcccattaatgcaggtcaagagtgagtgctctctcattgtacctcaacgcaatcccctgccttctcctgagtcttgtctccctgtgacttggggctgtgtctaaataccacagcgttggctcaggactttaatcctgagcactcaggaggcagaggcaggtggatctctgagttcgaggtcagcctggtctagagagtgagttccaggacagccagggctacacagaggaaccccatctcaaaaagcaaaaaaacaaaaaacaaaaaaaaaacaaaaaaaaaaaaaaacaaagagcagagtaaatgtgagccaagtctgctccaagatcagataaagagccttctagatggaaaactgtgatctgctgtgggggacctgccgcctaagataggctcccagactctggacagctttgacacccacgggggtccaaatgttggtgagtccccaggtgtgacttcagggacattcagcccctccagactccccccttctccttctctagttcaagtgtttgtgtgttctttcaggatgttgcctggaacccggtgcataatgggtattcaataaatacatgtttgaagaatgaatttgttccatagagtcaataaacattactgaatacctactgtgtgtctggttaaggtagaaagcacgggatggcgtatataaaacaagtggtgctgacaaatgccttcccaggctccctcaggccatctccaggccctttcagtcttcctgcttctaactagctcctactgggtgctagactccacgccagggcttcctccagaaccgaaacaatgtccaagcacctcatgaatcctaggaaggctacaccccaccgccacaacgctccaaattctccaagtctgccatgacccttctaacagcgacgacccgcaagcttttcctcctagctcccaggcggtgaacactggctgccctttcccccctcctaacgccctacatccgcctggggtttttcccagaactgccagcaggtggcgcagaggttctcctttccccatcactggactataggccagaccccaccaggaccctctctctcctttttcctcagtcaggataaaattggatcctatgacctctatctgacccctctctttcctgctgctcgtgcgatagccaaccgaagagactccagttgctcctgccagccccctggtagtctggggaaggcaaggaggtccttgggggttaagctgcagctggtagggtggggtgggtagggcagagcgggcagcacctaacaaaagagaaagagaaaaagaagagggaaggtgccctggctgggctaccatcccggaaggtccaagtcctaacaaggcccccccaggacaaggtatgtggccaagaaaacagatggtgctggggtgggaggtcagcctgcctagcatggagtcctgggggtacagaaggctgggtgttgtgaatggaaagctcagcagaaccccctgccccccacacctcattcttcccaggggatcaggtagaaacttggggagaaagactccttgggtaagcattagtacaggaggggtgtatgtgtgtgtgtgtgtgtgtgtgtgtgtgtttgccttatgggggtgtgtgtgtgtgcaccaagctctaggttctctatctctgtgattcagtttcttcttcatctaaagtctagggataggatggaagatcttagaggcttctgtgagatgcctctctggtctaacctcactccttaaccttggctctctgactgcgactccagcccaagaaagtaagaggctgaggctggggagccttctgctgtcctatagggattctccttagggcaggacagtaaatgtggggtggaggctcctctctgcctctaaggccatcaaaggagtagccagaagggtgtgtgaggacaggctggcacctggctgttcccaaggtgatggaaaaaaagggttatcaacgtgtgctaattagctggagctatctgccacatcttccagcccctaccactttagagccattagctaaatcactgctcagtcaggtcagaatggatatagtggtcccgagagcgtccagaaaccacagccctctgatcttggagaaacacggttccagattgttcttttaataatctagaatgtgccagttttagagagagagagagattctagatgctggagtgttgaagtcactctgggtgaggagtgtgtgaagttgagcccaccttggattcaaatcctgcccgtggtgggtccttggacaaaacaagttaccaaactgcagtatccacctacatgagacgccccgcagcagagtggacctgaaggggctgcagagagaaccaagtcccaaacccagccaaggcctacagagtgtctgcgcctgacagatattcgcagtgctctcgaggggattaaaaataggcacaagaaaaagaaaggactggtctgaggtctcagctagacctccagggagtcagaggagagcctcttcggccccagtacacacattccccagagtaccgagtctgtaccccccttacactctacagctcgtgtgtgtgtgtgtgtgtgtgtgtgtgtgcctggggtgtgggctggagtgagagatggggtacagatgggcatctcccaagcacttgccctccctcttccctaaggaagagcgggaccggggccaggtcagggttaaggctgggactgaccgcggcacggtgctacgggtcctgcatcggtcagagagcgtgagccgcggggtccccaaagcccctggcttcccgggagcccacagagtgaagagcggggacaggagtgggggcgccctcggtcctcaccccgcccccgccctctccccgcagcgggggcgccccgccccccaggcgcccgacgtggacgcggccgctgccgccgccgccgccaccaccgccgccgccaccaccgccgccgccgcgcgggagtcgctgtccgcggagccgatatgcaggcggcgcggggcggcgcggggcggccgggccgggagggccgcgggctggagcgtgagtgcgagcggtcaccgggcccaggagtcgccatgcccccagggccgtgcgcctggccgccccgcgccgcgctccgcctgtggctaggctgcgtctgcttcgcgctggtgcaggcgggtaagggggcctggggagggggacgagggagggaacagcttcccctcccacgccgccaccgggaagtcctcggttcccttcctgctccctgaggacctcctgtgtcacctggtccctactctcctaacctgaccctagcgcctccgaaccttcttgacccctaaacccgtccttcagcttccaaacctctgccagtcacctcagccctgagtttttaaagctcttgcggctcctggtcccttcaggtcatcccctaaccctgagtctttgcctcagccaccttttctggccctgagagcagctgaggacactagtgccccaccttgggcctccctctgtatccccaaagatctctcagggacccataggcagctagctgcgcaggaacgactatgaagagaactgtaacctgaggttgaagggtgtttgcggggaccgtgggcgggggcggggggcgcaaaccctgctgcagttagtgtctggcccaccccatggggctctgcctccctagatcaccccaatcctgtccctcctggcagctgttgctgcctccctctctttctcgccctgcttctgtctccttgcctgtctccaatgttccacttgtctgctctctggttctgtgacctcagccacctgtctgtgtccttctgtccctttccatctgaatgtctggcataatcctgaagccttgagtccacttgtctgaggggtatggggctactgctcagggccagggcttctaatcacagcccctgccctcttgcatgatataaccccgtgtgactctactcccctctcctggaaggtcctttctgccctgctcctctactgctctcccacttatctctgacgttttccccattcaccatcttccttcacccagaaggccttgcgctatcttggtgtctctccaccaagggaccctgttctgaatgtcccctcttctctaacttcctctattcctcgcacgtgaggacccacagagtatggagaggctcacatagacccttccccttaggcgccctctgcccagcttaccatgtgaggttgcccctcagctccatgccagggctcagcccctcctggctcttcatctcagggtctgtctccttccctcaaggtcactcacttgacaacatgaggctatagaaagtgcaatggactaggagtccttgtggctgctttttctcaagctaatcagctcctgaactccattcagctattcctcgctcggtgcccaaccacctatccactagctctcgccttggttcaagcccaggtccaccaattttattttaggacccttggtttggccagtctatagccagcaggagtttctatgctagtcacaaggaacctggggcctctcagccactgaggaaccgagagccatgtggcccagctgagaccttggatccttgtttctgttcacatagcctcccccagctttctctttctcatatatgatggggctgggccttacagcagggcacgctcagactcaggtgcttccctgccctgcagacagcccctcagcccctgtgaacgtgaccgtccggcacctcaaggccaactctgccgtggtcagctgggatgtcctggaggatgaagtggtcattggctttgccatctctcagcaggtaacccttgagggtgcttaaggggagagggcatatcaagatggtgactggaaactgggcgcatatggtatttcatgctgtaatcccagaactcagaaggtggtggtggggggggcggggagtagtagaaggacttcaagtccaaggtcagccaggcatggaggatgatggtagagaaacagaaaaggaaaagaaaccacagggcaagagagacggtaacaagttgtatatctagcttagaactggggtcacagaaggtccttagttccttggacaaaggctcaggaggtcttggctgggacatggtaattcagagcaagggtctgacctcaaatgcttgctcctcagaagatgcgtggccctgggcaacactctgacccctctgaacatgtttccttagctctactgtggaaataaggctgttctgggtggcgggaatgtaacagccatgaagagggggcttgtcactgtcgaggtgggcagatgtggggttggtgccctgcatgctaacatagcaagctctctcccctttctagaagaaggatgtgcggatgctccggttcattcaggaggtgaacaccaccacccggtcctgcgctctctgggacctggaggaggacacagaatatatcgtccatgtgcaggccatctccatccagggacagagcccagccagtgagcctgtgctcttcaagaccccacgcgaggctgaaaagatggcctcaaagaacaaaggcaagcacggggcaaggagggtgagttaggtgagggaggttgggcagggcaggaggaaagacaagcggctcgagagatgaagaagggttgatttcggcccctggaaggagactgccatgcatgctttctccttaagattgagtccaaatgctgtcgccccaaaacagccttcaccctgttcctgggtctatgttgggtgtgttggcactgacagaggcacttcttgttgtgggctgctgggccctggaggagtggctcgggaggaacggagcccagggctagcttatctctccccacagatgaggtgaccatgaaggagatggggaggaaccagcagctgcgaacgggggaggtgctgatcattgttgtggtcctcttcatgtgggcaggtgagtcaggcctccaggtcttcctttactgacccaactggcaccaagggtgaggagcttggagatgtctgggagtcagcaaaatccctaagacctgcctgtggcagctctgggggctaaatcccttctctaatcccctccaccccaaacatagcatgttgctaccatcttgtatgctgtgggcacttgcctttttcctcttggaagtggtccagccttccagggtagccatggctaccgtcaatgtacttgggatgctgggcctccaagggttttcaaacttgggaagctcagaggcagccatgcctgacctcagacttggagcactctccttagttacctcttcttccagatgcagctgagctgcaaccatgcaaatccccccacgcatttacaggaatggccttcttccctctgtggcccccacagcacactgcccttctttaatccttatgtaatttgggtgggcttaggatatcttttcttcctaatgtctcagctccctgaggataaagtccagatgttgttcatctctctattcaatgcagctgccattcattggccagttgctcgaatggagcgtgtagtgttagtcatgactaggaagagtcttgagcttgcaaggaacttgggctggaacaagactgcacttagctataattgaagataatgagcactctagtggttctaatgtgggaacagagctggagagatggctcagagattaagaatgcctactgatcttccagaggaccctggttcaattcccagcatacacatcaggtgactcacaaccaccagaaactccagttctagggggatccaacacgtctggcctctgtacctgcacctacatacctacatctctctcaaacacacacagctaaaaaaatagtaaaaaaataaataaacttaaaatagcataatatgagaacagaggacatgagatcaattctggagctagaagtagggggaaaagacataggggctggagtgaaggtgtggctcagtggtagtcatccatgacgtcttaggttcgatttccaacactgaaaccacagggccaaagatgcagaacaaagataacataggagttgagcagagaggctgactagacgataatcaggcagccaatggaggaagcttgtttggtgtaagaggttcaagaaacaacaaatgatgctcacaggttcactcacagctcacagtagctgcagcctaggagagaaagtggaaaggtctggaagaaaggggcgggggggaggctggagactagagtcccttgagagattggaacaccacgctcaagcctgattaccgtggtgtttgaaggcagattctgttgaagacgcacttggggcagggagaagggtttctgaggcacatagaacaggcactcgagaaaaggcaggatgacagggttctatggaaaggggggttaagtatggtacattattagactcggcatggactgtgtttatgtaatcataacactataaacaaagaactaacccaaacttgcaacgggagtctgttaggatgttagagagaaaagtaggagctgttgggctttatctactatggtggaaagcggagagctatccagcaaggatcgagaaagaagcggtacacaccgcgaactggagttagcagtgtgaatactaaccaccttcctgggctgatagtagacagcaagcaggttctgctcgacacctcctagccgcaccgtggcatgaccttgagttaaggaaactgtcacaccagtgtgctccctttgtaccctgggactgataataataggctggagttgtgaggatcaagtgagattggctacgtcagtgcacagcacagggcctggcatgtgctcagtaaatgccgtgataatttctgtggtagctgtcagaggcttaaagaaagggtaacaggaaggcatgatcagattcatgctgtgggggaaccagcccagcagcaatgataggggtggctgggggccaggtaggggggaaaaggagccagaggctggagggaggctgcagcagcaaggcagaggccattcggggatggcagtgagccctagaagggatctggcaggcaaggcgagaactcagactgcccctgcctaactccttaggtgttatagctctcttctgccgccagtatgatatcatcaaggacaacgagcccaataacaacaaggagaaaaccaagagcgcatcagaaaccagcacaccggagcatcagggtgggggtctcctccgcagcaaggtgaggggaacaccttggcttggtgggtgtccttagacatctgtagtccctagactgcacaagggaaggggtcagctcaggacctggcgtggcagcagctgggcaaagccaagcttggctgctgccggtgtgacacaggggacactgcaaattgattttggatccttgccttttgcggagtgccaagggccagtgtcttttttttttttttttttttaagacagccaatgggaaaggcagagttcctggttgctgtggttgggtcagcaggagaaggggtgacatggcctggggcagtgtcttacctctgttccttcacttcctcttctatgaaaccagatatgatgacacatttacagtgcttgctctgagcagctcagaagacagtagagaatgcgagaggaccttctgacggtgattgtccaacatgcatctggcccgctctgcggctcctcccacctccatcttctcctatcatcgggcttattatcctctctcttggcttctctctttctgatatcagttcctgaagcctctcactaacccctagctccaggagtacctcagcaatgtccatggctgaagctacacccagagacagagctgcagaatgagagagacccagccggagggatgccattgctgcggggtagactgagtgccaaggctcttggcacaggactcacatctgggccactcagcttgaccgaaggctgtgtgtgaaaggggagaaagacgagacttccaggcagggctattctttttatttctgcgagggacaagagtctggcttttaagctgcagccccgctgttccttttctcctctgtcccatttcctaccttacatgaaatccattcaaccggctctggacacttctcttatctgttcccttcctggtttccaaagaagccctctgtgaacatcatcaaagcatgggtacccccatctgcaagggatgggcttcatcctccgctagtccctgtgtccttcctgggcacggggtgagagctgtagaagcggtgggggcacagctagccacagtttttccttttccctaccttagtctgacagaggaggttgaactacaaacccaaattctgcaaaaaaaaaaaaaaaaaaaaaaaaaaaaaaatcaaataagccacaaagctaaaagactgcgccccattctgaagaaggcacaagtacatgggagagtcctgccttacttctcctggactggcttcctctttgagaaaatgcacaaagctctgggagaaagcagctaccaagactatctggaactgtgtctgtcagaccaatggtaccagggaggctgcagtgctgccagcttttcaagggtcctgactctgtcagacactttctggattcagccactaaggacatctgtggtacaaggtgcacctttgcaaatgtgtatgatgccagttgtttggactcttggaaaacaccactggagggctttgctccagaatgcagaccgctctgccaaggcctccatgtctgcttgcatctagcttgcacaaagatagatctttgtggtgagatcatctgtgtggagttttaagaagctctggaagaaggtactgcccgcgtttaaaggaagtgccttggctggggcagcagtgtcagcttggataactgaaaacacctacatcctacagcataaagaactgctgagcgagctactggaaagccgtttacaccagacaggcagagagcagagagcagccactgtcactatcttgccatctcattcagggtcctctgaaagttacccagggctctcatctacttccctagagcttgcagtgtaaagtgacagctagtgtgctccctctctccctccctccccctcctctcctctgccccttactggtttaaaaaaaaaaaggtgcttgatgtggcagcagacttcttggagactgaagcacagtggctgccagacgcctgcactggaaaggcgaacgaactctgtatcttccatcggtggccaagggagtgtgggtggctgttcccagcacatagtaggtgcttggtaaaatatctgtggtactgaatgttgagcacaggtgcccaagtcagagagctgaaagccatcacccaatgactgccccttcattcgggtctctaacagctctccaagctgggtcagccaccactgtgctcgctccaactgcgggtagcacaggagaggagggacggataagggcagatgtcagcaatactaagggcttcctcctgggagggaatgaggttccactcattgtctcgtgacttccatccctgctgaacggggctgcaaggccaaggctccttaagggaggtccttacctccaatccagttagagcaataaccactttttaaatgtaaaataaagacaaatgaaaaggcacatccttgtcttttggtaaatgcccaaacgttgccctctttttctggcaattggcagcaagtcaggatgtgtggaggagggaatcagtcctcttccattttggcctgcagcttcttagggacatgccagccagccaagctggagttggaagggaattctcgaacagatgggggtgcacgtgtaggagaagaaaatagctgctccaccatcgtctttctgaggctcctctctaagcccagcttgggctgcctcaccacataggtatgcaagcatctgctcagtttcttaaaacaaagggttttcctctcaggagagggctgggcgcttattcctgccagagggctgaggttctcatctggggtgggggtatggagtgaagaactgcagaagcagctttctgcagaaatcattcggtattcgctctgcgttcttctgggctgttaaaggaacatcattaagattccaacagcaggttgaaaggcaggcagaggaatgacaccattagccaatgagcagaccagtaaatagggcaccttaaacactcccgtccagagccaggcgagaggatgtcagatgtgcagggtctgaaagcagagggagaggaagtcctcagaagtccctgaacagacagaatgccaaaccagaccccagagaggctccctctgcccgtctgctttcaactaagacgcggagaggccctgggtagaggtaggtagtggtgtctggagatcctgctatttgagcaaggtttccagtttctccatgcccgtggtacaccgtaatggatccgaagggaataactatccttctagcttagaggtttgtcctttctcctgtagtaaggatctcactcttcctgaatcaactgttacttgccatcaaatactacagctattatttaagaagtggtccctctgttcctttcaggtgactccaatgatttttgcaatttgggaaaggtccaggcagctctgagaccaagaccacagcaggcttgcaggaagaatgctggatagaaaggcaggagaccctgacacctcgggtagtcacttctctgaggggggagtagccttcctttctaccaatactgcatgcagatttccggagcctacctacccagtatactaactaaaggctgccctagaaacctcggtggaagccgaagagataaggctgccaggtattggaaacatgaatgaggcttcagacatactttatttacttactaaattttgttttaagtattgcttctataaacagaattctgtccacccccagggccagtccacagattaaaaacaaaacaaaacaaaacaaaaaacaaaaccaaacttgaaaatataacctgaagttaataagttaaggacatctcagatagtaacctggggatacatttcaggattgtcactgaattgccaaaggtcatattcctcctatttctggctgagtgctaggaaaggccagatttcccatctacggcgtgtctcagctgttagggaggaataaatgggttggaatgacaaggcaagtgcttacttattaaggaattccaacatcgaccagttgcctctgtgacaaatggaaatatttacccgacaggtgcccccagtgtacccacacacacatattctctctctctctctctctctctctctctctctctctctctctccctctctccctcccccttgtcccctccccctccctccaaacctttggattatttagggaataagaggaggaccttagtttctcgtcctataaaagctcaagatgggcttctcagagaatgagcctggtccatttctcctttttctaccaacttctctctaacaagatgaatgagacaccatcatttcagaggattcatcctggtctctgaaacctttgatatatatggtaaaaactaaccctgacacaaacaggaagtagttaccaaaaggtcctctacacttgacaggaacattacatatacacgggttaagaaaaccacacactgagacaagcatatcaaacagctaagtgtttaccacatttctgtgcaagcttttgcctagagtaaagaatggctttgtctagaaaacacacacacacacacacacacacacacacacacacacacacacacacacacactccagacaaaacttggcatggtaacacttgtctgtaatctccttcctttcaggagacggaggcaggacttaagtttgaagccagtctgggtttcatagtgagatcctgtctcaaaatacccacaaaatgtaaagatcagcaggtcagagagcctgtccaagtatgttgctactattttctcagcaggagctgggattttaagagcactggctaatgtaggtgacaatctattattgctgtccttatatccttgctctgaggaggcttaggtccataaaggggtttaaagaaggttctctctccagcatctacccacatacatccaatcttcacaccggacagttgttcttggagcaacaatttccggagaagttgggttaagaacacccaccagggggctggtgagatggctcagtgggtaagagcacccgactgctcttccgaaggtccagagttcaaatcccagcaaccacatggtggctcacaaccatccataacgagatctgattccctcttctggagtgtctgaagacagctacagtgtacttacatataatcaataaataaatctttaaaaaaaaaaaaaaaaaaaaaaaaaaagaacacccaccaggggctggcgagatggctcagtggttaagagcgccgactgcttcagcgccgactgctcttccgaaggtgcagagttcaaatcccagcaaccacatggtggctcacaaccatccgtaatgaaatctgacgccctcttctgcagtgtctgaagacagctacagtgtacttacatatagtaaataaataaataaatcttaaaaaaaaaaaaaaaagaacacccaccaatttcaaatgactaattctggtttctcctgtttccaaagggagaatgccctggaaccgcatggtttcctaaacatacacagtggccggccatggatccatgggaagggaaggaatgcaaggcactgccctcccgcccgctaccggctgcctggtctcccccgccctctgcacagggatatttcaggctctcccaatgtcaggctcctgacatgcaccatatgtagctgcaaatcctaatcaattgcaacatttcttaactgctggaacgccttccccagcactgtaatttaccctcaaaagaacagggagcaagcactttctccttcccagaaccatattctactaaatgccgccaccctcccaagcagagcgacctacgcagaggaaggcagagagtgctcctccaaagcccggaacagacggccacagtacatatgccactgacgagaacttttatttctttttaatgacattaaacacaactgctacaaggggaaaaacatgataaaaaaggaggcaccaaacttcagtttcataatcgaccccgacaacaactcgagtaaatcagagcccgatgagctgcagagctattgttatttcggctcctgacctacacaggaactatttatcaacaacacattttagctttgctttgtcaagacccctatggtaagaacgtccccagggatgataaaagacaggaacacagttaaatgcacataacccttactcaaatttaaaaatacagcaagaattaatttaatctacaagacttagaggccaaacccaaacataagagatatgcagctctgaagagattaagccccggcttctggccagtaccatctttaaggctaacatgccggatgagttttctttggcttttttctccttaaagaataccatgttaaccagtacagaacagctctctcctcccccagtccaccagatttaattagctgctaacactttggaaaaacagaattatctgcgctagaggaaatgtgattgtcacattttctagttaacctgtcactcatctgctctgacagaggcagcactcccattatacattcagtcttaattcctcctggtagcaggagagcaggagctttgctgtccctccactccctgggctccccgtgggaaccattcagccccaatgctagctactccagcggtagctaatctgcactttgttttggtcccataggtgggttgtttggcatatctcagtctaacaggctaactcacagcatcttggacaagtcaactgaggtcaacaacaagcgtgcccatcaagagaggtgactggactactgcctttcaaagtctggtcccagaatctaaaccaaataactaagaaatagaaaagtctttctgggggtggcgggtggggcggggggggggatgtcaaaagcagggagtggtggtgcacacctttaatcccagcactaagaaggcagaggcaggtgaatctctgtgagtcctgaggccagcctggtctacccagacaggagggctacataaaaaaaaaacctgtctgaggggtgaggggctggagggagagaaaaatcagaagtgcaagaccatcttgggttaaatagtgtgttgatggctagcctaggctttataggagaccctgccgcaaaaaaggaaggaaagaagaaaaaactttcactagataaaactaacacacacttgggaacatttatccaaacctattaaaggcttgaaaacaaaacaaaacaaaacaaacaaaatcaagattttcctaatcacagtcactttttcagtccaacaatggtgattcatccttttactcccagcagtgagaaggcaaggtaggcagagctctgtgagttaaggccagcccagtctaagagcgagttccaggacagccaggagtatacaaagaaaccctgtcttgaaaagcaaaaacaaaacagaacaaaaagatcatttttctgaggcagagtagactattcagggtgggttagccacatataaaatgagacagaggctaggcaactatgaatcactcccacagtgactgcagcagcaggagtgtcatattgtaaaccctctcagaatgatctctagagctgcctgtaagaaatacagatcttttaggacatccattaagacagtacacagagcctagcgctttggttggaacaccacaccttacgcggtgcatggtggtggtgcggtgcacgggctcaatcgtactttcccaagatgctcaaacactaatgtgaaacaatggacccaatgctacaactacaacgctaacatccagggtataagggtacctgtaaccaacgggagaggccagtgactctcccaaggatttcataggacgaaggttccttgaacagcagcaacacataaactcgggttccgaagacagaactgaagattcctagacatcccaattgtgctggcctaacaacagtcaggattctgtgccggcctaacgacagtcaggattctgacaggatttcttcagcagacagagggcacctgagagccatgtctcagtctaacaggacataagaacacttactgcaaagcttcaggactaaccggtcactgggagtgggaaaaggaaaagaaaacaatggggcagagaaaccaaccagtcacaagaccacagagtattgaacaagggttattcagctgtcttctgtcagttaagatgtgtaagatttcaaacattatgaacgaaatatatctaatagagagtgaaaaaagccactaataattttttaaaaaggcagctaataggtacagaaaggagaggatttacacttttaatctagcccttcaacaggacttttctccttctcctatttcaaatgtactgaattggcaacattaaaatactgacaagtattcaagaaactcaaatttaaaaagaggggtcgttaaaagtgacttctatctattcacaagtcaacaataataataccggctcttagcttgcaaaacagcctcttccttacagtagactggaaggtgagtctgcctgcccttacagctggtattttactcaaagcctgactgttctgacttaatgcaggccttcaaaagagaattaccttcatttaaaatttaaaaacagcaacaacaacaacaacagtgaacaaacagaaaaacaatacttaacactgctgaaacatattcaccagacagacatacaaatcaggggtggggggtggccctcattaaaaaacaaaaattcaagacagtaatgggcatttccaaaaggtgacaaattctttaaataaaaatcttgtgaaataaaactcaaaatatacaaacaaaaatagcagaggaaaatgtgatgctgctctggacgggacccttggcaggaactgtcactgttgatgggatgagacatatggactgtaggagaagtctgggagacgctggaaccgatggtggctccgcttgtttctgtcaacccactgactcagactgtacctctgcagaggcctctgtcggaaccgggcgtagtttctattgagagaaggagaataaaaacaggaagcgttttcagctggaactgtcatctgtatacgaaatagctagcacaactacttttaaagctatgtttagccaggcagtggtggcacacacctttaatcccagcactcgggaggcagaggcaggcggatctctgagttctaggccagcctggtctgcagagtgagtccaggacagccagggctacacagagcaagcctgtcttgaaaactcctaaggactgtaaggatcagattatatggttgctgttgtctgtctgtttgagacagggtttccatggaacttacttgttgggagcaaccctgcttgaacattaactgctttactgccttgtcagccctaagtgcactggcacaaagtcctggcctctgtgggaaagtactaaccccagtcaagaacaaagagctatagatcttgtggacaggtacctagcaacccattctgttctgttcctcctgctgaactttttacccagccaatagcctgctcttgggaacaggtgcattcccccagaaacaaagcggccccctccaccccacttaccccatatcctgcttctatgagtatataacgtctgtgtgaacagtaaacatttgtccacttgatcagacctcctgacttgctgtccgttctttacatctcttgtccccccaattctcttctaggtgcccccaagtccctgtcgactgtcctgcgggtagggacacttactatgtagaccaggcttccctcaaactcacaaaaatctgtctgattctgcctcctgagtgctggaaggatatgctaccatgcatggctaatattatattttgatgttataattctagaaattttacactatttaaattataggaaagccatcataaatgccatttccttccaactctcaatgtcacctcattcctacacaggtattattatatgtgccatacacaccttgttctaaggaaagccagccttgaatgtttaagagccaggcatggtgtgtatacctgttttcgccagcactggggagtgaggggaccctcagtcgcatgagtgcaaggccagtgtgagctacataaggctctggagaattcaaggagaaaaacgacttctctttctcgaagtgtttagagcagggtctgtatttcacggcttcatgtgactccgagaggccagcactgccacacaggttgcttatgccacatgcgttagattagataaaaagattcccagagacagcaagtcatcacttgactatcacatggtaagccgagagagtggacaccctaacacaaagacccgtaataaggtttgagaatcacccataagcctggtggtggtggcgcacacctttaattccagcagtagggaggcaaaggcagacagatctctgaatttgaggccagtgtgatctacacagagaaaccctgtctcaaaaaaagaacaagacagagacagacaggcaggtggagagagaagagcgaggatgacagtatgtgtgtgtcacctgtagtcatgttctgggtgtaggttctgagaaagccccttaataatttgatacaatctcaattcctaaaacgatgctaatgaccacttagtcgggtgaggtaggctcacacatgtaatcccagcattgaggaggccaaggcaaaggcgggtcagcaagatggcccagtgcgtaaagtatctgcaaagaaacctaacaaacttgaattcaatgcccagaactcacacatgggaggaagaactgactcctgtgggctgtcctctgacctccacgtgcaagctacagacaaagggcccagctgggctttgcaatatactgactcaaagggattcttagacaaagcccttctgagttacggctgggaaagtcacaggtgatcacttcatcactatccgagactacctgctcaattctttaaacaccctatctaagttatcagtgatgacccactaggaaagtactggcagtaacttctacactagtaataaattacgcctcaggttaagtaactttttcctaaggtcatacagaggagtagggaggaaagcctagactattattcattatctgactccaaaatgtatttagtacacaacatattacattgcccctcttcttttttgaggtgtgtgtctatattggatattgaatctagagcttacaaccgagctacatttctattcccacaccatcggagaattgtttatgttgtcttgttttgtaccatggaacttgctatgtaccccaacatagctaagaatctatagcaattatcctgcttctgcgtccaaaagcagatactgtactgggattaactgtttttgttttttaagacagggtttctctgtatagccctatcctggaactcactttgtagaccaggctggcctcgaactcagaaatccgcctgcttctgcctcccgagtgctgggattaaaggcgtgcgccaccactgcccagcatttttttttaactgctgtgattctgatgaagccaggataactaggacagagtaagcaataacagtaataggagaggtaggtaggcagccaagcaacgcagacagccattcttagaggactgaggatgggaagctggttggaagccaatgggacagagtgaaaagaaaaggaacccaacttgtgctttaaaagaatctccctagcttctgagttaagaacagtacttgagctgggcagtggtggcgcacgcctttaatcccagcacttgggaggcagaggcagcgggatttctgagttcaaggccagcctggtctacgaagtgagttccaggacagccagggctacacagagaaaccctgtcttgaaaaaccaaaaaaaaaaaaaaaaaaaaaaaaaaaaaaaaagaacagtacttgagcaagacaaatatagatgatttgaaataatccaggtaaaatgatgagatgtgctcagctttgagtataaaggaagtctctatgatttcctgatgccctaatagggaatgttagagaaaactgttacagtaaccaaggctttaatcgtgtgtgtgtctgtgtgtgtgtgtgtgtgtgtagactgggtctcactatgtagaccaggttggcctcaaatttacagagatctacctgcccttgcttcccaagtgctgggattaaagtgtgtgccaccactgcctatcctaaggttgctgagtcactgaattaaagttaaaactatactagatcaagaacatagaaatttaaaaattttaactaattaattaatcaactataattaatcaatcaatcatgtgcacaagcacgtgtgtggtgcaggtgcgcaagtgccacagatcatgtgcagaagtgagaggagaacttgcagcagttcatctcttcttctactatcaagttgataagcttggcactaactgccttttctcactaagccaccttgctagctgcaaagcccagattggagttaggatttaggtgtggtggtccatgcctgtaaccctgccacccaggaagcagaggcagaaggatgaggattttgaagagagtctggcaacataaagattccctatcttgaaacagacaaacacacgctctagattttttatttttttgaggcaagagtctcactatgcaatcctggtcagcctggaacttgctatataaaccagactggccctgaactcacagagatccattagcctctgcctcccacgtgctgtgattaaaagtgtgtgctatcctgcccagcctaccctggatactgaagtgtgatagtgggtatgatagtgcatgactatataatacaagacttagaaggctgaggctggcctaaatagcaaaaccttataatattgaagacagaggaaggggaagaaaggaggagaaagaagatgcgatggtaacatgattttggggccagcaagatggctcagtggagaaaagtattttcccaacaacctgagttcaactcctcaaacccatgtaaaagtgaagaactgactctaagttcatccatctctggcctccacatgtgtgccccagcacatgagcactcctccatgtacaatgcatatacaataaataaaaaataaacctgagttttggaaccagagaatttatagatagccataaaattgaagtgaattgatcaaaatcatacagctagttaaacactgtgcatctaatattagaacctgaatttcagtccccaatgtctagttcattctaaggcccgctttattttctggaaataaacaagaataacccaactacgcatctcatctctcataacccaattctagctttcccttctgcaaagaaggaagccgacttaccgtgtggtaagatctgaaggatgctgccagtctgggtgctgcatatgaacttgatccatcagggcatctagctctcccaaggtacctgtggcagacagagggagagtgctcagtcagcagtgagtgcactctgttcacccagagcaaagcagagcgcaggcctcaggagaaaacacacaggcacttgacctgataatacctgacgcgggtatcacagtcaaccagcagactgtaagccagagggaaacaccacttctggatgatttggggaaacaaaaatggctctgatcatcccttcaacgcttatcctgtaaggtaggaaaaacttcacagggacctaggaatgtggcagggaacaagacatcctgtctgtccccttgccttcgcttaagctaattaatgtggagatatgcaagtggctactcagactggggtgtgggaaccagggaaggcaagccagggatctgaacgatgcataggcatcagtgaggtaagcaggctatgggaggcttgtttaagaaaagtagatgatacaaaggctcaaggacaaaagacagtaaaacacattgaagggaaaagagtttagaagagatggagacaggccctctttacttacaagataaactgttacagaactctttgagaagaacctgacaatgcatcaaacatttcatgttatcttaatttaaaaatcatataatatttggaacagttattctaacttgtcttgataacgttcttggctgtgaagagacaccacagccaaggtaactcctataaaaggaagcacttaattaggagcttgcttggtgataggttagtccatgatcagcatggctggaagcagacaagcatgagtgctagagcggcttgtagctacacaagacctacagggagcaggcagggacagaccaagcctgacatggactgctgaaacctcaaagtccacctttagtgacatacttcctccaacaaggtgacagccccaatcctaaaacagtccactaactggtgggggaccaatcattcaagcatacgagcctatgggggccttcttattcagtctaccacataactgttcactgagatatgtaatagactttggtatagttaacttcactgtgtgggttttgagtttttattctttttaataggttgtattaaaaatc

SEQ ID NO: 24 - DNA, 31534 bp, Mus musculus
gatttttaatacaacctattaaaaagaataaaaactcaaaacccacacagtgaagttaactataccaaagtctattacatatctcagtgaacagttatgtggtagactgaataagaaggcccccataggctcgtatgcttgaatgattggtcccccaccagttagtggactgttttaggattggggctgtcaccttgttggaggaagtatgtcactaaaggtggactttgaggtttcagcagtccatgtcaggcttggtctgtccctgcctgctccctgtaggtcttgtgtagctacaagccgctctagcactcatgcttgtctgcttccagccatgctgatcatggactaacctatcaccaagcaagctcctaattaagtgcttccttttataggagttaccttggctgtggtgtctcttcacagccaagaacgttatcaagacaagttagaataactgttccaaatattatatgatttttaaattaagataacatgaaatgtttgatgcattgtcaggttcttctcaaagagttctgtaacagtttatcttgtaagtaaagagggcctgtctccatctcttctaaactcttttcccttcaatgtgttttactgtcttttgtccttgagcctttgtatcatctacttttcttaaacaagcctcccatagcctgcttacctcactgatgcctatgcatcgttcagatccctggcttgccttccctggttcccacaccccagtctgagtagccacttgcatatctccacattaattagcttaagcgaaggcaaggggacagacaggatgtcttgttccctgccacattcctaggtccctgtgaagtttttcctaccttacaggataagcgttgaagggatgatcagagccatttttgtttccccaaatcatccagaagtggtgtttccctctggcttacagtctgctggttgactgtgatacccgcgtcaggtattatcaggtcaagtgcctgtgtgttttctcctgaggcctgcgctctgctttgctctgggtgaacagagtgcactcactgctgactgagcactctccctctgtctgccacaggtaccttgggagagctagatgccctgatggatcaagttcatatgcagcacccagactggcagcatccttcagatcttaccacacggtaagtcggcttccttctttgcagaagggaaagctagaattgggttatgagagatgagatgcgtagttgggttattcttgtttatttccagaaaataaagcgggccttagaatgaactagacattggggactgaaattcaggttctaatattagatgcacagtgtttaactagctgtatgattttgatcaattcacttcaattttatggctatctataaattctctggttccaaaactcaggtttattttttatttattgtatatgcattgtacatggaggagtgctcatgtgctggggcacacatgtggaggccagagatggatgaacttagagtcagttcttcacttttacatgggtttgaggagttgaactcaggttgttgggaaaatacttttctccactgagccatcttgctggccccaaaatcatgttaccatcgcatcttctttctcctcctttcttccccttcctctgtcttcaatattataaggttttgctatttaggccagcctcagccttctaagtcttgtattatatagtcatgcactatcatacccactatcacacttcagtatccagggtaggctgggcaggatagcacacacttttaatcacagcacgtgggaggcagaggctaatggatctctgtgagttcagggccagtctggtttatatagcaagttccaggctgaccaggattgcatagtgagactcttgcctcaaaaaaataaaaaatctagagcgtgtgtttgtctgtttcaagatagggaatctttatgttgccagactctcttcaaaatcctcatccttctgcctctgcttcctgggtggcagggttacaggcatggaccaccacacctaaatcctaactccaatctgggctttgcagctagcaaggtggcttagtgagaaaaggcagttagtgccaagcttatcaacttgatagtagaagaagagatgaactgctgcaagttctcctctcacttctgcacatgatctgtggcacttgcgcacctgcaccacacacgtgcttgtgcacatgattgattgattaattatagttgattaattaattagttaaaatttttaaatttctatgttcttgatctagtatagttttaactttaattcagtgactcagcaaccttaggataggcagtggtggcacacactttaatcccagcacttgggaagcaagggcaggtagatctctgtaaatttgaggccaacctggtctacatagtgagacccagtctacacacacacacacacacacagacacacacacgattaaagccttggttactgtaacagttttctctaacattccctattagggcatcaggaaatcatagagacttcctttatactcaaagctgagcacatctcatcattttacctggattatttcaaatcatctatatttgtcttgctcaagtactgttctttttttttttttttttttttttttttttttttggtttttcaagacagggtttctctgtgtagccctggctgtcctggaactcacttcgtagaccaggctggccttgaactcagaaatcccgctgcctctgcctcccaagtgctgggattaaaggcgtgcgccaccactgcccagctcaagtactgttcttaactcagaagctagggagattcttttaaagcacaagttgggttccttttcttttcactctgtcccattggcttccaaccagcttcccatcctcagtcctctaagaatggctgtctgcgttgcttggctgcctacctacctctcctattactgttattgcttactctgtcctagttatcctggcttcatcagaatcacagcagttaaaaaaaaatgctgggcagtggtggcgcacgcctttaatcccagcactcgggaggcagaagcaggcggatttctgagttcgaggccagcctggtctacaaagtgagttccaggatagggctatacagagaaaccctgtcttaaaaaacaaaaacagttaatcccagtacagtatctgcttttggacgcagaagcaggataattgctatagattcttagctatgttggggtacatagcaagttccatggtacaaaacaagacaacataaacaattctccgatggtgtgggaatagaaatgtagctcggttgtaagctctagattcaatatccaatatagacacacacctcaaaaaagaagaggggcaatgtaatatgttgtgtactaaatacattttggagtcagataatgaataatagtctaggctttcctccctactcctctgtatgaccttaggaaaaagttacttaacctgaggcgtaatttattactagtgtagaagttactgccagtactttcctagtgggtcatcactgataacttagatagggtgtttaaagaattgagcaggtagtctcggatagtgatgaagtgatcacctgtgactttcccagccgtaactcagaagggctttgtctaagaatccctttgagtcagtatattgcaaagcccagctgggccctttgtctgtagcttgcacgtggaggtcagaggacagcccacaggagtcagttcttcctcccatgtgtgagttctgggcattgaattcaagtttgttaggtttctttgcagatactttacgcactgggccatcttgctgacccgcctttgccttggcctcctcaatgctgggattacatgtgtgagcctacctcacccgactaagtggtcattagcatcgttttaggaattgagattgtatcaaattattaaggggctttctcagaacctacacccagaacatgactacaggtgacacacacatactgtcatcctcgctcttctctctccacctgcctgtctgtctctgtcttgttctttttttgagacagggtttctctgtgtagatcacactggcctcaaattcagagatctgtctgcctttgcctccctactgctggaattaaaggtgtgcgccaccaccaccaggcttatgggtgattctcaaaccttattacgggtctttgtgttagggtgtccactctctcggcttaccatgtgatagtcaagtgatgacttgctgtctctgggaatctttttatctaatctaacgcatgtggcataagcaacctgtgtggcagtgctggcctctcggagtcacatgaagccgtgaaatacagaccctgctctaaacacttcgagaaagagaagtcgtttttctccttgaattctccagagccttatgtagctcacactggccttgcactcatgcgactgagggtcccctcactccccagtgctggcgaaaacaggtatacacaccatgcctggctcttaaacattcaaggctggctttccttagaacaaggtgtgtatggcacatataataatacctgtgtaggaatgaggtgacattgagagttggaaggaaatggcatttatgatggctttcctataatttaaatagtgtaaaatttctagaattataacatcaaaatataatattagccatgcatggtagcatatccttccagcactcaggaggcagaatcagacagatttttgtgagtttgagggaagcctggtctacatagtaagtgtccctacccgcaggacagtcgacagggacttgggggcacctagaagagaattggggggacaagagatgtaaagaacggacagcaagtcaggaggtctgatcaagtggacaaatgtttactgttcacacagacgttatatactcatagaagcaggatatggggtaagtggggtggagggggccgctttgtttctgggggaatgcacctgttcccaagagcaggctattggctgggtaaaaagttcagcaggaggaacagaacagaatgggttgctaggtacctgtccacaagatctatagctctttgttcttgactggggttagtactttcccacagaggccaggactttgtgccagtgcacttagggctgacaaggcagtaaagcagttaatgttcaagcagggttgctcccaacaagtaagttccatggaaaccctgtctcaaacagacagacaacagcaaccatataatctgatccttacagtccttaggagttttcaagacaggcttgctctgtgtagccctggctgtcctggactcactctgcagaccaggctggcctagaactcagagatccgcctgcctctgcctcccgagtgctgggattaaaggtgtgtgccaccactgcctggctaaacatagctttaaaagtagttgtgctagctatttcgtatacagatgacagttccagctgaaaacgcttcctgtttttattctccttctctcaatagaaactacgcccggttccgacagaggcctctgcagaggtacagtctgagtcagtgggttgacagaaacaagcggagccaccatcggttccagcgtctcccagacttctcctacagtccatatgtctcatcccatcaacagtgacagttcctgccaagggtcccgtccagagcagcatcacattttcctctgctatttttgtttgtatattttgagttttatttcacaagatttttatttaaagaatttgtcaccttttggaaatgcccattactgtcttgaatttttgttttttaatgagggccaccccccacccctgatttgtatgtctgtctggtgaatatgtttcagcagtgttaagtattgtttttctgtttgttcactgttgttgttgttgttgctgtttttaaattttaaatgaaggtaattctcttttgaaggcctgcattaagtcagaacagtcaggctttgagtaaaataccagctgtaagggcaggcagactcaccttccagtctactgtaaggaagaggctgttttgcaagctaagagccggtattattattgttgacttgtgaatagatagaagtcacttttaacgacccctctttttaaatttgagtttcttgaatacttgtcagtattttaatgttgccaattcagtacatttgaaataggagaaggagaaaagtcctgttgaagggctagattaaaagtgtaaatcctctcctttctgtacctattagctgcctttttaaaaaattattagtggcttttttcactctctattagatatatttcgttcataatgtttgaaatcttacacatcttaactgacagaagacagctgaataacccttgttcaatactctgtggtcttgtgactggttggtttctctgccccattgttttcttttccttttcccactcccagtgaccggttagtcctgaagctttgcagtaagtgttcttatgtcctgttagactgagacatggctctcaggtgccctctgtctgctgaagaaatcctgtcagaatcctgactgtcgttaggccggcacagaatcctgactgttgttaggccagcacaattgggatgtctaggaatcttcagttctgtcttcggaacccgagtttatgtgttgctgctgttcaaggaaccttcgtcctatgaaatccttgggagagtcactggcctctcccgttggttacaggtacccttataccctggatgttagcgttgtagttgtagcattgggtccattgtttcacattagtgtttgagcatcttgggaaagtacgattgagcccgtgcaccgcaccaccaccatgcaccgcgtaaggtgtggtgttccaaccaaagcgctaggctctgtgtactgtcttaatggatgtcctaaaagatctgtatttcttacaggcagctctagagatcattctgagagggtttacaatatgacactcctgctgctgcagtcactgtgggagtgattcatagttgcctagcctctgtctcattttatatgtggctaacccaccctgaatagtctactctgcctcagaaaaatgatctttttgttctgttttgtttttgcttttcaagacagggtttctttgtatactcctggctgtcctggaactcgctcttagactgggctggccttaactcacagagctctgcctaccttgccttctcactgctgggagtaaaaggatgaatcaccattgttggactgaaaaagtgactgtgattaggaaaatcttgattttgtttgttttgttttgttttgttttcaagcctttaataggtttggataaatgttcccaagtgtgtgttagttttatctagtgaaagttttttcttctttccttccttttttgcggcagggtctcctataaagcctaggctagccatcaacacactatttaacccaagatggtcttgcacttctgatttttctctccctccagcccctcacccctcagacaggttttttttttatgtagccctcctgtctgggtagaccaggctggcctcaggactcacagagattcacctgcctctgccttcttagtgctgggattaaaggtgtgcaccaccactccctgcttttgacatccccccccccgccccacccgccacccccagaaagacttttctatttcttagttatttggtttagattctgggaccagactttgaaaggcagtagtccagtcacctctcttgatgggcacgcttgttgttgacctcagttgacttgtccaagatgctgtgagttagcctgttagactgagatatgccaaacaacccacctatgggaccaaaacaaagtgcagattagctaccgctggagtagctagcattggggctgaatggttcccacggggagcccagggagtggagggacagcaaagctcctgctctcctgctaccaggaggaattaagactgaatgtataatgggagtgctgcctctgtcagagcagatgagtgacaggttaactagaaaatgtgacaatcacatttcctctagcgcagataattctgtttttccaaagtgttagcagctaattaaatctggtggactgggggaggagagagctgttctgtactggttaacatggtattctttaaggagaaaaaagccaaagaaaactcatccggcatgttagccttaaagatggtactggccagaagccggggcttaatctcttcagagctgcatatctcttatgtttgggtttggcctctaagtcttgtagattaaattaattcttgctgtatttttaaatttgagtaagggttatgtgcatttaactgtgttcctgtcttttatcatccctggggacgttcttaccataggggtcttgacaaagcaaagctaaaatgtgttgttgataaatagttcctgtgtaggtcaggagccgaaataacaatagctctgcagctcatcgggctctgatttactcgagttgttgtcggggtcgattatgaaactgaagtttggtgcctccttttttatcatgtttttccccttgtagcagttgtgtttaatgtcattaaaaagaaataaaagttctcgtcagtggcatatgtactgtggccgtctgttccgggctttggaggagcactctctgccttcctctgcgtaggtcgctctgcttgggagggtggcggcatttagtagaatatggttctgggaaggagaaagtgcttgctccctgttcttttgagggtaaattacagtgctggggaaggcgttccagcagttaagaaatgttgcaattgattaggatttgcagctacatatggtgcatgtcaggagcctgacattgggagagcctgaaatatccctgtgcagagggcgggggagaccaggcagccggtagcgggcgggagggcagtgccttgcattccttcccttcccatggatccatggccggccactgtgtatgtttaggaaaccatgcggttccagggcattctccctttggaaacaggagaaaccagaattagtcatttgaaattggtgggtgttcttttttttttttttttaagatttatttatttatttactatatgtaagtacactgtagctgtcttcagacactgcagaagagggcgtcagatttcattacggatggttgtgagccaccatgtggttgctgggatttgaactctgcaccttcggaagagcagtcggcgctgaagcagtcggcgctcttaaccactgagccatctcgccagcccctggtgggtgttctttttttttttttttttttttttttttaaagatttatttattgattatatgtaagtacactgtagctgtcttcagacactccagaagagggaatcagatctcgttatggatggttgtgagccaccatgtggttgctgggatttgaactctggaccttcggaagagcagtcgggtgctcttacccactgagccatctcaccagccccctggtgggtgttcttaacccaacttctccggaaattgttgctccaagaacaactgtccggtgtgaagattggatgtatgtgggtagatgctggagagagaaccttctttaaacccctttatggacctaagcctcctcagagcaaggatataaggacagcaataatagattgtcacctacattagccagtgctcttaaaatcccagctcctgctgagaaaatagtagcaacatacttggacaggctctctgacctgctgatctttacattttgtgggtattttgagacaggatctcactatgaaacccagactggcttcaaacttaagtcctgcctccgtctcctgaaaggaaggagattacagacaagtgttaccatgccaagttttgtctggagtgtgtgtgtgtgtgtgtgtgtgtgtgtgtgtgtgtgtgtgtgtgtgtgtgtgttttctagacaaagccattctttactctaggcaaaagcttgcacagaaatgtggtaaacacttagctgtttgatatgcttgtctcagtgtgtggttttcttaacccgtgtatatgtaatgttcctgtcaagtgtagaggaccttttggtaactacttcctgtttgtgtcagggttagtttttaccatatatatcaaaggtttcagagaccaggatgaatcctctgaaatgatggtgtctcattcatcttgttagagagaagttggtagaaaaaggagaaatggaccaggctcattctctgagaagcccatcttgagcttttataggacgagaaactaaggtcctcctcttattccctaaataatccaaaggtttggagggagggggaggggacaagggggagggagagagggagagagagagagagagagagagagagagagagagagagagagaatatgtgtgtgtgggtacactgggggcacctgtcgggtaaatatttccatttgtcacagaggcaactggtcgatgttggaattccttaataagtaagcacttgccttgtcattccaacccatttattcctccctaacagctgagacacgccgtagatgggaaatctggcctttcctagcactcagccagaaataggaggaatatgacctttggcaattcagtgacaatcctgaaatgtatccccaggttactatctgagatgtccttaacttattaacttcaggttatattttcaagtttggttttgttttttgttttgttttgttttgtttttaatctgtggactggccctgggggtggacagaattctgtttatagaagcaatacttaaaacaaaatttagtaagtaaataaagtatgtctgaagcctcattcatgtttccaatacctggcagccttatctcttcggcttccaccgaggtttctagggcagcctttagttagtatactgggtaggtaggctccggaaatctgcatgcagtattggtagaaaggaaggctactcccccctcagagaagtgactacccgaggtgtcagggtctcctgcctttctatccagcattcttcctgcaagcctgctgtggtcttggtctcagagctgcctggacctttcccaaattgcaaaaatcattggagtcacctgaaaggaacagagggaccacttcttaaataatagctgtagtatttgatggcaagtaacagttgattcaggaagagtgagatccttactacaggagaaaggacaaacctctaagctagaaggatagttattcccttcggatccattacggtgtaccacgggcatggagaaactggaaaccttgctcaaatagcaggatctccagacaccactacctacctctacccagggcctctccgcgtcttagttgaaagcagacgggcagagggagcctctctggggtctggtttggcattctgtctgttcagggacttctgaggacttcctctccctctgctttcagaccctgcacatctgacatcctctcgcctggctctggacgggagtgtttaaggtgccctatttactggtctgctcattggctaatggtgtcattcctctgcctgcctttcaacctgctgttggaatcttaatgatgttcctttaacagcccagaagaacgcagagcgaataccgaatgatttctgcagaaagctgcttctgcagttcttcactccatacccccaccccagatgagaacctcagccctctggcaggaataagcgcccagccctctcctgagaggaaaaccctttgttttaagaaactgagcagatgcttgcatacctatgtggtgaggcagcccaagctgggcttagagaggagcctcagaaagacgatggtggagcagctattttcttctcctacacgtgcacccccatctgttcgagaattcccttccaactccagcttggctggctggcatgtccctaagaagctgcaggccaaaatggaagaggactgattccctcctccacacatcctgacttgctgccaattgccagaaaaagagggcaacgtttgggcatttaccaaaagacaaggatgtgccttttcatttgtctttattttacatttaaaaagtggttattgctctaactggattggaggtaaggacctcccttaaggagccttggccttgcagccccgttcagcagggatggaagtcacgagacaatgagtggaacctcattccctcccaggaggaagcccttagtattgctgacatctgcccttatccgtccctcctctcctgtgctacccgcagttggagcgagcacagtggtggctgacccagcttggagagctgttagagacccgaatgaaggggcagtcattgggtgatggctttcagctctctgacttgggcacctgtgctcaacattcagtaccacagatattttaccaagcacctactatgtgctgggaacagccacccacactcccttggccaccgatggaagatacagagttcgttcgcctttccagtgcaggcgtctggcagccactgtgcttcagtctccaagaagtctgctgccacatcaagcacctttttttttttaaaccagtaaggggcagaggagaggagggggagggagggagagagggagcacactagctgtcactttacactgcaagctctagggaagtagatgagagccctgggtaactttcagaggaccctgaatgagatggcaagatagtgacagtggctgctctctgctctctgcctgtctggtgtaaacggctttccagtagctcgctcagcagttctttatgctgtaggatgtaggtgttttcagttatccaagctgacactgctgccccagccaaggcacttcctttaaacgcgggcagtaccttcttccagagcttcttaaaactccacacagatgatctcaccacaaagatctatctttgtgcaagctagatgcaagcagacatggaggccttggcagagcggtctgcattctggagcaaagccctccagtggtgttttccaagagtccaaacaactggcatcatacacatttgcaaaggtgcaccttgtaccacagatgtccttagtggctgaatccagaaagtgtctgacagagtcaggacccttgaaaagctggcagcactgcagcctccctggtaccattggtctgacagacacagttccagatagtcttggtagctgctttctcccagagctttgtgcattttctcaaagaggaagccagtccaggagaagtaaggcaggactctcccatgtacttgtgccttcttcagaatggggcgcagtcttttagctttgtggcttatttgatttttttttttttttttttttttttttttttgcagaatttgggtttgtagttcaacctcctctgtcagactaaggtagggaaaaggaaaaactgtggctagctgtgcccccaccgcttctacagctctcaccccgtgcccaggaaggacacagggactagcggaggatgaagcccatcccttgcagatgggggtacccatgctttgatgatgttcacagagggcttctttggaaaccaggaagggaacagataagagaagtgtccagagccggttgaatggatttcatgtaaggtaggaaatgggacagaggagaaaaggaacagcggggctgcagcttaaaagccagactcttgtccctcgcagaaataaaaagaatagccctgcctggaagtctcgtctttctcccctttcacacacagccttcggtcaagctgagtggcccagatgtgagtcctgtgccaagagccttggcactcagtctaccccgcagcaatggcatccctccggctgggtctctctcattctgcagctctgtctctgggtgtagcttcagccatggacattgctgaggtactcctggagctaggggttagtgagaggcttcaggaactgatatcagaaagagagaagccaagagagaggataataagcccgatgataggagaagatggaggtgggaggagccgcagagcgggccagatgcatgttggacaatcaccgtcagaaggtcctctcgcattctctactgtcttctgagctgctcagagcaagcactgtaaatgtgtcatcatatctggtttcatagaagaggaagtgaaggaacagaggtaagacactgccccaggccatgtcaccccttctcctgctgacccaaccacagcaaccaggaactctgcctttcccattggctgtcttaaaaaaaaaaaaaaaaaaaagacactggcccttggcactccgcaaaaggcaaggatccaaaatcaatttgcagtgtcccctgtgtcacaccggcagcagccaagcttggctttgcccagctgctgccacgccaggtcctgagctgaccccttcccttgtgcagtctagggactacagatgtctaaggacacccaccaagccaaggtgttcccctcaccttgctgcggaggagacccccaccctgatgctccggtgtgctggtttctgatgcgctcttggttttctccttgttgttattgggctcgttgtccttgatgatatcatactggcggcagaagagagctataacacctaaggagttaggcaggggcagtctgagttctcgccttgcctgccagatcccttctagggctcactgccatccccgaatggcctctgccttgctgctgcagcctccctccagcctctggctccttttcccccctacctggcccccagccacccctatcattgctgctgggctggttcccccacagcatgaatctgatcatgccttcctgttaccctttctttaagcctctgacagctaccacagaaattatcacggcatttactgagcacatgccaggccctgtgctgtgcactgacgtagccaatctcacttgatcctcacaactccagcctattattatcagtcccagggtacaaagggagcacactggtgtgacagtttccttaactcaaggtcatgccacggtgcggctaggaggtgtcgagcagaacctgcttgctgtctactatcagcccaggaaggtggttagtattcacactgctaactccagttcgcggtgtgtaccgcttctttctcgatccttgctggatagctctccgctttccaccatagtagataaagcccaacagctcctacttttctctctaacatcctaacagactcccgttgcaagtttgggttagttctttgtttatagtgttatgattacataaacacagtccatgccgagtctaataatgtaccatacttaacccccctttccatagaaccctgtcatcctgccttttctcgagtgcctgttctatgtgcctcagaaacccttctccctgccccaagtgcgtcttcaacagaatctgccttcaaacaccacggtaatcaggcttgagcgtggtgttccaatctctcaagggactctagtctccagcctcccccccgcccctttcttccagacctttccactttctctcctaggctgcagctactgtgagctgtgagtgaacctgtgagcatcatttgttgtttcttgaacctcttacaccaaacaagcttcctccattggctgcctgattatcgtctagtcagcctctctgctcaactcctatgttatctttgttctgcatctttggccctgtggtttcagtgttggaaatcgaacctaagacgtcatggatgactaccactgagccacaccttcactccagcccctatgtcttttccccctacttctagctccagaattgatctcatgtcctctgttctcatattatgctattttaagtttatttatttttttactatttttttagctgtgtgtgtttgagagagatgtaggtatgtaggtgcaggtacagaggccagacgtgttggatccccctagaactggagtttctggtggttgtgagtcacctgatgtgtatgctgggaattgaaccagggtcctctggaagatcagtaggcattcttaatctctgagccatctctccagctctgttcccacattagaaccactagagtgctcattatcttcaattatagctaagtgcagtcttgttccagcccaagttccttgcaagctcaagactcttcctagtcatgactaacactacacgctccattcgagcaactggccaatgaatggcagctgcattgaatagagagatgaacaacatctggactttatcctcagggagctgagacattaggaagaaaagatatcctaagcccacccaaattacataaggattaaagaagggcagtgtgctgtgggggccacagagggaagaaggccattcctgtaaatgcgtggggggatttgcatggttgcagctcagctgcatctggaagaagaggtaactaaggagagtgctccaagtctgaggtcaggcatggctgcctctgagcttcccaagtttgaaaacccttggaggcccagcatcccaagtacattgacggtagccatggctaccctggaaggctggaccacttccaagaggaaaaaggcaagtgcccacagcatacaagatggtagcaacatgctatgtttggggtggaggggattagagaagggatttagcccccagagctgccacaggcaggtcttagggattttgctgactcccagacatctccaagctcctcacccttggtgccagttgggtcagtaaaggaagacctggaggcctgactcacctgcccacatgaagaggaccacaacaatgatcagcacctcccccgttcgcagctgctggttcctccccatctccttcatggtcacctcatctgtggggagagataagctagccctgggctccgttcctcccgagccactcctccagggcccagcagcccacaacaagaagtgcctctgtcagtgccaacacacccaacatagacccaggaacagggtgaaggctgttttggggcgacagcatttggactcaatcttaaggagaaagcatgcatggcagtctccttccaggggccgaaatcaacccttcttcatctctcgagccgcttgtctttcctcctgccctgcccaacctccctcacctaactcaccctccttgccccgtgcttgcctttgttctttgaggccatcttttcagcctcgcgtggggtcttgaagagcacaggctcactggctgggctctgtccctggatggagatggcctgcacatggacgatatattctgtgtcctcctccaggtcccagagagcgcaggaccgggtggtggtgttcacctcctgaatgaaccggagcatccgcacatccttcttctagaaaggggagagagcttgctatgttagcatgcagggcaccaaccccacatctgcccacctcgacagtgacaagccccctcttcatggctgttacattcccgccacccagaacagccttatttccacagtagagctaaggaaacatgttcagaggggtcagagtgttgcccagggccacgcatcttctgaggagcaagcatttgaggtcagacccttgctctgaattaccatgtcccagccaagacctcctgagcctttgtccaaggaactaaggaccttctgtgaccccagttctaagctagatatacaacttgttaccgtctctcttgccctgtggtttcttttccttttctgtttctctaccatcatcctccatgcctggctgaccttggacttgaagtccttctactactccccgccccccccaccaccaccttctgagttctgggattacagcatgaaataccatatgcgcccagtttccagtcaccatcttgatatgccctctccccttaagcaccctcaagggttacctgctgagagatggcaaagccaatgaccacttcatcctccaggacatcccagctgaccacggcagagttggccttgaggtgccggacggtcacgttcacaggggctgaggggctgtctgcagggcagggaagcacctgagtctgagcgtgccctgctgtaaggcccagccccatcatatatgagaaagagaaagctgggggaggctatgtgaacagaaacaaggatccaaggtctcagctgggccacatggctctcggttcctcagtggctgagaggccccaggttccttgtgactagcatagaaactcctgctggctatagactggccaaaccaagggtcctaaaataaaattggtggacctgggcttgaaccaaggcgagagctagtggataggtggttgggcaccgagcgaggaatagctgaatggagttcaggagctgattagcttgagaaaaagcagccacaaggactcctagtccattgcactttctatagcctcatgttgtcaagtgagtgaccttgagggaaggagacagaccctgagatgaagagccaggaggggctgagccctggcatggagctgaggggcaacctcacatggtaagctgggcagagggcgcctaaggggaagggtctatgtgagcctctccatactctgtgggtcctcacgtgcgaggaatagaggaagttagagaagaggggacattcagaacagggtcccttggtggagagacaccaagatagcgcaaggccttctgggtgaaggaagatggtgaatggggaaaacgtcagagataagtgggagagcagtagaggagcagggcagaaaggaccttccaggagaggggagtagagtcacacggggttatatcatgcaagagggcaggggctgtgattagaagccctggccctgagcagtagccccatacccctcagacaagtggactcaaggcttcaggattatgccagacattcagatggaaagggacagaaggacacagacaggtggctgaggtcacagaaccagagagcagacaagtggaacattggagacaggcaaggagacagaagcagggcgagaaagagagggaggcagcaacagctgccaggagggacaggattggggtgatctagggaggcagagccccatggggtgggccagacactaactgcagcagggtttgcgccccccgcccccgcccacggtccccgcaaacacccttcaacctcaggttacagttctcttcatagtcgttcctgcgcagctagctgcctatgggtccctgagagatctttggggatacagagggaggcccaaggtggggcactagtgtcctcagctgctctcagggccagaaaaggtggctgaggcaaagactcagggttaggggatgacctgaagggaccaggagccgcaagagctttaaaaactcagggctgaggtgactggcagaggtttggaagctgaaggacgggtttaggggtcaagaaggttcggaggcgctagggtcaggttaggagagtagggaccaggtgacacaggaggtcctcagggagcaggaagggaaccgaggacttcccggtggcggcgtgggaggggaagctgttccctccctcgtccccctccccaggcccccttacccgcctgcaccagcgcgaagcagacgcagcctagccacaggcggagcgcggcgcggggcggccaggcgcacggccctgggggcatggcgactcctgggcccggtgaccgctcgcactcacgctccagcccgcggccctcccggcccggccgccccgcgccgccccgcgccgcctgcatatcggctccgcggacagcgactcccgcgcggcggcggcggtggtggcggcggcggtggtggcggcggcggcggcagcggccgcgtccacgtcgggcgcctggggggcggggcgcccccgctgcggggagagggcgggggcggggtgaggaccgagggcgcccccactcctgtccccgctcttcactctgtgggctcccgggaagccaggggctttggggaccccgcggctcacgctctctgaccgatgcaggacccgtagcaccgtgccgcggtcagtcccagccttaaccctgacctggccccggtcccgctcttccttagggaagagggagggcaagtgcttgggagatgcccatctgtaccccatctctcactccagcccacaccccaggcacacacacacacacacacacacacacacgagctgtagagtgtaaggggggtacagactcggtactctggggaatgtgtgtactggggccgaagaggctctcctctgactccctggaggtctagctgagacctcagaccagtcctttctttttcttgtgcctatttttaatcccctcgagagcactgcgaatatctgtcaggcgcagacactctgtaggccttggctgggtttgggacttggttctctctgcagccccttcaggtccactctgctgcggggcgtctcatgtaggtggatactgcagtttggtaacttgttttgtccaaggacccaccacgggcaggatttgaatccaaggtgggctcaacttcacacactcctcacccagagtgacttcaacactccagcatctagaatctctctctctctctaaaactggcacattctagattattaaaagaacaatctggaaccgtgtttctccaagatcagagggctgtggtttctggacgctctcgggaccactatatccattctgacctgactgagcagtgatttagctaatggctctaaagtggtaggggctggaagatgtggcagatagctccagctaattagcacacgttgataaccctttttttccatcaccttgggaacagccaggtgccagcctgtcctcacacacccttctggctactcctttgatggccttagaggcagagaggagcctccaccccacatttactgtcctgccctaaggagaatccctataggacagcagaaggctccccagcctcagcctcttactttcttgggctggagtcgcagtcagagagccaaggttaaggagtgaggttagaccagagaggcatctcacagaagcctctaagatcttccatcctatccctagactttagatgaagaagaaactgaatcacagagatagagaacctagagcttggtgcacacacacacacccccataaggcaaacacacacacacacacacacacacacacatacacccctcctgtactaatgcttacccaaggagtctttctccccaagtttctacctgatcccctgggaagaatgaggtgtggggggcagggggttctgctgagctttccattcacaacacccagccttctgtacccccaggactccatgctaggcaggctgacctcccaccccagcaccatctgttttcttggccacataccttgtcctgggggggccttgttaggacttggaccttccgggatggtagcccagccagggcaccttccctcttctttttctctttctcttttgttaggtgctgcccgctctgccctacccaccccaccctaccagctgcagcttaacccccaaggacctccttgccttccccagactaccagggggctggcaggagcaactggagtctcttcggttggctatcgcacgagcagcaggaaagagaggggtcagatagaggtcataggatccaattttatcctgactgaggaaaaaggagagagagggtcctggtggggtctggcctatagtccagtgatggggaaaggagaacctctgcgccacctgctggcagttctgggaaaaaccccaggcggatgtagggcgttaggaggggggaaagggcagccagtgttcaccgcctgggagctaggaggaaaagcttgcgggtcgtcgctgttagaagggtcatggcagacttggagaatttggagcgttgtggcggtggggtgtagccttcctaggattcatgaggtgcttggacattgtttcggttctggaggaagccctggcgtggagtctagcacccagtaggagctagttagaagcaggaagactgaaagggcctggagatggcctgagggagcctgggaaggcatttgtcagcaccacttgttttatatacgccatcccgtgctttctaccttaaccagacacacagtaggtattcagtaatgtttattgactctatggaacaaattcattcttcaaacatgtatttattgaatacccattatgcaccgggttccaggcaacatcctgaaagaacacacaaacacttgaactagagaaggagaaggggggagtctggaggggctgaatgtccctgaagtcacacctggggactcaccaacatttggacccccgtgggtgtcaaagctgtccagagtctgggagcctatcttaggcggcaggtcccccacagcagatcacagttttccatctagaaggctctttatctgatcttggagcagacttggctcacatttactctgctctttgtttttttttttttttgttttttttttgttttttgtttttttgctttttgagatggggttcctctgtgtagccctggctgtcctggaactcactctctagaccaggctgacctcgaactcagagatccacctgcctctgcctcctgagtgctcaggattaaagtcctgagccaacgctgtggtatttagacacagccccaagtcacagggagacaagactcaggagaaggcaggggattgcgttgaggtacaatgagagagcactcactcttgacctgcattaatgggattttaaggttgatgtgcgtcgttagtctcagctctagatcaagaagctgagcctcagagaattaagggacatggctgcaaccacccagacaatgaactatggagctgtgtctaaaatccatggcttcaagttcaggacctgatttgaccttttacctcccttacctctaaggacctttcagaggattagtgtaaaagcattttttatttgcctgatgtaactgttgtctcccaggcttactgcctccctctgctaacctctgcctagttctggaagcttctagcctctgtacaatctaatctgggcctagaatgtttccagcctccgagactcgccgatgaagaagctcaccctttctcgttctctctgagttctggctggctggctcagctcagccgttctggctcaaactcctcgacaagctgactgattccatctgacttctctctcagcctctgactgaactgctctggttgacctcatactaactttggccatctgttctaatcttctggctccttctccttctctggctcattctgtcttcacctgtgtttagcttgttttctctttcatctgtctctctaagtgtcctggtaaaactgcctccttcaagccgggcgtggtggcgcatgcctttaatcccagcacttgggaggcagaggcagacagatttctgagtccgaggccagcctagtctacagagtgagttccaggacagccagaactacacagagaaactgtgtctcgaaaaaaacaaaacaaaaacaaacaaacaaaaaaccaaaaaaacctgcctccttctcctctctccctctctctctgcacagtttcctcttgtgttgtctctcttccttctctcttctctggagagtcgagtgtatcctatatatctctgatttgtcactttgtctgccactcaacttgacatcactttcaaacatggctgcttccttttacaaactaactttacttacattgtttgggattaaaggtgtgtactgagaggttgtctgcattctagccagatcacacagaccaggaaggtctttggatgtgatcagggcagccatattgcaggattaatattcctcctacagatgaggacactcttctctgaaagacataaggggcttgatgctcccaggggcagtggtgaaacccagggactgacccaccatttaccaacgctttccacagtccatcgtcctcacaacgcttatggtcgggaacgttatgtccatgtcattgctgaagaaactgatgttcagaaggagaaaagggcttgctgtgggttgtatagccaggagacactggtctgtcatatctctgagattagtctctgatgtcctcattatggtgaggcttggctaggttcatagttcccaaggtcttagcaaggagggcttctaggagaaggcgatacatgggccagctaggagataaagcaggaaggctggggaagaggtagagaacatagtgttgcatgtggaggggaggcaggggaagccgtgcatgtgaggcaggagagtgactggcactggattgaaacacggggagcgagagaaccaaaaagactgtcctgagcagcttgcaagagaagatggggctatgggagcttcactcattcaaccctcgctgagaacctcctagatgctatgaacaaggccagctctccatgggcctcacgtttcagggagacacgctaagtgagcaccaatgactagatacctctgagagaggcagggcagacggcacaggcgttaaaagcactgactgctctttcaggggacccggattccgttcccagcaacctcttagcagctcacaaacatctgtaactccagttctgggagatacagatccgatgccctctccagcgtcctcaggcacaagacaagcgcgtggtgcacagacatacaggcaaacaaaacatctatctatacatgccacacacacacacacacacacacacacgtgtacacacacacacacacacacacgtgtacacacacacacacaagtacacacacagaggcacacaggcacacccatacacacacatatacacaaggcacacatatacacatattcacacacagaggtatacacaaacacacacacacatacagaggcacacacatacatacatcttccaaggctgggctacacgtgtggctcagttggtagagtgtctgcccagcacccaagagaccttggcctcaatcctcagcactatataaattggatgtgattgtcaactcctatgatgtcagcactagggaggtagaggcacaaggtttgggagttaaggtcatccttgggtacataatgagttagaggccagcctgggttcatgagactcaatgtcaaactcatacatccgtgtatcttccgaggctgacaggggctgagatgatatggttaaggtggctgagaaggtaagtttagctaacgtggtttaagggtggcatctaagctgagagcaaagactggagggaggcgggtatatcaaaccacagtagcgtcccagcagtggggacagctagtgcaaaggtcctgggacagcggtgtgcttggcctattcaggagacgaaaagaagccagaaggatcgaaaggagccttacttgcaaagtgagaggaaatgggggcagcgggaggtggggcagagtgtgggagaaaggtttcactggctcactagctacaggaagcctcgcaaagtccagctgtggtgtgatggatttacaggttaaaagactcacgttgtattttaaaaggctcacagggccggcaggcgggaccgcagaaaacagggtcgggaccaggtgacctgtgaagagccaaggaggctggtgcggtagcagagccagaaatgaccaccttggatccgagaggtggccgaactaacagggacaaaagaagcagctgagacttttttatttttgtaggaggagccagtgtgtagaactcaaaggagacgtgaggagaggggtggggaggaaggacaggaagctgggcggggctccgctgtcccagcccacctggttgggtgatgctgggccggtaactccacctctttgagccactgctgtggtcttttagaggaggatggtaataagtacctacgccacagaatgggatctgacagtcggggtgaagaggagggaggaagagaggaagccgggggcgggggtggggggaggggaggaggcagaggaggagaaggaggaggcttgtaattaggtgaaggaatcctccgatctcctcagatcttcattcctgccatttcacagtgctctgggactggaacataggccatcttgcccagggctcacaaagcctcaacctcaatctgagcccagggctctgtgcctcaaacctcaactctagcgttacctctggatacagtttctcagccacaccccacagtcatccggatatcccaagagtgtggacccgaggtcctctcataaggggtcctgcagaactggagtggaggttcagggataaggccttgttcccaacagggctggggagcacagtacacttcggctcactcctcagctgagcctgtctagttcacctcaactgttttcacggaccaagtagcgccacacagagtgaagatccgaggctccagaaaacccccacctctcacatggcctattctgagggcttcccccaccccctggaagatggccctgcagagccagaatatgaccagcagagggcgcccactccggccatagtgaatccacactttttctaaaaacaggaagaccctagagacccagatgaagctggcgaccaccacccagaatggcagttctcagggaacccattaaaggctcagccactagcaccaggaagggccttgtgaataagtcatcaagcctcagttttctcgtctatcagagggccccttccataatgtctgcctcaggcagttttgtgaggattcggtgtgagttaaaggtggtgtggaagctatccaagtgttagtagtagtggcccttggggcacacgggtcatcattttgttatcattatttatcgatattttgagacaggcttgtatgtagctggctttgaattccagatcctcctgcccctaccttataagtgccgaggttacaggcagatgccccacctcttgcaagcttgctgttgttatttgtatggctgggaattgaacccaagctcttaacaccatcaggtgctctgccacggagccacaccctagccccagttatgtcacctgaagatgccttctatttgtaaccaccatgtggtagttattaagataaaggcagggattcaggcatcatcttgaatttcctaacgagggaacgaacagtaactgggaactgcctggtgaccccggtggcttcacaggtcttgtgcttgcttgcagtttcaattcctttcagctgactcggcagaactccacggaaggagagcccctaggataacctggcctcccacacgccttcattccggggacagccaaacaccacacaagccagagttgactgggaacaaaaaagctcattattcctgctgtttggattgggaagcacccccccccccaacccgtgtgtgtgtgtgtgtgtgtgtgtgtgtgtgtgtgtgtgtgtgtttagtgctcctggctctgacattggtggggggtgtcttctgatgagggaaagaattcagatgcttgcagcccaacagtcctacgcttaaaccgtgatacaatccaccctcactgtgtgaccacaggcaaattaccctgcctcgtggagtctgtttccttatctggttcttatcccgtggtgttgtgagaactgaaggagatgccacatgcaatccccaacacgtgatcagttaactgtgtggcagtgggtgctgtaaatggaatcttctccttccccaacccttttctgcactggggtggactgggtggttgtgggagtgggtcacatcctgcaggatgatcatctggtcccatctgtggatgggagagccaaggtctgggtcaccggtgcacgtatttgcatgtgtaagagtatctgtgtatttctggtggagtgtgcattcgcagccctggagatgcatgcggtgcaaaggcatgtgagagtatggacttagcgagaggctgtcccatcccaaggcttcccggggcacgtgtggacctgcaggtactggtgtctgtggtatccccacactgctgcaggaggctctctgttccctgttactatggaaacaaggaggcaatcccaggcctgcctccagagaactcgaggtgctagaattgagatctggctgggttttcccaggaagagacacagcttgggagattcctgagtcaggggtctggggctctgggtacctctggaacccctgggggaccctcattcctttaaggtaatctggctcactggctcccagaggcagaactaactagggctcatcttggatcttactctgacttcaagcaaggctcaggctgagaacttgacctgtttgtgcctcagtttccacttttataaaatgggagaacttagcaggtagctgcagaaacaagtccagaagaggagtgtgcaccctcccctgtctgagacaccatcttctcgcctttgtggtcattcctaggccaatggtgacacttctgtcacccagcagccccttctctctctctctcttgttctctctctcttacacacacacgctccagtgtcttgcaggggcctcatggctatagaaagggaatattcctcagagagccgaggccctgggaggcgcagctgctcagtggtgagcctgtgtctgctctctccacagagtcagccatagaggcagttggggattttaaatggggagttggccaggaagacggtcacattagagccatcctttctggagacagcacccggctttagccaggccccaaggcagggctgctgggtgggaggcagaatgtagttcaggagacattttctcttcaaaatcttgacttttaaagaaaaagaagagccgggcatgatggcgcacgcctttaatcccagcactcgggaggcagaggcaggcggatttctgagttcgaggccagcctggtctacagagtgagttctgggacagccagggctacacagagaaaccctgtctcgaaaaacaaaaacaaaaaacaaaaaaaaaaaaaaacaaaaaaaagcttgatggatgtttacacacacacatacacacacatatacatatacacatacacacacatatacacacacacatacacacacatatacatacacacacacacacacacatatacacacatatacacacatatacacacatacacacacacacacacacacacacaccatactggagtttgaacctaggatctcatgcttactagtcaagcattcctttactgaactgtccctccctctccccagtcactatcttaactgttatttgagtcaaggtctcacatggttcagcttaggctcgaacttactacacagccaaggagaattttgagctcctgcttctcccgcctcttccgctcgagtgctgcagttacagcacaaaccatgacatctgcaggatcatgactctggctaatcagacaacttggtaggtaaattgcttgctgcacaagcctgctgggatttcctgaaacccatggaaggggagagccaggctcacaaagttgtcctttggcgcattggcccatgtatatctgtacatcacacacacacacacacacacacacacacacacacacacacgcgcgcgccacattaaaaaaaaattttttttttgagacaaagtttctctgtgtagctctggctatcctgaaactcacttgtagatcagactggccttgaactcacagagatccacctgcctccgcctcctgagtgctggggttaaaagcgtgtgccaccatgaccggctacataaccacgtaaaaaaaattaaagcttaaaaacagacaaacaaataacaatgaaaaacacacaaacctcagtcgagaatagggtacgcctttaatcctagcatgtgggagatgaggcagtgggaggcagtgggaggcagaggcaggttaatctccccaattttgatgatggtctctatagctcctttcaggacagccagggctaactaatgagcccttgtctcaaactaacaacagcaacaacaacaacaacctgaccccttagatcttgactcagacctcccgagttctacacgggagttgtatataatgcacgcacacagaaatgtgtatcgatttacaagtggtagaaaagctggatgtggtggcacgtgccaataatccagggatttaggatgctgaggcagggggattacaatgagttcagtctgggctacatagtgagatcctgtctcgaggaggaaaaagttattaaagaaaaccgctccctgtccccttcactgctttcataagtgatcattgcctttgctgtggccccaggaaggcagcggggagcgggcttgagacagaccagtcagacccaaaggactggaagatggagtgcccaggtcatgaactgcctaagagcgatcccagtgtttcagctatctgaaactgtggaggggacagtgggcccagccaagtgacctctggcaaaggatgtcccctctggcttctggctaagcgtagcttccccccggcagagggaagagcaattattgtattggccaagagttggctgggatgatggggccccagctgccagagtcactccatccacccccatctagtttcaatcccatggagagattagggttgggagagggccaggaacgtcttcaccctgcggaggcgaggctggtcatgtggtacagaggtactgttgaggagtcacaaagtggggcgggagtgcgcgagcctcagatgtccctttactctggaaggcagtggggggttattgagcaacaaggactctaatcagattagagaaactgatcccggcaggcaggagtgcgagaaggcgagctgagggatcggaagcattgccggccggaagtgagaggggatgaatggaggggcaggctgaggccccgcccacccgtgtagaatgagctggacttggggagatagcagatgcaagtccacaggaaggagggtcctgggtgtggtggagtctcatcgggcttcttggctggctggcggaggacaagctgcaggtgggaagccatgggcttggctagtcactgcctggcttgagtcaggggtgttgtgggtggggtgggggcttctgggagcgagcccaggaagccgctggaaatgttggcttcacagagaatgacccagaagggaagaggggtggttgatgtctgtcagccttccacagctagcaaaagggccaaaaagggatttgaatgtgggtctggttaggctaacactatcacttggatcctgacactggactcaactgccttggcccaggaagcctgtgcttcctggggctcagtgcaaccatttctctactactgagcccaacagctacaggatgctgcaggagatgttcgtgcccagatctctgctttgtagcgagctgcacggggcagttccagcctcttgttaccttggtacttgtacctaggtacctgtactgggtgaacccaggcaccatatacaggctgcttctccttatctttatagtctcccctccagggctggtacagatattgtctccatgtaagagtgggaaccagctcaagctgttaagaggcccaggattcagtttgctctgtgggcagccggacggcagcgtgatctggacagaccgagtccctcacagcttcctcagagagaccctagccccggaattcccacacctaccctgctggccctgatttcgggcctggagctcagagccccagactttccacccctccccagtcattccctcttcgtggccagct

SEQ ID NO: 25 - DNA, 39018 bp, Homo sapiens
tagtaagtgccttcatgggcataaatgttcctctgagacagctttggctattagccatacttttaatattttgtacattcatggttattcatttataaatggtctgtaatgcaatgcagatttcccctttggcccaaatgccatttacagcagcacttttctctttctgagcagacagaatattttggtttcccctctgttgtttatttctcgtctgcctcgcctcatttgctaggtgttcccttggtgtgccttaagtatgagccactcaaatatttgtgtttctctaaacacccctgacactgtcctgctggtttctctatctggaatatccttcccttcttggccagttccccctagtgcatcaaagaaatcctgctcttttgccttcagaaaacaaaacaaaacgaaacctatcagtctccttatgtccccaaagacatagctttgctggtatctggttgtattgagctgttcatttgtctcttctgctagatggtaagctccttggaaactaaaaactaatcacttttctaacttcagactgagcacaaattaggttctcaagaaacattgaataatgagtgatccggtatccccttccaacatatttttggtcattgataccatcattctgagtagttactagggaacacttcactgcagtaaccaatacagcaaaacgtgaaatacagttacatagtagaattgtatttcttgcccatataatagtcaagtgcagttcttcatcagctgggaggttctcctccacacagtcatttaggaatccagggaacatagcagaggttgctagctctagacccaaacccatgtcctctttgtccacagtgaggacaatgccagcaacagctggccagctgttctgtagttctcagcctccctcgcagtgagatgtctccatgcaatttcagtggagcaacatataccatttccatttccaggtgtaggctcctaagaagagggtggcttcttcatgttctttctcacctttccgtaggctagctgcagataatgatgaggctttagggagtgggtggagccataaagtagaagcctggattcctaaatgacggtgtgaagtgttccctaatttcacgtaattgtttcttaatttcctgtttgggttatttgttgctaaggtataaaaaaaccctgatttttgtgtgttgatatttgtgtgctgcaactttgctgaattagcttattagctcaatttgatctcagatattagctcaaatattttgggagattatttatggttatctacataagatcatgtcatctgaaataaagatagttctatttccttctttctatcttagtccatttgggctgctgtaacaaaatgccataaattggaggctgagaagtccaagatcaaggcccaagctaattcactgtctgatgaaggcctgctttctggttcatacatggcaccttctagctgtgtcctcacatggtggaaaaggcaaggtagctctctgggattcctttttgtttgtttgtttgttttgttgtttttgtttgattttttgagacagagtctcactctgtcaccaggctggagtgcagtggcacaatctcggctcattgcaacctctgactccctggttcaaacgattctcctgcctcagcctcctgagtagctgggattacaggtacccatcaccatgtccagctactttttgtatttttagtagagacagggtttcaccatgttggccaggatggtctcgatctcttgacctcgtgatctgcccaccttggcctcccaaagtgctgggattacaggcatgagccaccgtgcctgtcctccggtattctttttataagggctctttttctttttatgtgggctctaccctcatgacctagcaccttctaaggccccacctcttaatatcatcacacagcagatttaatatatgaattttgaggggacacattctttccatagcactttccagtatggataccttttatttatttttcttccctaattgctttggttagaaatgtcttccctaattgctccactactatgttgaaaagaagtggcaaaagtgggtattcttgtcttgctcctctcttaggaagaaagtttaagtcttttgccattaaatatgacgttagctatggggttttcatatatgacatttatcatgttgaggaaattttcttcttgtttcaatgatgacagggtgttgagttttgtcagatgctttttctgcatcaatcaatatgaccatgtagtttctttgttttattccattattgtagtacattacattaatttttgcatgttgaactattcttgtgttcctgggataaatttcacttggttatggtgtataatccataaccataacctgaagatatgctgaagaggctaagtgccatggctcatgcctgtaattccaacactttgggaggctggtgtgggaggatcacctgaaatcaggagttttagaagagcctgggcaagtaaacaagatcccatctctacaaaaaattgaaaattaccgctgggcatggtggctcacgcctgtaatcccagcactttgggtggccgaggcaggcagatcacctgaggtcgggagttctagaccagcctgaccaacatagaaaaaccccgtctctactgaaaatacagaattagccaggcgtggtggcacatgcctgtaatcccagctactcaggaggctgaggcaggaaaatcacttgaacctgggagacggaggttgcagcgagccaagatcatgccattgcactccagcctgggcaacaagagcaaatctccgtctcaaaaaaaaaaaaaagaaaagaaagaaagaaagaaaagaaaagaaagaaaattagcttgatgtggtggttgtgcacctttagtcctagctactcaggaggctgaggcaggaggattgtttgagcccaggaggttgaggctgcagtgagccatgattgcaccactgcactccagcctgagcaacaaagtaagacctcatcactaaaaacaaattttttaatactgaagaattttatttgctggtattttgttgaggattttgcatctatattcacaagaaatattactctgtagtttttcttcttgtagtatctttgtctggtttcagtatcaaggcaatgctggcctcatgagatcaatcaggaagtgttacttcctcttttattttttggaagaatttgagagaattggtgttaattcttctttaaatggttggtagaattaccagtgtagacatctggtcctgggattttctttgttgggaggttttttagtactaattccatttccttacttgttattagtctaatgagattttctgtttcttcttgagctagttgtagtagctcatgtgtggaatttttctatttcatctaagttatccaagtttacctaagttaaagttccattttatctaacttgggtaagccaacaaacaatactaaattgttcatagtattctctcatagtcctttttttctctaaagtcagtaataacgttcactctttcattttttcattcctgattttaataatctgagttctttctctccccctccctgcaattgagagtcatttaaaagtgtcttgattaaattttatatatctgtgagttttccagttttccctctgttattctcttctagttttatttcatgtgatccaaaaagatactttatatgatttcaatttttttacatttactaagacttgttttgtgactaaaatatccttgagaatttccatgcacatttgagaaaaatgcacattctgctgttgttggacagagtgttctgtatatgtctgttaggtctaattggtttagagtattgttctagtcctctctttccttattgatcttctgtctagttgtttaatccattattcaaagtagtggccgggcacggtggctcacacctgtaatcccagcactttgggaggccgaggagggtggatcacaatgtcaggaggttgagaccagcctggccaacatggtgaaactccgtctctactgaaaatacaaaaaatttgctggacatggtggcacacgcctgtaatcccagctactcaggaggccaaggcaggagaatcacttgaacccaggaggcagaagttgcagtgagctgagatcgcaccattgcactgcagcctgggcaacagagcaagactctgtctcgagaaacaacaaaaacaaaaacaaaaaacaaagtagtgtactaaagtctccaactactattgtagaactctatttctcccttcaatgttgcaaaattttgtttcatgtattttggtgttctgttctttataatttttatatcttcttaatggatgaaaacttttatcaacatataatgttctttgtctcttgagacttttttttttaacttaaaatctatttgggctgataatacagccaccacaactctcatattggttgttattttcatagaatatcttcttccatccttctactttaaaattcttctatctttatatctaaagtgagcctcttgtagatagcatataggtggataatgttctctttattcactctgccaatatctgccttttaactggagtttaatctatttatatataaaataattactgattaggaaggacttacttctaccactcagctattttttttctgtgtgtcttatacatttttaagtttctcaattcctccattactggatttttttttttacttcttgattttgtgtctgtgttgttacattttgattattttctccttttgatagcggcaggaggcagccaaatgcctggcagatagaagcttgtcccccatgaaaccccaccttcaagccaaaaaatagcctgaaggctgaaagaccggactgctggtcccagatgaaacccatgatccagagtgagaacttccattcctgtttgcctgccctctaaataatcccttttaaccaatcgaatgttgccttttccaatactacctatggcctgcccctcccccattctgagcccataaaagccctggaatcagccacattgggggcactttgccaacttcaggtagggggaccacctctgtatcccttctctgctgaaagctgttttcatcactcaatgaaactctcaccttgctccctctttgattgtcagcgtatcctcatttttcttgggtgtggtacaagaactcgggaaccagtgcacaagccagacttggtctgggcagcacgggttagtgggccatctcccacagcaggtagcatggccaagtgaggcctgggcagggcatcaccaaggtccctggcttgcaaagtgaccaaggaaaaaatcctgtgtcactttccttttctcatattttttagttattttcctaatgattgccttgaggatggcaattaacatcttacacttataagaagctagtttgaataatagttccaatagtacatgaacactctactcctatatatctccatccttcttcctttatattgttattcccacaaattatgtttttatacattatatcctcactaacataaacttattattattttctgcatttgccttttaaatcatacaggaaaacaagaatcacaaagaaaaactacattaatatttgctgttatatttacctatatagtgacatttaacagtgtatttttatgtcttcagatgtctttgaattactacttagtgtcttttcattttagcctcaatgtttccctttagcatttcctatagggcaggcctgccggtaattaattccctttggttttctttatctgaaatgtctaatttcttttttattcttgaagaatagttttgctggctataagattcttagttaatagtttttttcccagcacttcaattattattaaagtgttattattattattattattattttgagatggagtctccctctgtcactcaggctggagtgcagtggcgcaatctctgctcactgcaacctccgcctcccaggttcaagcaattctcctgcctcagcctcccgagttagctgggattacaggtgcccgccaccatgcccagctaatttttgtatttttagtagagacggggtttcaccatgttggtcaggctgatcttgaactcctgacctcaagtgatacacccaccttggcctcccaaagtgctgggattagaggcatgagccaccatgcctggtctaaagtgtaattattattacagctgccatttggcctccttggtttctaatgagaaatcatctgttaaacttattgcaaatccttggtatgtatgctatgtgtcatttctctcttgctgcttccaagattctctctctgtctttgtcttttgacaatttgactataatgtgtttcagtgtgaatttcttagagtttatcccacttggatttcattgagcttcttggatgtgtacgtttgtctttcaccaaatctgggaaattatttcaccatttctcaaatatctttttcttcccctttccatctctcttcttctggagctcccgtatacttagttggcatgactgatggtatcctactggtccctcaggttctgttcatttttcttctttctttttttctgctctgcagactggataacttcaatcgccttttcttcaagttcaatgattatttcttctgcctgctcaaattggccatttaacccctccagtgactttttcatttcagtattgtacttttcagatccagaatttctatttggttcctctttaataaattctttttattgtcattccccatctgttcatacattgctctcccaatttcctgtagttctttgtccatggttttctttagttaattaagcatatttaagacagttgacttaatgtctttgactagtaattccaatgtctaaaattccttatggatagcttcttttaaattatttttgtcctgttagagagtcatatcttcctctttatttgctttgtaatactttgttgaaaacttaacattttgagtagtaaaatgtggtaattctgaagccagattctccccctcctttgagattggttttgttgtttgttgagggctgcagttgtccatttgtatagtgacttttccaaacgatttttgcaaagtatgtattctctcttgtgtctggtcactgacgtttctgttctggtgcctctgcagtcagcctatgacctggaagagcattccttaaatgcatagatttttttaaaacccaagaaacaaaaaacctagcatgtatgtacctttttaaaaatcttctgatagatgccacctggaaggctgctgctgcctgaaggggcagaaacaaaggcaagctctactctgagccctcagggaaccaccagataaacaaaagaaatttgattctccaaatttctggaagacaaggtcctttctgcccactcctgctccagccagctgctctaggaacacaattactgtccacatggccacaggaatgttgaagaatgcaggatggtagctggtttgcccacaccactcacttatgagccatcagcatgcctctcccttcatcgagcactcccatggttgctgtaagtgtccaatcaggttccagaattctgaaagagttgactcttacaggatttttttcttttctaacttgctggttgtttagatagaggaaccaattcctgaagtttcctacgttgccagcttcatgaggatcattccctagtaactcttttcagacaaaaagcttcattgatttactgtaggactagcatcaaagagtctatgccacctagtctgtctccttaaaacacagaaataatcagtatgcattggggtaggagtttggcattagatctgccgtaaatcaagagctggggacagcccatgtcttaaactctgacccaagggctaaaatatcctttggtagcaacaacagctacaaactattgaacaacttgtatgtgccaagagccttacctgcattatcccattgaatcctctcaacagccctgtgaggtagtagaattgttgcctgccccttactgaggcctagaaacattaaggaatttgcccgaggccctagagccagtgagtggcaaagccagtctccagactcaggctggagatcctacagttctgtgttaccccagtgttatcctgcctctcagcacagagtcttggatgattctcctaacccctccctaggcaatgcacagggctgctccctgcacccttactcatgctctgctcttcaaccccaacagtgctggccttaggctttatccctgacacccagccccaggctccattccatctgttgacagaggcaaacactggggcaaaactgacctctgtggataccactgtgtccacctccaccagcttcagctgaagcctctgaacatctccagcatggaagaagccccaaaggatatttcctgtcccccagcatatgcttgaccctgaagccctccccatctagtcaagaagaccaaactgttaacaatcctggagtcagagtgacccatgggtgaatcttagccaagtcactcatagctgttgcatcctagtaaatcccttaactcccataggcttcagtttccctgcatataaaatgacagccttcagctcatcggccagtttcaatccatctaaagggtctagcacatcccctggcatgtggaagccacagggcacacactagttgtggtcatttgatcctggcatgctctgctgtctctcggctctccccttgcctctttccctgatgtcctggccatcagccactgcctaacaccctcccactcaccaggcccttagcctgccccttagcacaagagcacagccggtctcaagtctaccctgctgtaagcaaacacttgcaacatcatgctgacctccaggccctgttgcatcagcgtgcccacacttggtgcccagctggtactgagggtatcagggaacaggccagtggtggaagggcggacactttgggttccctggtttcctggctcccaatatctttcccaatggcatatggggtctagcagcttggctcatttaactgtgaacctctaccctttagaatctgggcctccaggcttgcttctgtgcaaaatggcagataaggctcaacctttctttttttaacttcattgttaaatattactccattaatacccatttactgcagaaaaggtaggaaatacagataagcaaaaaggaaaataaattaaaatcctcataccaccatcatcaagataattactgtcaccattttggtatatttcctcccaatacatatattatctatatcgtatatacgacaaaaatggatcatactatgtttcctgttcttcccctgtgttagtcatctattgctgtataacaaactgcctcaaaacttagtggcttcacctttccgtgtattatgatgacaagaatgtggtatgacactgtcttatatctggatcatatgctaaaagatagaaaatggtttctaaacttatttgttctgtaataacaaaattttatttcataaagtgtttttaaaaaaaaccatagtagcttgaaacaacaaacctttgttatctcacacagtttctgtaggtcaagaattcagaagcagcttagctgggtggtctggcttggtgtctctcctgaggtcagggttttggctggggctgcatcacctgaaggcttgactggggccagaggagctgcttccaaagtggtccactcacatggctggcaagttggagttgcgtattggcaagagacttcgcttcttctcaatggatcttcccagagttcttgtaggcaacctcatagcatagcagttggcttcccccagagggaacagtccaggagagaacaaggcagaaaccacagggtcttttctggcttaggctccaaagtcatactccaccatttctgcattatcatattagttacacaggctagacctattctgcatggaagagactataccatggggtgaataccagaagcagggctaattgaaggccagcttcaagggcggctacacattccctttcaacagtatgtcatgaacatctttccatgccaatagagcagatgaatcttaccatttttaatgactacatgtaagtgtagcataatttatttaaccaacctcctgtagttgggtatgtgggttgtgtctcgttttttgatagtagaattaatcatcttgaatatccatcaccaaacttgtcatattattttcttttgatgaatgaaaaagaaaatcaagtcatgtctgtcaatcagaaccctgagcaactaagaaatgggggtaccactgggacatagagcaaggtcccttctgattctgctcttgtctttctctccccatgaaatggggagttcactatctactgagacatcctagcccacagctgcacagttctgtctttttagaaagctctaagcagaaacaatgttcatccatcctcctcgggacagcccttgagctactgaagactctaagcatgtcctggtcatcctccatgagccatcatctctgaggccctccccttcttggcccctcttctctggacaggttctggacagtcttgcccttccaaaattcctggaaagcaggaactgttcctgctacaatgactctcaactccagtgcagtacagactgttggtgtcaccccttatcctgaagaagaggcactgagacaggacaagggtgggtgcccaggagggctggcatgagtcatgagaatctggtcccggagaattagacggtgtggggaagtaggggtgttgggccgctttctggcctcatggatgccaatgaatatcagcaggtggctcccagaaaggaactctaggggatgcctgttgctctaaatagaggctagagagggcactggcagttcagtcaaccaagaaagggggcccacttgcctcagcttcaggctttgtacacatcctcagcctttcttgagaactgaatttagattctcctcccctgtgctgtgtgcttggcccagaagaagggcaagtctcgctgggtggctgcttcttggcctggctgaaccagaaggccccagtgccactccaaacctgggtgtgagccctgcccccatgagcaaacagtagctcagagctgggggctgtgggggtcagtggcctgtcacatgagatctgatgaggccatctctgctctatattgggaaagggatcaattgtatcaagggctttcttgggagtgatcactctggccattggcgagagacctggcattctgacaaggcaccctccataccctgacccacttgccagctccagctaattttagcaggctttggcaggtgccagcaagtacatagcatgtggatgtcactcccaggtgagcccaaggagaggcctgggccagagcctggaagtcatggtctatgcccatggaggcacccaaagcaagcctgaggcctggactttgcagtcacaaaattaagaatgatacccctgttttttgtttgtttttgatcagttggccaccttcctccaccaccccttccccaagttccatacagacccctggattgtatgaaatgcaaatcgaacctctctgcagatgaaaatccactggggatccccttgcctccaagagcaagtccagacctgcaccagcgcgggccaggcccccttaggaccccctccctgtccaagggcatttcagtaagtgttctgtggccaaggcagcctggtgactttctgcccgcacaaggctgaggaatggaagatgggtaggctggctctgcacaccccctcctgctgggcagcaatccctaccccatgttcacagagtgtggccggctgccccatggctctgtccccgtggccctgtcaactgttacccacatggcctaccctccctttctgccctgcctctgaccccatggcagggggcagagtatttgagcagccgccaggctgagccctttcagtgcagaagccctgggctgccagcctcaggcagctctccatccaagcagccgttgctgccacaggcgggccttacgctccaaggctacagcatgtgctaggcctcagcaggcaggagcatctctgcctcccaaagcatctacctcttagcccctcggagagatggcgatggatgtcacaaggagccaggcccagacagccttgactctggtaagggtcacaccaaagttagggactttgcactgggagagcagcacccagggcagggcccttggttttgcagattaccaaaactaaggctgggggcagggaaggcgagcaggcttggggcaccttggaaggaggcacatgggccttgggggtcctggctagggcagctgtgcctgccactggccctctgcccaccacccctcctcactgtggctatccagtgtccagcctctcgaggggttctagggtacttattcctggagctaacggtgacccaggacaccagtgtccggggcctggcctggggcttttatggggggagctggctggctgcccagggctgtctggctctctgggggctctgcatggcatttccaggggttggtggatcagggattctgtccctcaggagaatgtgggcactagcccaaggccactcacttctgtgtacatagccacctgagggcccaggaatggagggggccaggctacagctggacatctggcactcggatgggctctggagcccccaggcctgcagcatctgcccagggactgccctggcccttggccatttcctcagggacccacagctccaccagccggcccctcccagtgctggaatagacagttcctcagtccacatctgccaaaggcggcactagaaggcatcctgccttttttactgcgttctggaggtggggtcacaaagcactgctcactgcataaaagggacagcatcctgcccctggcagccctgcctgaccagctccgcctctcccactgctatccaacctgtacaccctggtgaccatgtccaggccagtggccttaaggactgtctctgtactgatggctccacatctacctctccagccagactctcctctgaactcgggcctcacatggccaactgctacttggaacaaatcgccccttggctggcagatgtgttaacatgcccagaccaagatcccaactcccacaacccaactcccaggtcagatggaacctcttcttcccaggcccttctgttcctctcctcagcccctcccacctcccttcagaataagtctagactcttatcgctttcaccaagcctgcgcccagcatccctgcacagggattgttaggacagcctgacgccctgcttccaccctgccccaagatgcccctgctctgcagcccggcgcctccaggcttctcacctcctgctgctcacagctcagcctcactccctccctccccgcctctgctccagcctcagtgcaggtcccctgctcccatcttctggcagcagctgcccgacctggtccctcttcatctgtccccattccttcaccccccagcctgtccccaacttgactgaggttctttcctgcagatccccgcccttgagaggggttggtcccactgtcaactctgcttctgtgccctgtgccgcacctggcattcagtgagcatctgctgaagagatgagggtcagatgccctgcagggagtgtgggggcgtcctcaggcaagaaaagttgtacgtttggctgtgggccctgattatgtgtcctgtgacctcttgggtgaggtcagcaagagaaacctctgcaagctggctggggctgcctcccagaggctgccagggggagggacaggctctgtctgtgctcttcttccgaggctacacctggggcgccaggctctcagggctccccaggtaccaccacatttcctacactgcttgggaaagccctgtaagtttgcacagacacccagcatgaggctcgccagagagatacttgtagctggggtctgggcaccaggaacagcttggtgctgggcctgaagtcgggcaggatgcagcctggccaggtgagaggaaagcttggagccagtgcctgggttcaaactcctctgtggcctatggttctgtgggcttggggaagggtttgtacctctgtgtccagtttcctcacttataaaaaaaggagataataaaagtacccatgtcccagggtggctgtagcaataatagggaggggtgcccagagcaggtctggcacacaggaagtgtgcatcagcctcagtccctgccattgggcttgtcctgggagtctgtgaagccaacctctgctccacaatgtgacccccaggcttgtgagaccaagctgggtcagagcttcctcctctggggttgcaccaggaggggaacttctgcaggcccagatgcaccctgaggaaagggcttgttcccaccaagaacaaggctcacctttggaggatgctccccacatgagaggtgaacccccaggtctactggtgactgcagcctcggaagctgacagcatctatcctccaacccatgcccactgggaagtgtgtgaggggtcctcataggccctgcggtgtggacaatgcagagaccctgtagcatctggctagggcggggcccagataagagccctgtgccaggagagcctggccggttctgccactgtggggagacaggctcccccaccccatgtcccctgcttccctgcagcccacagagaatacagacctacttttacagaaatccagatttttgtgtaaaagtgtctctattttaagtagattttaagtggtggcagcaaatttaagcttttgagaatattatacagaacaaatcagattcacaggccagatgcaactttatttacagaaatgggatcaggtcctacctcaggtcccatctcacgttttcacttatgcctatacgtctccttcacgggaaaggccacaagaggccctgcggtaagtgtcccggtgttgatttaaagtccccaacagtgaatatgagggtcctcactgttgcagcaagaggatacccccctgtgtatcttggaaatgcctgcagccctcttgctgcagaacagattcttaggagagaaactgtcagatcaaagttaaacttagagaaactccaaattgccctctgaacagacggtatcagtttgacatcatccaataccgggattcctcggggagaactttctggcctagaaggcagtagagccaggacttcacccagtcagtggcagggccacacgtgggccttgatacagagggggaagacttgagcctcctcgacaccctacagggcccagcctcccaacatgtgataagagaaacaacagccaacttgtacctagctctccttattctccaagggctgggccagttctccccacagccctgcaagggaggatcactcaagggccccaactgtctgacaatacagccacactctgatcagccacctgggcataggctccatgccattgtcctccgccaagacctcagactgaaatgttggctcctcccatgaagaacctggggccaaaggaccagagtccaggtccgtggctgccaggatgggccacttggagagaggcacaagggtggtgccaggcaggtgtgagggctggacctttgcaagagcagcatcacttttgttgagagcccacaggtatcttataattgggtcctaggacttcctgccagtagccattgtgtgcatggatttgggtgctggcctcaccatggtgtgctggctgcccatgcctgcaataatgacttctgtaagcctttcttcatctgcaagatgggtgctgctggcacctcctccccggtgctgtggtgacagggcatagtgtgtgaggctgctatgtgaagcacctaatgcagggcctggcatatggaggaattcagcaaatgacagatgccttcacagttagttcctggcatcctctacattggtgggtgtaggaaagaaagacagaggaggcaaaagttgtagctgtggggcattgaggacagcctggattgttccacagagccctgaggacatctccaggggtgtgctctgcaggggcagctggattggagggttaggggtcggggagggcgtgcactcccacccatgctcacagcctcggaacagtgcctgctcagccaacatgggtgtttgattctgtgtcttttgtcacagactttatcagccccatccctttctgaccttgcctcagtttaaattttacatgtggggcctcattaagagacatggttcttaactaaagatctgtatccattaggaatgctttgggctgcaggaagacaaacacctgactcactgtggcataagtggtttgcgtctgctcccataagctgcacgtggagggtggatctggcattactctctcttccctacatttgcagtatgctaacagctttaacctccagccttgtttcttcatggttgcagggtggctatcacagcgctggccatcacatccttacacagctgtgtttacaaatttagggggacattgaagctcctcccctgctaaaatcaggcttcccttcacctgtcattggccagaactgggtgaaatgcccaactctagaccgatcatcagtaagaggagtatagaattgctgtgcccaccttagattaatcatggcgcaatgtgctccccataccaacaaaatctgagttctagaaactgaggaagaagaggaaaatggccgtcttgcctcctggctgggattcagagcatctccaaccctctgagcttatgtgtaagactgtgggcaaaagtgtgtgagtttttgtggaatggatccacggcttttatcagagcatctttcctttttctttttgattcaagatgaaaatattcttatgattatttttctcaccactgcccagagataaccagcacattaacatggccttttctccatgaatagcactagggtgcccagtggacagacacatagctgtccacacaccagcttgctggggatgcataggcagagtcacatctgcactcacggcctgtcctcacactgccatgtggagagccagcagccacaccatgggccgtccatgctcacgggagtggcagtatcagatctgagcttcgtgtgcccaggcgtctctcacatcagtgcatagggaccctctttgttctgtggcccagtgtgcccatgccacagatggcttcagtcagcagacacctccttctagacactcacactcactcctggctggcccttagcacacctgtgcagacaggcccatttattttcttgtgtaaatcccaagtaggaggactgggtctctctgacagcaatgccagctgcctggcaccctccagacaggtggctcaagccccacctcgccagctctcccagttagcccctcctttccctggctctgacctgagggacgaagcagggtgctacaggacgctgtgccacagggatatcgtcagggacagaagctactctgccctctgctgctcacccctccaacacgctgtgggctgcatttgttgagtggctggtaccagactctgctcttctgactttccagctggttttacctgtagtaaagtttgagaagatgggtcatcctgaccccggggtcagaagacagaaggaggcccatggcgtgtgggggagatgccccgtgaggccctcggtgtgcagatgcctggtgacagccccaccctgaggtccccagcctaccccctccccagcccgactgctcccatccccctccctgtgcaggtagagcagatcctggcagagttccagctgcaggaggaggacctgaagaaggtgatgagacggatgcagaaggagatggaccgcggcctgaggctggagacccatgaagaggccagtgtgaagatgctgcccacctacgtgcgctccaccccagaaggctcaggtaccacatggtaaccggctcctcatccagaagcagctgtgggctcagccctagctgggagaagcaccccaggcactcccagactcacagccagcccgagacagaatctcctggggagcaatgaagtcctcgacttgggccagttctcacccttggctcctctggtccggccctggggcactcgggctcaccctggagctggcaaacctcaggaaaactggcgttttaaatctcactcctggccaggtgcagtggctcacccctgtaacttcaacactttgggaggccaaagcaggcggatctcttgaggccaggagtttgagaccagcctgcccaacatggtgaaaccccgtctctactaaaaatacaaaaattatccaggcatggtggcacattcctgtagttccagctactcgggaggctgaggcataagaattgcttgaacccgggaggccgaggttgcagtgagccaaaatcgcgccactgcactccagcctggggtgacagggtgagacaccatctcaaaaaaaaaaaaaaaaaaagacctcactgctccccatgggcacttagggaactctcccagcccagttctgcagctgggccattgcactagatcctcagttggtccctgggctctcggtgactgtccagggcaggagtttcccattgacttttccctggttgacctttgaccccttccacagttgacactggtgtccccaggtgtctggtggccccttgtccagctcccttagtcccttgtgccttccctcctcctctttgtaatatccgggctcagtcacctggggcccacccagcccaaggccagcctgtgggtgtccctgaggctgacacacttctctctgtgcctttagaagtcggggacttcctctccctggacctgggtggcactaacttcagggtgatgctggtgaaggtgggagaaggtgaggaggggcagtggagcgtgaagaccaaacaccagatgtactccatccccgaggacgccatgaccggcactgctgagatggtgagcagcgcaggggccggggcagggggccaaggccatgcaggatctcagggcccagctagtcctgacgggaggtgccacctgtctaccaggggtggggagagcgggggctggaggaccacccagcctcagaggcagctggaggcctgggtgaacaggactggccaacatgtccccaagtcccacagtcaccatctggccagcattgagaggggaacgggctgaggaagagttagtggcaagaggaaccccagccagtcacaccttgtccagtttaccagaggaaaaaccaatgtgtaagaacagaaatgtgacccggcagccagtgcactgcccccctctccaaaggccacccctcaccctccaccagcatgcacagaaagtggggtgacagcaatcacaatgtctacccaggcagcaaggacccctgaccatggggaggactggggtgcagggaacatagaagcagaatgaggcctagggggagttgggcaaggccagagccctagctgcagccaagcacatggccaaggccagctcctggaagggcagggctccgaggcaggaggcaggaggctgcccgtggctacccgtcctcacacccctgcagcttgctagtctgtctgtgggctgggtgtgaatcaaggcagtgggatggtgtggggacctccctggccccagcagccagtgaggagcctggtcagtcagcagagcattcagcagtatccagttccatggagaggcccgtgtgaggggagtcggggctggtcttcagtaaggatgggtggccagggcccctagaagtagaaaaggagactccgggtgctggagacagaaatcaaggatgtgcctccatgtggagcctcaggaatagctggccaggcctgaggctgaacctcacaaggttcagctgggagggctaggctgacagagcacagccgggccagggaccagcctgccctgtgttgccttgtcccgagggccactgtcagcaggtctctggcatgggggaggcttagggcctgagcccaacaagcagcagcggaagaggagagggaaactgtggacaggcctggcattcagtggccaggtgttgcagtgtccctgaggaatagcttggcttgaggccgtggggagggctgccggccagcgcacccccccatgccagatggtcaccatggcgtgcatcttccagctcttcgactacatctctgagtgcatctccgacttcctggacaagcatcagatgaaacacaagaagctgcccctgggcttcaccttctcctttcctgtgaggcacgaagacatcgataaggtgggccgggtggaggggcagaaggcagatgaggggaggcacaggcaccccagaggaactctgccttcaaatgtagcccccataccatgtgctcagaagggagatctggattcaaattgtggccatgtcacctgccacctctaatgctgtggaaaagaagcatcacattagctaattctggctgtgcgccttgtgaggcaccagctatgatcaccccactccagtggaaagagcagctggcagtagggtggggctcaaactcaggcagccgggctctgggtcacctgcaggccacggtcatgtcacactgcctctagctgagtcagaaatgtgaaggaactgagattctacccttcctgcaagctagcaaagtggcctgccagttacatctgtgcatgcacacacacacacagttatatatgcacacacataaaacacgagacctttgggtcagggagaaagccagatcctcactcacggcagaagcagcagccaaagcaacatctcatgtggttttccaagccccagtccctacagagacagagagggccaggtggcacctgtgcatgcagcggggtaccttgcaggagggaaatcctgattttacacaaagctgctccccccacgccctgccttgactctgggatgacgtctcagagctgtgcagtacaacattcttaaattggctgggactcagccctgcagaaatatgatatcttcaaggagaatcgttcccaaaacctctcaaagctatggggctgctctgagcctgtttcctcagctgtaaagtagggtgcatacttttatggccctgtgcaggaggtagtgacaggccctagcaccctgcctccagtatatgttagcagccacgaggcctatctctccccacagggcatccttctcaactggaccaagggcttcaaggcctcaggagcagaagggaacaatgtcgtggggcttctgcgagacgctatcaaacggagaggggtgagggggcacctgtacctgccgggggggctgccctgggccacccaccccagcactgcctgcctttctccttggcttccagcactgcagcttctgtgcttcttggcaggactttgaaatggatgtggtggcaatggtgaatgacacggtggccacgatgatctcctgctactacgaagaccatcagtgcgaggtcggcatgatcgtgggtaagggctccttgcacccctgccccttccagactgctgaggctccctgtgtacaacaggcttcaagggccctgtggggtgaggaccaaactacttaacaaccggtgatgtcagagcagagcctggtgctacagcctgggtggtcttggggtatcaagatggaagcaccgtgtacagtaggaagcatttcaacgccatgatgccacattcctgcatcagatggtatgccagctgcatatccacctcacccatcaggattataattaaaacacttatctggtaaattgaccaactggacagattggtccaagtggaagaggataagcaaaagtggtaccatctccacccgaatggtctttccacgggcctgcccctgcccctgcccccacccaaagtgaaggcaggtaccaggaaagggagcagcagtccgcccctcccagcagaggggtcttccacaccaactcggacctttctcagaagttccggaggtcattataaccagccttcactgaggagcaatccaatcagatcagttatctgctgtgcgcacagccgtgtggttctatacttctcttacttccattttcacctttcagaaggaacgttgtctttaaatccagcatctaaacgtgagccccagccatccctggctgtgatccccccagccctttccaccctatcctctggaactgcctggggctccccaagacacttccacatgaattcccaccaagccaagctgcagctgctgggcccaggcataacccctcctggggcagaggtggcaaggagtgacccaccactcacatctgccccacatccactcttgactctgctcagtgtttaaaaacatgtttataacaattaccaagatctgaaaattaggagaattcacatcaaagtctggatttctgtttgttcataaaaaactagaaggcagccaggcaaggtggctcacgccagtaatcccaacactttgggaggctaaggcaggcgggtcacttgaggtcaggatttgaagactagctggccaacaaggtgtaacctcgtctctactaaaaatacaaaaattagctgggtgtgatggcgcatgcctgtaatcccaggtactcaggagactgaggcaggagaattgcttaaaccctggaggcagaggttgcagtgagccaagatcacgccactgcactccagcctgggtgatggagtgagtgagactctgtctccaaataaataaataaataaataaaaactggaagtctaagcatcactgagccctgattcctatgtggcagctcgactgaccagcatttgagttgctgtccctgacagctttgggggtgtgcagcccacacagtcatgctagcttgaggctctgctgtcagcagtttgaaactcttaataacttgtgaacaaaagactccatgttgtcactctgcacaggggccagcaaattacaaaattccatatccggaattgtctacaggagcctctgggctgctcccaagggcccacaccatgccttactcactttgggttgccatccaaacatgtctcatgacaaagaagctcaaacatgtgcatggacagtgccagaaaacaagggtcgtacatagacaaaataaaatgataacgtcccacaaccatttctttgatacacactgtttctctcagtcctcccaaccacctaggtaacaggcagggaaggtgttactgttgcctgttaggaaagaggacagccctgaaagctgtccctggccactgaagcaacccaggtcttccagccccagggagagccgcctttccattgttccagacaaagcagagacaggcatgggggagcgggagagggactcctgtgggcaggaaccaggccctactccggggcagtgcagctctcgctgacagtccccccgacctccaccccaggcacgggctgcaatgcctgctacatggaggagatgcagaatgtggagctggtggagggggacgagggccgcatgtgcgtcaataccgagtggggcgccttcggggactccggcgagctggacgagttcctgctggagtatgaccgcctggtggacgagagctctgcaaaccccggtcagcagctgtaaggatgcccccctcccccacaacccaggccctgggccgctctggtgcagcggcagatgggagccgggccattgcagataatgggcttgtttttaaacaactctggggaaaagcaaactgacaatccgttcgtaagctccatcccttctgctcagtcatgacctgcccctgtgagagatgaagggttagtcccagttgtgatgtgataagcccagacctctttccttccgacaggtgatcgtgcatgcagaggaggctctgagacgcccccagcaaggttcctgggtttaacccaacattccccaaagtatgtatttggccacattcacagaaagaatattagtcttttgtggaatgctgcgggttgacagtcacagcttggaaaccaacccacagagagctcatcattaatcatggctatcacttgtttaccacctactgtgccaggcctatgctaattactttattagcgtcctctctgccgctcgcaggcctctattattataggtcagtagtattcgatttatttaaattaaatacggaaggtcatagattaagcaagaaagtgccagcaacatggtgcgtgcctctgactgggcactaaccctccaagtcttagttttcccaaccataactggccaatgaacagcagctctggatgcagctaaaggaagactgaagctgtaggtcccgtgctcggcgcagggccccctgcaaggaaggtttcggagggactggatggggtctttgaactatctgtctttccctttactgcagtgggcccaggggcaggccaaagttgctcccgtgattgacttgaacgtgcacgttcctaatccctgacatttctaaagctctggctcattaacgagggaaagacgtgaaccagctgggggagtggggatcgcagtgccccacgtggccgcctcgtgacctcagtggggagcagtggggccggctcccggcttccacctgcatgaggggccctccctcgtgcctgctgatgtaatggacctgccctatgtccaggtatgagaagctcataggtggcaagtacatgggcgagctggtgcggcttgtgctgctcaggctcgtggacgaaaacctgctcttccacggggaggcctccgagcagctgcgcacacgcggagccttcgagacgcgcttcgtgtcgcaggtggagaggtgtgcggaggaggagggtgggtgcaaagggcaggggctggggacgcccgggcactgcagacttggtctcagggcgacgctgagtcccaggcccggggcgcagggatgggaaactagggcctggggcgggattccgggcgtgggcggggcccggggcggggcacagggggcgggggagtgggcggggcccgaggccgggcgctggaggcgagggcggggcagggacgggtccaagggcaggaggctgggacaggacggggatgcaaagggaggggcggggcccgagacggggaggagggggagggcccaaggggaggaggcggggtccggacggggatgccaagagcagggatgggagcgagcctgcgtccgggcactggtccccatccgtgagtcccctcggtgctccctgcccgccgtggccatcctctcacatcactcacaaccccaaggcgcggcatggttgacacccccacgttaggacggagaccctgggcttagttagagggggcagtactaaccagtccctggcggaaacgctttggctgggtgaggtgagcgggatcgcccccatttctccagagaggggtcccggctcagcgagggaaagaggccgccgctggggggacggctggccggggcccctccctggagaacgagaggccgccgctggagggggatggactgtcggagcgacactcagcgaccgccctacctcctcccgccccgcagcgacacgggcgaccgcaagcagatctacaacatcctgagcacgctggggctgcgaccctcgaccaccgactgcgacatcgtgcgccgcgcctgcgagagcgtgtctacgcgcgctgcgcacatgtgctcggcggggctggcgggcgtcatcaaccgcatgcgcgagagccgcagcgaggacgtaatgcgcatcactgtgggcgtggatggctccgtgtacaagctgcaccccaggtgagcccgccccgctctctccctggtaaagtggggcccaaaaagcgcgcgctccaaggttccttgcggttcccaagctccaagatttcgtagtcctcttctcgtcccccttggcctagatttgggggaagggtcgactgcgtgcagggcgcccggtaatgaatgtggaggatgaggtgggaggagggacggcagccctgcttctcttctgcccagcttcaaggagcggttccatgccagcgtgcgcaggctgacgcccagctgcgagatcaccttcatcgagtcggaggagggcagtggccggggcgcggccctggtctcggcggtggcctgtaagaaggcctgtatgctgggccagtgagagcagtggccgcaagcgcagggaggatgccacagccccacagcacccaggctccatggggaagtgctccccacacgtgctcgcagcctggcggggcaggaggcctggccttgtcaggacccaggccgcctgccataccgctggggaacagagcgggcctcttccctcagtttttcggtgggacagccccagggccctaacgggggtgcggcaggagcaggaacagagactctggaagccccccacctttctcgctggaatcaatttcccagaagggagttgctcactcaggactttgatgcatttccacactgtcagagctgttggcctcgcctgggcccaggctctgggaaggggtgccctctggatcctgctgtggcctcacttccctgggaactcatcctgtgtggggaggcagctccaacagcttgaccagacctagacctgggccaaaagggcagccaggggctgctcatcacccagtcctggccattttcttgcctgaggctcaagaggcccagggagcaatgggagggggctccatggaggaggtgtcccaagctttgaatacccccagagaccttttctctcccataccatcactgagtggcttgtgattctgggatggaccctcgcagcaggtgcaagagacagagcccccaagcctctgccccaaggggcccacaaaggggagaagggccagccctacatcttcagctcccatagcgctggctcaggaagaaaccccaagcagcattcagcacaccccaagggacaaccccatcatatgacatgccaccctctccatgcccaacctaagattgtgtgggttttttaattaaaaatgttaaaagttttaaacatggcctgtccactgttctttgacttctgtgcattaggactgtggggacaatctataaagagtctgcgtcacatgcatgaagacacttcagtatctcggcaatgccctccagacagctcctccagccatctgtgccaaggggagtgtgaggagtgacagaccaggctgtaggaacaggaatggggtgtcatgggggatggcagagcagtggacagtacactgcctggcccgggcccctgcttgcctgcccatggaatgtgtgcagagggagtgccaggccaggtgctgctctggagaagtgggggaatgaggctggtcctgctgcaggtcagtctcagcaccgtcctgtccagtcagagtcacttaggtttgccagtgagtaggggcccagatacatgttggatttctaaggtccctccagatgctcctgtcagtggaacgcctatttagagttagccaagcgtaggcataatgccatctttctgcagcataaaatacagtgacatagaaacatatttgtgtgattttcatgcattccttttttgatgagagatattacccagctaattaggaacaactgttttgtttccttcagatcataacccaaagttgtgattttgaaaagtcatgtcccccttcagatttcttgttttctgctacttctcatgtggaattgctttggctcttcttagttctcttgagtctaaattattccttataagttggtgcaagcatctgattattttgttatcattactgttatgctcaagcattcacagagtggaacacattttaatatcaattgctttctatttctcctttatattacagttcaggacattgtattaattattaaaattctattcgtaggtaggttatatgactgaattgaaatagataaaatgaatttcttttctagataacaaaggaggtgtcataaaacacttgttatgggccagtgtgatggctcatgcctataatctcagtgctttgagaggctgaggtggaggattgcttgaggccaggaatttgagaccagcctggggcaacatagcaagaccccatctcttaaaaaaaaaagggtggggcgggggggcactgctgggcgcggtggctcatgcctgtaatcccagcactttgggaagccaaagcaggtggatcaaaaggtcaggagttcgagatcagcctggccaacatggtgaaaccccaactctactaaaaatacaaaaattagccgggcatgatggcgggtgcttataatcccagctactcaggaggctgaggcagaagaattgcttgaacccaggaggcggaggttgcagtgagcagagattgcaccactgcactccagcctgggcaacagagcgaaactctgtctcaaaaatgaattaattaattaaaaaaagaaaaaaaaaacactgggcagggtggtgtgcacctgtagtcccaactactccagaggctgaggcaggaaggagcacttgagcccaggaggttgtctgcagtgagctctactcatgccactgcactccagcctgggtgacagagctcagtggcttacacctgtaatcctagcactttgggaggctgaagcaggcagatcacctaagatcaggagttcgagaccggctggccaacatgataaaaccccgtctttactaaaaataaaataaaataaaaaatatatataaaaattagctgggtgtggtggcacatgcctataatcccagctgcttgggaggctgaggaacaagaatggcttgaacccgggaggcagaggtggcagtgagctgagatcgcgccactgcactccagcctgtgcgagagtgagactctgtctcaaaaaaaaaaaagggaatttaagaaatttaaaagaaaactcttgttatataaaaagggtattgggtctgacagataagagctcctgcactctaccagccagctactgacagacataggtctggctccagtggaggggcagcagccagtgagcccagcctggggtggcccactcctgctgcctccaggatgtcccctgtttccccagcccctctgctgtgccctcggccccagaagctggcgagactgcttctctggaacagcatcacgcaggcctgcccatcggcccactgtgcaccaggccttctggggatacagatgtcaaccaggtggggtgctcaggaggggcacagaagccaggaatgacaaacacatcagccaccaggcaaatgggaaatgtgccccagaagctccctgctgaggatgttagggagagcattctgaagtagtgtggttgagatgaggcttgaggaaggcaaggctccaaacagcagggcagactgggagcaaggtagactgcatgggagggcagctgatggagctccttaaccctctggaattgccccaaagccaagcaaagtgttcttcttggggtcacagctagctcagggatgccttctgccccttggtcagaggggcaaaaggtcagagcctagggtcaccaaaacctctgggaagccccgggggtctcaggccacagaccatcctcagaactacacactgccctcccatgcctggcgggggccctggactggccctcaccagctgtcttcttgcactggccagggttctggctggactggcaaggaggggtggtcagatacaggagtaactggatcccttcatcaggacctagggtggtgagagctttgagcctgctctgctccaggcagacattgtgtctggccctgccaggatggatagacagcaggatgttacacgttgaggacatgaaggtcatcaggaatgtggctggaatctgttaggcctcccccagcccaggcgggggctgccaagtttgggcctatcctctgttcctctccttatttggaccttcaggtgataaggctgagacataaaggaggctgggccctgccaccacgacagcagccacacctctgcagagagaatggtgagtgcctgctggggaagaaaggctagcggtctcccaggtgctggcctttgggctgggggagcagagttttctgtgcttgtgttgggttgagggtggtccccagggagaggaagaggatcctggccctggctctcctgggaatgctctgggactgtgcatgatgggtggggtggggagactctgaggagttggggagaggacccctccctactcacagtgttgcaggccagcaggaaggcggggacccggggcaaggtggcagccaccaagcaggcccaacgtggttcttccaacgtcttttccatgtttgaacaagcccagatacaggagttcaaagaagtgagtgcccactcccagtagcctcagatcccatcctggcccccccaccccaccccacatacataccccccttctaccctgaccttgcctctcacaccacccaggtctctcccccacctcccaccttccctagagctgggggctgctcccacctgaaggcccccatcccacaggccttcagctgtatcgaccagaatcgtgatggcatcatctgcaaggcagacctgagggagacctactcccagctgggtgcgtgcacccacctcccaccctgcgcactggggtccctactctgagctgctgggcgggtgggagtggctggggggacaggactctgctcccctgcttcccctcctccccgtctcctcacactgcccttccccccttgtcacgccttgcttccacttcaccttcccgacccacagctgcctctgcccctccagcccctgtggccaggatggagggagggcggcctgggccttctgggggacacccagggtccctgtgtgcacctcatgccccacccccaccagggaaggtgagtgtcccagaggaggagctggacgccatgctgcaagagggcaagggccccatcaacttcaccgtcttcctcacgctctttggggagaagctcaatggtgagcctgggacagagctgggcacccttggccaggcagggagcctgcaccctgcctgaaccccacctgaaccctgcctgaaccccacctgaaccttacatgaaccccacctgaaccctaactgaaccccacctggacccacctggactcttcctggccatgacccattccaagcacatcctctgccccagaatcccatgtgcactggtcaccccagtgctgacttggagccaggaaatgtgccttcagcccccacccccaaattccagtctcccagccaagctgcccgcctcaggaggatgaccattcccagccccactgatccccgagaaacattttatgttagggaatacccccacctcttctgggatgtgggaggctcctcatgcagcccagttcctcctgcgggggacctgggatgctggagacatggatgctcacctggctgcctcggccttccagggacagaccccgaggaagccatcctgagtgccttccgcatgtttgaccccagcggcaaaggggtggtgaacaaggatgagtaagtatgggcccagccagatgaggagcaccgtggtggaagcagagagcggggtgaggcccctagtgaggggggctgcctgtgcttcggggccttacactgctctttggggtgcagccaacccttccctgcgccatgggagcctccgtacccaccttccctgtgcagtcactcccccgcagtctcctgctcagaccctcctcaccccccaggttcaagcagcttctcctgacccaggcagacaagttctctccagctgaggtgaggctgcccagccccttcaatactcatccccagcaccttctctgggccttcacccatgacccagagcccagtaccagtgaggcagttgctggaagggtgagccgagggcccttctggaggaggtgccatctctgttgagacctagagggtaaagatgtggagtcagaaaagagggcagggtgcgccaggcagggagactgtgcacagacctggggggaagtggatagggagaggtttcgtacactcggggtgggcctgtgcctgtggctggaggggcgtcctttgcctcttggcccacatttgcactgactcctcactctgcccagagtcagccaagagaaaaacattaacccagagtctggggtctagggttgaaaagctaaggcaaaaagcacagatgcagggggcagacagaaaggccacaggactcaggtgaggtctctgccgggctgggccaggagccaggggactgccactcaccagtgtcccctgcaggtggagcagatgttcgccctgacacccatggacctggcggggaacatcgactacaagtcactgtgctacatcatcacccatggagacgagaaagaggaatgaggggcagggccaggcccacgggggggcacctcaataaactctgttgcaaaattggaattgctgtggtgtcttgtctgtgacagatgggttggggaccagccaagggggatcccagggtctcagtgcgcacatcaccatgatcatggccaccatctacctcctgggagctggcccctcgccagctcaccttgattcactcccatgatgccaagtgaagtgtgaactatgatcatgcctagtttacagatgaggacactgaggcccagaaagtgtgagcatcttaccaaggccagccctctagaagaggagatggtgggatttacaccacctccaccaagcccaggaatgagccacaaagtgggcactgcccagctacttggggctgtgcagagaagaggctgcttgctgggcactcagcaaactctgcccaacagcccagcgggtgggcagcagccctgggacccccacacccaaccacacagcctcccctggcccactgctcgcaccccatctcaatacactggcttgggtgcctccctgcatgggccctttgtgaaaggcagagaggtacccatttgaaacacaaccagcttctcattgcaaatacaggcaaggcactaagacatgaggaacatggacaccaaagcaggggccaggtaacatgcaaatttctagaggaaatgcccagaacctggcatcatgcctcctgagcccctcatgcgccgtgaggggtaagagggtcagacagctggagtgtagggagacgacttctcaggagagaatagttagtgctcccgtcacccttcatctgagaacccaagagctagaggagaaagtgatcctcatgagtaccagaggagcagcaggggacatccaaagcaccagagagagaaacagagacagagagacaggcagtgacagctcaaacctcagccagatccagagcatacaaagtctcctgcctacaggacagcccagtaagagctctcagcttgcctccttccctccccacaagccctgctgcaatccctgtacctgggggtcagtgggaaggaggtgagcgagaaaggaggggcaccccttcctgaaggccccaagaggaaaggcgttttcacccagacaggtgttcagttttgattttatctggcgcctggcaatttaattactaaattgaaacttgagactttctggaattatggcattttctgttgcttagagagattacaaaagtcacgaactgcctgagtttccatcctgaaagcaggccaccagcccactccactgaccatgctggaacagtggatgaacaaaatcaagtaccattaggattctaccacatgagtctgcttgttcaacaagctgatttcataaagtaagggatcatgttataatccaagctctacaggggtaaattgtgaaagactaaaatgaaccaaaaagatcataggtgtccagttatctgatttgatggggtgtctgaaccttttgttatctttgagctgtttcaaaactctctaaattattattattatttttgagacagagtctctctctgtcacccaggctggagtgcagtggcatgatctcagctcactgcaacctccacctcccaggttcaagtgattctcatgcctcaccctcccaagtagctagtattacagatgggcacaccttgcctggctaatttttgtatttttaatagagacgtggtttcaccatgttagccaggctggtctcgaactcctgacctccgttgatccacctgcctctgcctcccaaagtgctgggattacaggggtgagccaccgtgccctgccacaactctaaattataactaatagcaaggcaatggttcttctctattaacgtgcaaataaatgttgtccagtggaagcacaactgatttttcccttctctgtggaagaagccaattttgcatctattaagcaaattcatctgggcattcctaaccgtctacacatgcaccggctctttgaattcttctctgaaccaggcccaggaataagccacaagatgagcactgcccagctccttgggctgtcacatcttattgattcccacatgaattcacaagtaaataaaatatttggcggttgttcacttagtatgcaagtcaatattttgctttaaaaatattatcctttcacactcctgatatagttgtctgataaggttagtccttcccacaccaaaactgcctgtattagtgttgtttggaataaactgagggtagaatgtatatggtgtgtgtatgtggtgtgtgtgtttgtgtgtgtgtgtgtgtgagagagagagagagacaaaagagagagacagaaggatagagagaaacagatgggcacagacccaggacatgagttcagcctacactgaccaatatgacagccactggccacttgaaatgtggtgtgagttgggatatgccaaaagtgtaaaatgcacacaatattttgaagatttcatacaaaaaagaatgcaaacatctcattaataacttttatatagatcacatgttgaaatgataatgttttggatattagattattactaaaattaatttcacctatttcttttcactttttaaatgtggctactagaatatttagaattccataagtggcttgcatttctggctttcactcctgttggaaagcactgagttagactgtgtagtacgtctatttaagactgcagtttccaggccgaacaccgtggctcacgcctataatcccagcactttgggaggccgaggcgggcagatcacctgaggtcaggagtttgagataagcctggctaacgtggtgaaaccctgtctctactaaaaatacagaaattagccaggtgtggtagtgcatgcctgtagtcccagctactagggaggctgaggcaggagaatctcttgaacccagaaggggaggttgcagtgagccaagatcaagccactgcactccagcctagatgacagagcaagactccatctcaaaaaaaaaaaagtagaataaaaataaataaataaataaagactgcagtttctgggagactctgaggcaggcattagccttctctgcagagagtacttgcagcagggagcagcagttttgatgtcctcaaaaggagccaatttcatttgggtagggttgcctctgagtattctagcagtacagacagaaaggagagaaggctgtttccagaaagcagagatcatacgaattacttgtgagaccaaacttgttcctcaggtgaagctcaggcatcccttatgtggagtgtctaacagtctacacctgaggatgttggacataagggggtgtgaggtgggcatggctggggagagctctgggagggggaaaaccagctccatgttgtccacccactgaaaggaaagctccctctgggggaggtagatgccccctggccaggcctgcagggccctgctcactgtgagccctgtgtggtcctggcctgggtcccaccagccattgccaggcaacagctcccagttggaaaacagagcaaggctccctcttagaaaaaaaaaaaagaaagaaagaaaagaaaagaaatacaacaggtaactaagcatgacggctcacgcctgaaatcccagctacttgggaggccaaggcagaggattgcttgagactgggaggttgaggcagcagtgagccaggattctgcaattgcactccagcctgggtgacaaagtgagaccctagtaaaaaaaaaaaaaatagagacagagaaagaaagacatgcaacagggccaggcgcagtgactcatacctgtgatcccaacactttgggaggcagagaagggaggattgcttaagaccaggagtgcaagaccaacctgggcaacatggcaaaaacccatctcttcaaaaaataaaaaaattagcctgttgtggtggtgcgcacctatagtcccagatattcagggagcttgaaccaggtccaggctgcagtaagccatgatcgtgccactgcactccagcctgggtgacagagcgagaccttgtgagaaagaaaagaaagaagggaaggaaggaaggagggaaggagggaaggagggaggaagggaggaaggaagaatataggacccaaaggcctaaatgcccctactgtgccccagttctgcgtgactcaggaccagcctcctccacactcccaccaccacaaccctgcaccctacttgttcctgggggccccaaggggagcctcaccagaagcctcctcataaacccactgccccttacctttcctgtctttctagaagcctcagaagccttgccactctaaggacacctccatctgagccaaggcgctcgctccagatgtcccagagctcctggtcctgggtgtccctgccacacaaccccccatggagccctgctctggctcaagccccctgactgtgcatgagcaggcctgttgccctcactgggactgtccagagccttcccatctctctggagggacttccatcagtttctgccccttctcctctgccaagaactcacgttcagtctgatagcagaagaatcatctggcaccctcctgaatggaacccagagtacctcctttgtggaccggtctctggattttccccactctctcccttcagccatgctgatggcagagaaggtaagaacttccagcccacttctctggcgaggggaacttgtcatctgggtctgcagagaaggttccaccttatgctcatagtacattatctttactatgtactaggatatcacatttaaaaggacaaaaaaggccaggcagtggctcatgcttgtaatcctagcactttgggaggctgaggcaggtggattacctgaggccaggagttcaagaccagcctgaccaacatggcgaaaccccatctctattaaaaatacaaaaattagctgggtgtcgtggcatgtgcctacaatcccaactacttgggaggctgaagcaagagaatcacttgaacccaggaggcagaggatgcagtgagctgagatcgtgccactgcacaccagcctgggcgacaaaccgagactccatctcaaaaaataataataataaaatacaacaaaataaaagaacaaaaaaaaagaaatgtaaaatacttgaaggggcttgtataacattaataggattgacagtatctgctttccaggctgaagtgattcattcattattctagacgtctttagtcctttgcaatttgtggtaattaggcttttctttttaacattaaaaatatacaaaaataaaaggcaaaaaaagcatcatcccattagtctgaccttcccctcctccatccctgccccaacaccctgaagaccctggatgcaaacaaaggcccgagggagcctcttccctcgcagtgcaggcctcacctggggctcagagtcagaatctgcattttattccctaggacaacctctagtcagggcagaggccggctgtgctgcccaagtgccctaaccctagctttgaggcaccagaagggcaaatgcaaattaaaaatgagaataagtttattctccttggtgaaaaaaaaaaaaaaagactttcccctctcctttttctttagaaaatctatcattgcaagttccttcctggactttttttatgtagatctgttcaaaagctaaataagcctctttcaagtttcacatcccaggaatgtctccttaaggacctaggagccaccatttgaagtgtaatcaccaagggagatacatccttatctcccagtttccgtgggcaaaggggagcctaactttagcccggtgcctagctcaagttgcaaacacacttccagtcttaaaggaatgaatttattttttttcctttaggcaaacccaggtagccaccacagttacctggggattcacagagaactgtgtgtgaccactggtgctgtcaagtcctcttacctgagcacctgtgacgtttcccttgagaacgtgtacgggatgggttgcacctggttatatacaagcgtgagacttctttctgcctttgtaatttattagcagattatctgtgatgagcatcgcaatctgtttaatgcctattcaataattaaatttttctttctcttcttttgtggaaaggttttctgcattggcaggagatttttgttttcgattatgtccccaacatgcctgatgttccacccctcaagagcctcagccttgcccagggagggcatgggggtgagtggcctctcccacagagagtgctggccaagttggcccaggtgcgcagcaagggctgctgcccaaaggctccctcctggttggcatgggtcgggaccctgttgtgttgtgttttcgctctttttcgtagagttcaagggggtcctgctatgttgtccagactggtcttgaactgacctcaagggatcctctcgtctcagcctcccaaagtgctgggattactgtgcccagctttgtgttgtattttctgatcttatcctgcaacctcttgagcccccaacctgggccccagttcctgctgtgccccagcctgccagccctctctctctgcatattctttctttagctgagttaacaccactgataaggttaaagacaggctcttaaatttctgccctggcatgagaaata

SEQ ID NO: 26 - DNA, 39018 bp, Homo sapiens
tatttctcatgccagggcagaaatttaagagcctgtctttaaccttatcagtggtgttaactcagctaaagaaagaatatgcagagagagagggctggcaggctggggcacagcaggaactggggcccaggttgggggctcaagaggttgcaggataagatcagaaaatacaacacaaagctgggcacagtaatcccagcactttgggaggctgagacgagaggatcccttgaggtcagttcaagaccagtctggacaacatagcaggacccccttgaactctacgaaaaagagcgaaaacacaacacaacagggtcccgacccatgccaaccaggagggagcctttgggcagcagcccttgctgcgcacctgggccaacttggccagcactctctgtgggagaggccactcacccccatgccctccctgggcaaggctgaggctcttgaggggtggaacatcaggcatgttggggacataatcgaaaacaaaaatctcctgccaatgcagaaaacctttccacaaaagaagagaaagaaaaatttaattattgaataggcattaaacagattgcgatgctcatcacagataatctgctaataaattacaaaggcagaaagaagtctcacgcttgtatataaccaggtgcaacccatcccgtacacgttctcaagggaaacgtcacaggtgctcaggtaagaggacttgacagcaccagtggtcacacacagttctctgtgaatccccaggtaactgtggtggctacctgggtttgcctaaaggaaaaaaaataaattcattcctttaagactggaagtgtgtttgcaacttgagctaggcaccgggctaaagttaggctcccctttgcccacggaaactgggagataaggatgtatctcccttggtgattacacttcaaatggtggctcctaggtccttaaggagacattcctgggatgtgaaacttgaaagaggcttatttagcttttgaacagatctacataaaaaaagtccaggaaggaacttgcaatgatagattttctaaagaaaaaggagaggggaaagtctttttttttttttttcaccaaggagaataaacttattctcatttttaatttgcatttgcccttctggtgcctcaaagctagggttagggcacttgggcagcacagccggcctctgccctgactagaggttgtcctagggaataaaatgcagattctgactctgagccccaggtgaggcctgcactgcgagggaagaggctccctcgggcctttgtttgcatccagggtcttcagggtgttggggcagggatggaggaggggaaggtcagactaatgggatgatgctttttttgccttttatttttgtatatttttaatgttaaaaagaaaagcctaattaccacaaattgcaaaggactaaagacgtctagaataatgaatgaatcacttcagcctggaaagcagatactgtcaatcctattaatgttatacaagccccttcaagtattttacatttctttttttttgttcttttattttgttgtattttattattattattttttgagatggagtctcggtttgtcgcccaggctggtgtgcagtggcacgatctcagctcactgcatcctctgcctcctgggttcaagtgattctcttgcttcagcctcccaagtagttgggattgtaggcacatgccacgacacccagctaatttttgtatttttaatagagatggggtttcgccatgttggtcaggctggtcttgaactcctggcctcaggtaatccacctgcctcagcctcccaaagtgctaggattacaagcatgagccactgcctggccttttttgtccttttaaatgtgatatcctagtacatagtaaagataatgtactatgagcataaggtggaaccttctctgcagacccagatgacaagttcccctcgccagagaagtgggctggaagttcttaccttctctgccatcagcatggctgaagggagagagtggggaaaatccagagaccggtccacaaaggaggtactctgggttccattcaggagggtgccagatgattcttctgctatcagactgaacgtgagttcttggcagaggagaaggggcagaaactgatggaagtccctccagagagatgggaaggctctggacagtcccagtgagggcaacaggcctgctcatgcacagtcagggggcttgagccagagcagggctccatggggggttgtgtggcagggacacccaggaccaggagctctgggacatctggagcgagcgccttggctcagatggaggtgtccttagagtggcaaggcttctgaggcttctagaaagacaggaaaggtaaggggcagtgggtttatgaggaggcttctggtgaggctccccttggggcccccaggaacaagtagggtgcagggttgtggtggtgggagtgtggaggaggctggtcctgagtcacgcagaactggggcacagtaggggcatttaggcctttgggtcctatattcttccttcctcccttcctccctccttccctccttccctccttccttccttcccttctttcttttctttctcacaaggtctcgctctgtcacccaggctggagtgcagtggcacgatcatggcttactgcagcctggacctggttcaagctccctgaatatctgggactataggtgcgcaccaccacaacaggctaatttttttattttttgaagagatgggtttttgccatgttgcccaggttggtcttgcactcctggtcttaagcaatcctcccttctctgcctcccaaagtgttgggatcacaggtatgagtcactgcgcctggccctgttgcatgtctttctttctctgtctctattttttttttttttactagggtctcactttgtcacccaggctggagtgcaattgcagaatcctggctcactgctgcctcaacctcccagtctcaagcaatcctctgccttggcctcccaagtagctgggatttcaggcgtgagccgtcatgcttagttacctgttgtatttcttttcttttctttctttcttttttttttttctaagagggagccttgctctgttttccaactgggagctgttgcctggcaatggctggtgggacccaggccaggaccacacagggctcacagtgagcagggccctgcaggcctggccagggggcatctacctcccccagagggagctttcctttcagtgggtggacaacatggagctggttttccccctcccagagctctccccagccatgcccacctcacacccccttatgtccaacatcctcaggtgtagactgttagacactccacataagggatgcctgagcttcacctgaggaacaagtttggtctcacaagtaattcgtatgatctctgctttctggaaacagccttctctcctttctgtctgtactgctagaatactcagaggcaaccctacccaaatgaaattggctccttttgaggacatcaaaactgctgctccctgctgcaagtactctctgcagagaaggctaatgcctgcctcagagtctcccagaaactgcagtctttatttatttatttatttttattctacttttttttttttgagatggagtcttgctctgtcatctaggctggagtgcagtggcttgatcttggctcactgcaacctccccttctgggttcaagagattctcctgcctcagcctccctagtagctgggactacaggcatgcactaccacacctggctaatttctgtatttttagtagagacagggtttcaccacgttagccaggcttatctcaaactcctgacctcaggtgatctgcccgcctcggcctcccaaagtgctgggattataggcgtgagccacggtgttcggcctggaaactgcagtcttaaatagacgtactacacagtctaactcagtgctttccaacaggagtgaaagccagaaatgcaagccacttatggaattctaaatattctagtagccacatttaaaaagtgaaaagaaataggtgaaattaattttagtaataatctaatatccaaaacattatcatttcaacatgtgatctatataaaagttattaatgagatgtttgcattcttttttgtatgaaatcttcaaaatattgtgtgcattttacacttttggcatatcccaactcacaccacatttcaagtggccagtggctgtcatattggtcagtgtaggctgaactcatgtcctgggtctgtgcccatctgtttctctctatccttctgtctctctcttttgtctctctctctctctcacacacacacacacacaaacacacacaccacatacacacaccatatacattctaccctcagtttattccaaacaacactaatacaggcagttttggtgtgggaaggactaaccttatcagacaactatatcaggagtgtgaaaggataatatttttaaagcaaaatattgacttgcatactaagtgaacaaccgccaaatattttatttacttgtgaattcatgtgggaatcaataagatgtgacagcccaaggagctgggcagtgctcatcttgtggcttattcctgggcctggttcagagaagaattcaaagagccggtgcatgtgtagacggttaggaatgcccagatgaatttgcttaatagatgcaaaattggcttcttccacagagaagggaaaaatcagttgtgcttccactggacaacatttatttgcacgttaatagagaagaaccattgccttgctattagttataatttagagttgtggcagggcacggtggctcacccctgtaatcccagcactttgggaggcagaggcaggtggatcaacggaggtcaggagttcgagaccagcctggctaacatggtgaaaccacgtctctattaaaaatacaaaaattagccaggcaaggtgtgcccatctgtaatactagctacttgggagggtgaggcatgagaatcacttgaacctgggaggtggaggttgcagtgagctgagatcatgccactgcactccagcctgggtgacagagagagactctgtctcaaaaataataataataatttagagagttttgaaacagctcaaagataacaaaaggttcagacaccccatcaaatcagataactggacacctatgatctttttggttcattttagtctttcacaatttacccctgtagagcttggattataacatgatcccttactttatgaaatcagcttgttgaacaagcagactcatgtggtagaatcctaatggtacttgattttgttcatccactgttccagcatggtcagtggagtgggctggtggcctgctttcaggatggaaactcaggcagttcgtgacttttgtaatctctctaagcaacagaaaatgccataattccagaaagtctcaagtttcaatttagtaattaaattgccaggcgccagataaaatcaaaactgaacacctgtctgggtgaaaacgcctttcctcttggggccttcaggaaggggtgcccctcctttctcgctcacctccttcccactgacccccaggtacagggattgcagcagggcttgtggggagggaaggaggcaagctgagagctcttactgggctgtcctgtaggcaggagactttgtatgctctggatctggctgaggtttgagctgtcactgcctgtctctctgtctctgtttctctctctggtgctttggatgtcccctgctgctcctctggtactcatgaggatcactttctcctctagctcttgggttctcagatgaagggtgacgggagcactaactattctctcctgagaagtcgtctccctacactccagctgtctgaccctcttacccctcacggcgcatgaggggctcaggaggcatgatgccaggttctgggcatttcctctagaaatttgcatgttacctggcccctgctttggtgtccatgttcctcatgtcttagtgccttgcctgtatttgcaatgagaagctggttgtgtttcaaatgggtacctctctgcctttcacaaagggcccatgcagggaggcacccaagccagtgtattgagatggggtgcgagcagtgggccaggggaggctgtgtggttgggtgtgggggtcccagggctgctgcccacccgctgggctgttgggcagagtttgctgagtgcccagcaagcagcctcttctctgcacagccccaagtagctgggcagtgcccactttgtggctcattcctgggcttggtggaggtggtgtaaatcccaccatctcctcttctagagggctggccttggtaagatgctcacactttctgggcctcagtgtcctcatctgtaaactaggcatgatcatagttcacacttcacttggcatcatgggagtgaatcaaggtgagctggcgaggggccagctcccaggaggtagatggtggccatgatcatggtgatgtgcgcactgagaccctgggatcccccttggctggtccccaacccatctgtcacagacaagacaccacagcaattccaattttgcaacagagtttattgaggtgcccccccgtgggcctggccctgcccctcattcctctttctcgtctccatgggtgatgatgtagcacagtgacttgtagtcgatgttccccgccaggtccatgggtgtcagggcgaacatctgctccacctgcaggggacactggtgagtggcagtcccctggctcctggcccagcccggcagagacctcacctgagtcctgtggcctttctgtctgccccctgcatctgtgctttttgccttagcttttcaaccctagaccccagactctgggttaatgtttttctcttggctgactctgggcagagtgaggagtcagtgcaaatgtgggccaagaggcaaaggacgcccctccagccacaggcacaggcccaccccgagtgtacgaaacctctccctatccacttccccccaggtctgtgcacagtctccctgcctggcgcaccctgccctcttttctgactccacatctttaccctctaggtctcaacagagatggcacctcctccagaagggccctcggctcacccttccagcaactgcctcactggtactgggctctgggtcatgggtgaaggcccagagaaggtgctggggatgagtattgaaggggctgggcagcctcacctcagctggagagaacttgtctgcctgggtcaggagaagctgcttgaacctggggggtgaggagggtctgagcaggagactgcgggggagtgactgcacagggaaggtgggtacggaggctcccatggcgcagggaagggttggctgcaccccaaagagcagtgtaaggccccgaagcacaggcagcccccctcactaggggcctcaccccgctctctgcttccaccacggtgctcctcatctggctgggcccatacttactcatccttgttcaccacccctttgccgctggggtcaaacatgcggaaggcactcaggatggcttcctcggggtctgtccctggaaggccgaggcagccaggtgagcatccatgtctccagcatcccaggtcccccgcaggaggaactgggctgcatgaggagcctcccacatcccagaagaggtgggggtattccctaacataaaatgtttctcggggatcagtggggctgggaatggtcatcctcctgaggcgggcagcttggctgggagactggaatttgggggtgggggctgaaggcacatttcctggctccaagtcagcactggggtgaccagtgcacatgggattctggggcagaggatgtgcttggaatgggtcatggccaggaagagtccaggtgggtccaggtggggttcagttagggttcaggtggggttcatgtaaggttcaggtggggttcaggcagggttcaggtggggttcaggcagggtgcaggctccctgcctggccaagggtgcccagctctgtcccaggctcaccattgagcttctccccaaagagcgtgaggaagacggtgaagttgatggggcccttgccctcttgcagcatggcgtccagctcctcctctgggacactcaccttccctggtgggggtggggcatgaggtgcacacagggaccctgggtgtcccccagaaggcccaggccgccctccctccatcctggccacaggggctggaggggcagaggcagctgtgggtcgggaaggtgaagtggaagcaaggcgtgacaaggggggaagggcagtgtgaggagacggggaggaggggaagcaggggagcagagtcctgtccccccagccactcccacccgcccagcagctcagagtagggaccccagtgcgcagggtgggaggtgggtgcacgcacccagctgggagtaggtctccctcaggtctgccttgcagatgatgccatcacgattctggtcgatacagctgaaggcctgtgggatgggggccttcaggtgggagcagcccccagctctagggaaggtgggaggtgggggagagacctgggtggtgtgagaggcaaggtcagggtagaaggggggtatgtatgtggggtggggtgggggggccaggatgggatctgaggctactgggagtgggcactcacttctttgaactcctgtatctgggcttgttcaaacatggaaaagacgttggaagaaccacgttgggcctgcttggtggctgccaccttgccccgggtccccgccttcctgctggcctgcaacactgtgagtagggaggggtcctctccccaactcctcagagtctccccaccccacccatcatgcacagtcccagagcattcccaggagagccagggccaggatcctcttcctctccctggggaccaccctcaacccaacacaagcacagaaaactctgctcccccagcccaaaggccagcacctgggagaccgctagcctttcttccccagcaggcactcaccattctctctgcagaggtgtggctgctgtcgtggtggcagggcccagcctcctttatgtctcagccttatcacctgaaggtccaaataaggagaggaacagaggataggcccaaacttggcagcccccgcctgggctgggggaggcctaacagattccagccacattcctgatgaccttcatgtcctcaacgtgtaacatcctgctgtctatccatcctggcagggccagacacaatgtctgcctggagcagagcaggctcaaagctctcaccaccctaggtcctgatgaagggatccagttactcctgtatctgaccacccctccttgccagtccagccagaaccctggccagtgcaagaagacagctggtgagggccagtccagggcccccgccaggcatgggagggcagtgtgtagttctgaggatggtctgtggcctgagacccccggggcttcccagaggttttggtgaccctaggctctgaccttttgcccctctgaccaaggggcagaaggcatccctgagctagctgtgaccccaagaagaacactttgcttggctttggggcaattccagagggttaaggagctccatcagctgccctcccatgcagtctaccttgctcccagtctgccctgctgtttggagccttgccttcctcaagcctcatctcaaccacactacttcagaatgctctccctaacatcctcagcagggagcttctggggcacatttcccatttgcctggtggctgatgtgtttgtcattcctggcttctgtgcccctcctgagcaccccacctggttgacatctgtatccccagaaggcctggtgcacagtgggccgatgggcaggcctgcgtgatgctgttccagagaagcagtctcgccagcttctggggccgagggcacagcagaggggctggggaaacaggggacatcctggaggcagcaggagtgggccaccccaggctgggctcactggctgctgcccctccactggagccagacctatgtctgtcagtagctggctggtagagtgcaggagctcttatctgtcagacccaataccctttttatataacaagagttttcttttaaatttcttaaattcccttttttttttttgagacagagtctcactctcgcacaggctggagtgcagtggcgcgatctcagctcactgccacctctgcctcccgggttcaagccattcttgttcctcagcctcccaagcagctgggattataggcatgtgccaccacacccagctaatttttatatatattttttattttattttatttttagtaaagacggggttttatcatgttggccagccggtctcgaactcctgatcttaggtgatctgcctgcttcagcctcccaaagtgctaggattacaggtgtaagccactgagctctgtcacccaggctggagtgcagtggcatgagtagagctcactgcagacaacctcctgggctcaagtgctccttcctgcctcagcctctggagtagttgggactacaggtgcacaccaccctgcccagtgttttttttttctttttttaattaattaattcatttttgagacagagtttcgctctgttgcccaggctggagtgcagtggtgcaatctctgctcactgcaacctccgcctcctgggttcaagcaattcttctgcctcagcctcctgagtagctgggattataagcacccgccatcatgcccggctaatttttgtatttttagtagagttggggtttcaccatgttggccaggctgatctcgaactcctgaccttttgatccacctgctttggcttcccaaagtgctgggattacaggcatgagccaccgcgcccagcagtgcccccccgccccacccttttttttttaagagatggggtcttgctatgttgccccaggctggtctcaaattcctggcctcaagcaatcctccacctcagcctctcaaagcactgagattataggcatgagccatcacactggcccataacaagtgttttatgacacctcctttgttatctagaaaagaaattcattttatctatttcaattcagtcatataacctacctacgaatagaattttaataattaatacaatgtcctgaactgtaatataaaggagaaatagaaagcaattgatattaaaatgtgttccactctgtgaatgcttgagcataacagtaatgataacaaaataatcagatgcttgcaccaacttataaggaataatttagactcaagagaactaagaagagccaaagcaattccacatgagaagtagcagaaaacaagaaatctgaagggggacatgacttttcaaaatcacaactttgggttatgatctgaaggaaacaaaacagttgttcctaattagctgggtaatatctctcatcaaaaaaggaatgcatgaaaatcacacaaatatgtttctatgtcactgtattttatgctgcagaaagatggcattatgcctacgcttggctaactctaaataggcgttccactgacaggagcatctggagggaccttagaaatccaacatgtatctgggcccctactcactggcaaacctaagtgactctgactggacaggacggtgctgagactgacctgcagcaggaccagcctcattcccccacttctccagagcagcacctggcctggcactccctctgcacacattccatgggcaggcaagcaggggcccgggccaggcagtgtactgtccactgctctgccatcccccatgacaccccattcctgttcctacagcctggtctgtcactcctcacactccccttggcacagatggctggaggagctgtctggagggcattgccgagatactgaagtgtcttcatgcatgtgacgcagactctttatagattgtccccacagtcctaatgcacagaagtcaaagaacagtggacaggccatgtttaaaacttttaacatttttaattaaaaaacccacacaatcttaggttgggcatggagagggtggcatgtcatatgatggggttgtcccttggggtgtgctgaatgctgcttggggtttcttcctgagccagcgctatgggagctgaagatgtagggctggcccttctcccctttgtgggccccttggggcagaggcttgggggctctgtctcttgcacctgctgcgagggtccatcccagaatcacaagccactcagtgatggtatgggagagaaaaggtctctgggggtattcaaagcttgggacacctcctccatggagccccctcccattgctccctgggcctcttgagcctcaggcaagaaaatggccaggactgggtgatgagcagcccctggctgcccttttggcccaggtctaggtctggtcaagctgttggagctgcctccccacacaggatgagttcccagggaagtgaggccacagcaggatccagagggcaccccttcccagagcctgggcccaggcgaggccaacagctctgacagtgtggaaatgcatcaaagtcctgagtgagcaactcccttctgggaaattgattccagcgagaaaggtggggggcttccagagtctctgttcctgctcctgccgcacccccgttagggccctggggctgtcccaccgaaaaactgagggaagaggcccgctctgttccccagcggtatggcaggcggcctgggtcctgacaaggccaggcctcctgccccgccaggctgcgagcacgtgtggggagcacttccccatggagcctgggtgctgtggggctgtggcatcctccctgcgcttgcggccactgctctcactggcccagcatacaggccttcttacaggccaccgccgagaccagggccgcgccccggccactgccctcctccgactcgatgaaggtgatctcgcagctgggcgtcagcctgcgcacgctggcatggaaccgctccttgaagctgggcagaagagaagcagggctgccgtccctcctcccacctcatcctccacattcattaccgggcgccctgcacgcagtcgacccttcccccaaatctaggccaagggggacgagaagaggactacgaaatcttggagcttgggaaccgcaaggaaccttggagcgcgcgctttttgggccccactttaccagggagagagcggggcgggctcacctggggtgcagcttgtacacggagccatccacgcccacagtgatgcgcattacgtcctcgctgcggctctcgcgcatgcggttgatgacgcccgccagccccgccgagcacatgtgcgcagcgcgcgtagacacgctctcgcaggcgcggcgcacgatgtcgcagtcggtggtcgagggtcgcagccccagcgtgctcaggatgttgtagatctgcttgcggtcgcccgtgtcgctgcggggcgggaggaggtagggcggtcgctgagtgtcgctccgacagtccatccccctccagcggcggcctctcgttctccagggaggggccccggccagccgtccccccagcggcggcctctttccctcgctgagccgggacccctctctggagaaatgggggcgatcccgctcacctcacccagccaaagcgtttccgccagggactggttagtactgccccctctaactaagcccagggtctccgtcctaacgtgggggtgtcaaccatgccgcgccttggggttgtgagtgatgtgagaggatggccacggcgggcagggagcaccgaggggactcacggatggggaccagtgcccggacgcaggctcgctcccatccctgctcttggcatccccgtccggaccccgcctcctccccttgggccctccccctcctccccgtctcgggccccgcccctccctttgcatccccgtcctgtcccagcctcctgcccttggacccgtccctgccccgccctcgcctccagcgcccggcctcgggccccgcccactcccccgccccctgtgccccgccccgggccccgcccacgcccggaatcccgccccaggccctagtttcccatccctgcgccccgggcctgggactcagcgtcgccctgagaccaagtctgcagtgcccgggcgtccccagcccctgccctttgcacccaccctcctcctccgcacacctctccacctgcgacacgaagcgcgtctcgaaggctccgcgtgtgcgcagctgctcggaggcctccccgtggaagagcaggttttcgtccacgagcctgagcagcacaagccgcaccagctcgcccatgtacttgccacctatgagcttctcatacctggacatagggcaggtccattacatcagcaggcacgagggagggcccctcatgcaggtggaagccgggagccggccccactgctccccactgaggtcacgaggcggccacgtggggcactgcgatccccactcccccagctggttcacgtctttccctcgttaatgagccagagctttagaaatgtcagggattaggaacgtgcacgttcaagtcaatcacgggagcaactttggcctgcccctgggcccactgcagtaaagggaaagacagatagttcaaagaccccatccagtccctccgaaaccttccttgcagggggccctgcgccgagcacgggacctacagcttcagtcttcctttagctgcatccagagctgctgttcattggccagttatggttgggaaaactaagacttggagggttagtgcccagtcagaggcacgcaccatgttgctggcactttcttgcttaatctatgaccttccgtatttaatttaaataaatcgaatactactgacctataataatagaggcctgcgagcggcagagaggacgctaataaagtaattagcataggcctggcacagtaggtggtaaacaagtgatagccatgattaatgatgagctctctgtgggttggtttccaagctgtgactgtcaacccgcagcattccacaaaagactaatattctttctgtgaatgtggccaaatacatactttggggaatgttgggttaaacccaggaaccttgctgggggcgtctcagagcctcctctgcatgcacgatcacctgtcggaaggaaagaggtctgggcttatcacatcacaactgggactaacccttcatctctcacaggggcaggtcatgactgagcagaagggatggagcttacgaacggattgtcagtttgcttttccccagagttgtttaaaaacaagcccattatctgcaatggcccggctcccatctgccgctgcaccagagcggcccagggcctgggttgtgggggaggggggcatccttacagctgctgaccggggtttgcagagctctcgtccaccaggcggtcatactccagcaggaactcgtccagctcgccggagtccccgaaggcgccccactcggtattgacgcacatgcggccctcgtccccctccaccagctccacattctgcatctcctccatgtagcaggcattgcagcccgtgcctggggtggaggtcggggggactgtcagcgagagctgcactgccccggagtagggcctggttcctgcccacaggagtccctctcccgctcccccatgcctgtctctgctttgtctggaacaatggaaaggcggctctccctggggctggaagacctgggttgcttcagtggccagggacagctttcagggctgtcctctttcctaacaggcaacagtaacaccttccctgcctgttacctaggtggttgggaggactgagagaaacagtgtgtatcaaagaaatggttgtgggacgttatcattttattttgtctatgtacgacccttgttttctggcactgtccatgcacatgtttgagcttctttgtcatgagacatgtttggatggcaacccaaagtgagtaaggcatggtgtgggcccttgggagcagcccagaggctcctgtagacaattccggatatggaattttgtaatttgctggcccctgtgcagagtgacaacatggagtcttttgttcacaagttattaagagtttcaaactgctgacagcagagcctcaagctagcatgactgtgtgggctgcacacccccaaagctgtcagggacagcaactcaaatgctggtcagtcgagctgccacataggaatcagggctcagtgatgcttagacttccagtttttatttatttatttatttatttggagacagagtctcactcactccatcacccaggctggagtgcagtggcgtgatcttggctcactgcaacctctgcctccagggtttaagcaattctcctgcctcagtctcctgagtacctgggattacaggcatgcgccatcacacccagctaatttttgtatttttagtagagacgaggttacaccttgttggccagctagtcttcaaatcctgacctcaagtgacccgcctgccttagcctcccaaagtgttgggattactggcgtgagccaccttgcctggctgccttctagttttttatgaacaaacagaaatccagactttgatgtgaattctcctaattttcagatcttggtaattgttataaacatgtttttaaacactgagcagagtcaagagtggatgtggggcagatgtgagtggtgggtcactccttgccacctctgccccaggaggggttatgcctgggcccagcagctgcagcttggcttggtgggaattcatgtggaagtgtcttggggagccccaggcagttccagaggatagggtggaaagggctggggggatcacagccagggatggctggggctcacgtttagatgctggatttaaagacaacgttccttctgaaaggtgaaaatggaagtaagagaagtatagaaccacacggctgtgcgcacagcagataactgatctgattggattgctcctcagtgaaggctggttataatgacctccggaacttctgagaaaggtccgagttggtgtggaagacccctctgctgggaggggcggactgctgctccctttcctggtacctgccttcactttgggtgggggcaggggcaggggcaggcccgtggaaagaccattcgggtggagatggtaccacttttgcttatcctcttccacttggaccaatctgtccagttggtcaatttaccagataagtgttttaattataatcctgatgggtgaggtggatatgcagctggcataccatctgatgcaggaatgtggcatcatggcgttgaaatgcttcctactgtacacggtgcttccatcttgataccccaagaccacccaggctgtagcaccaggctctgctctgacatcaccggttgttaagtagtttggtcctcaccccacagggcccttgaagcctgttgtacacagggagcctcagcagtctggaaggggcaggggtgcaaggagcccttacccacgatcatgccgacctcgcactgatggtcttcgtagtagcaggagatcatcgtggccaccgtgtcattcaccattgccaccacatccatttcaaagtcctgccaagaagcacagaagctgcagtgctggaagccaaggagaaaggcaggcagtgctggggtgggtggcccagggcagcccccccggcaggtacaggtgccccctcacccctctccgtttgatagcgtctcgcagaagccccacgacattgttcccttctgctcctgaggccttgaagcccttggtccagttgagaaggatgccctgtggggagagataggcctcgtggctgctaacatatactggaggcagggtgctagggcctgtcactacctcctgcacagggccataaaagtatgcaccctactttacagctgaggaaacaggctcagagcagccccatagctttgagaggttttgggaacgattctccttgaagatatcatatttctgcagggctgagtcccagccaatttaagaatgttgtactgcacagctctgagacgtcatcccagagtcaaggcagggcgtggggggagcagctttgtgtaaaatcaggatttccctcctgcaaggtaccccgctgcatgcacaggtgccacctggccctctctgtctctgtagggactggggcttggaaaaccacatgagatgttgctttggctgctgcttctgccgtgagtgaggatctggctttctccctgacccaaaggtctcgtgttttatgtgtgtgcatatataactgtgtgtgtgtgtgcatgcacagatgtaactggcaggccactttgctagcttgcaggaagggtagaatctcagttccttcacatttctgactcagctagaggcagtgtgacatgaccgtggcctgcaggtgacccagagcccggctgcctgagtttgagccccaccctactgccagctgctctttccactggagtggggtgatcatagctggtgcctcacaaggcgcacagccagaattagctaatgtgatgcttcttttccacagcattagaggtggcaggtgacatggccacaatttgaatccagatctcccttctgagcacatggtatgggggctacatttgaaggcagagttcctctggggtgcctgtgcctcccctcatctgccttctgcccctccacccggcccaccttatcgatgtcttcgtgcctcacaggaaaggagaaggtgaagcccaggggcagcttcttgtgtttcatctgatgcttgtccaggaagtcggagatgcactcagagatgtagtcgaagagctggaagatgcacgccatggtgaccatctggcatgggggggtgcgctggccggcagccctccccacggcctcaagccaagctattcctcagggacactgcaacacctggccactgaatgccaggcctgtccacagtttccctctcctcttccgctgctgcttgttgggctcaggccctaagcctcccccatgccagagacctgctgacagtggccctcgggacaaggcaacacagggcaggctggtccctggcccggctgtgctctgtcagcctagccctcccagctgaaccttgtgaggttcagcctcaggcctggccagctattcctgaggctccacatggaggcacatccttgatttctgtctccagcacccggagtctccttttctacttctaggggccctggccacccatccttactgaagaccagccccgactcccctcacacgggcctctccatggaactggatactgctgaatgctctgctgactgaccaggctcctcactggctgctggggccagggaggtccccacaccatcccactgccttgattcacacccagcccacagacagactagcaagctgcaggggtgtgaggacgggtagccacgggcagcctcctgcctcctgcctcggagccctgcccttccaggagctggccttggccatgtgcttggctgcagctagggctctggccttgcccaactccccctaggcctcattctgcttctatgttccctgcaccccagtcctccccatggtcaggggtccttgctgcctgggtagacattgtgattgctgtcaccccactttctgtgcatgctggtggagggtgaggggtggcctttggagaggggggcagtgcactggctgccgggtcacatttctgttcttacacattggtttttcctctggtaaactggacaaggtgtgactggctggggttcctcttgccactaactcttcctcagcccgttcccctctcaatgctggccagatggtgactgtgggacttggggacatgttggccagtcctgttcacccaggcctccagctgcctctgaggctgggtggtcctccagcccccgctctccccacccctggtagacaggtggcacctcccgtcaggactagctgggccctgagatcctgcatggccttggccccctgccccggcccctgcgctgctcaccatctcagcagtgccggtcatggcgtcctcggggatggagtacatctggtgtttggtcttcacgctccactgcccctcctcaccttctcccaccttcaccagcatcaccctgaagttagtgccacccaggtccagggagaggaagtccccgacttctaaaggcacagagagaagtgtgtcagcctcagggacacccacaggctggccttgggctgggtgggccccaggtgactgagcccggatattacaaagaggaggagggaaggcacaagggactaagggagctggacaaggggccaccagacacctggggacaccagtgtcaactgtggaaggggtcaaaggtcaaccagggaaaagtcaatgggaaactcctgccctggacagtcaccgagagcccagggaccaactgaggatctagtgcaatggcccagctgcagaactgggctgggagagttccctaagtgcccatggggagcagtgaggtctttttttttttttttttttgagatggtgtctcaccctgtcaccccaggctggagtgcagtggcgcgattttggctcactgcaacctcggcctcccgggttcaagcaattcttatgcctcagcctcccgagtagctggaactacaggaatgtgccaccatgcctggataatttttgtatttttagtagagacggggtttcaccatgttgggcaggctggtctcaaactcctggcctcaagagatccgcctgctttggcctcccaaagtgttgaagttacaggggtgagccactgcacctggccaggagtgagatttaaaacgccagttttcctgaggtttgccagctccagggtgagcccgagtgccccagggccggaccagaggagccaagggtgagaactggcccaagtcgaggacttcattgctccccaggagattctgtctcgggctggctgtgagtctgggagtgcctggggtgcttctcccagctagggctgagcccacagctgcttctggatgaggagccggttaccatgtggtacctgagccttctggggtggagcgcacgtaggtgggcagcatcttcacactggcctcttcatgggtctccagcctcaggccgcggtccatctccttctgcatccgtctcatcaccttcttcaggtcctcctcctgcagctggaactctgccaggatctgctctacctgcacagggagggggatgggagcagtcgggctggggagggggtaggctggggacctcagggtggggctgtcaccaggcatctgcacaccgagggcctcacggggcatctcccccacacgccatgggcctccttctgtcttctgaccccggggtcaggatgacccatcttctcaaactttactacaggtaaaaccagctggaaagtcagaagagcagagtctggtaccagccactcaacaaatgcagcccacagcgtgttggaggggtgagcagcagagggcagagtagcttctgtccctgacgatatccctgtggcacagcgtcctgtagcaccctgcttcgtccctcaggtcagagccagggaaaggaggggctaactgggagagctggcgaggtggggcttgagccacctgtctggagggtgccaggcagctggcattgctgtcagagagacccagtcctcctacttgggatttacacaagaaaataaatgggcctgtctgcacaggtgtgctaagggccagccaggagtgagtgtgagtgtctagaaggaggtgtctgctgactgaagccatctgtggcatgggcacactgggccacagaacaaagagggtccctatgcactgatgtgagagacgcctgggcacacgaagctcagatctgatactgccactcccgtgagcatggacggcccatggtgtggctgctggctctccacatggcagtgtgaggacaggccgtgagtgcagatgtgactctgcctatgcatccccagcaagctggtgtgtggacagctatgtgtctgtccactgggcaccctagtgctattcatggagaaaaggccatgttaatgtgctggttatctctgggcagtggtgagaaaaataatcataagaatattttcatcttgaatcaaaaagaaaaaggaaagatgctctgataaaagccgtggatccattccacaaaaactcacacacttttgcccacagtcttacacataagctcagagggttggagatgctctgaatcccagccaggaggcaagacggccattttcctcttcttcctcagtttctagaactcagattttgttggtatggggagcacattgcgccatgattaatctaaggtgggcacagcaattctatactcctcttactgatgatcggtctagagttgggcatttcacccagttctggccaatgacaggtgaagggaagcctgattttagcaggggaggagcttcaatgtccccctaaatttgtaaacacagctgtgtaaggatgtgatggccagcgctgtgatagccaccctgcaaccatgaagaaacaaggctggaggttaaagctgttagcatactgcaaatgtagggaagagagagtaatgccagatccaccctccacgtgcagcttatgggagcagacgcaaaccacttatgccacagtgagtcaggtgtttgtcttcctgcagcccaaagcattcctaatggatacagatctttagttaagaaccatgtctcttaatgaggccccacatgtaaaatttaaactgaggcaaggtcagaaagggatggggctgataaagtctgtgacaaaagacacagaatcaaacacccatgttggctgagcaggcactgttccgaggctgtgagcatgggtgggagtgcacgccctccccgacccctaaccctccaatccagctgcccctgcagagcacacccctggagatgtcctcagggctctgtggaacaatccaggctgtcctcaatgccccacagctacaacttttgcctcctctgtctttctttcctacacccaccaatgtagaggatgccaggaactaactgtgaaggcatctgtcatttgctgaattcctccatatgccaggccctgcattaggtgcttcacatagcagcctcacacactatgccctgtcaccacagcaccggggaggaggtgccagcagcacccatcttgcagatgaagaaaggcttacagaagtcattattgcaggcatgggcagccagcacaccatggtgaggccagcacccaaatccatgcacacaatggctactggcaggaagtcctaggacccaattataagatacctgtgggctctcaacaaaagtgatgctgctcttgcaaaggtccagccctcacacctgcctggcaccacccttgtgcctctctccaagtggcccatcctggcagccacggacctggactctggtcctttggccccaggttcttcatgggaggagccaacatttcagtctgaggtcttggcggaggacaatggcatggagcctatgcccaggtggctgatcagagtgtggctgtattgtcagacagttggggcccttgagtgatcctcccttgcagggctgtggggagaactggcccagcccttggagaataaggagagctaggtacaagttggctgttgtttctcttatcacatgttgggaggctgggccctgtagggtgtcgaggaggctcaagtcttccccctctgtatcaaggcccacgtgtggccctgccactgactgggtgaagtcctggctctactgccttctaggccagaaagttctccccgaggaatcccggtattggatgatgtcaaactgataccgtctgttcagagggcaatttggagtttctctaagtttaactttgatctgacagtttctctcctaagaatctgttctgcagcaagagggctgcaggcatttccaagatacacaggggggtatcctcttgctgcaacagtgaggaccctcatattcactgttggggactttaaatcaacaccgggacacttaccgcagggcctcttgtggcctttcccgtgaaggagacgtataggcataagtgaaaacgtgagatgggacctgaggtaggacctgatcccatttctgtaaataaagttgcatctggcctgtgaatctgatttgttctgtataatattctcaaaagcttaaatttgctgccaccacttaaaatctacttaaaatagagacacttttacacaaaaatctggatttctgtaaaagtaggtctgtattctctgtgggctgcagggaagcaggggacatggggtgggggagcctgtctccccacagtggcagaaccggccaggctctcctggcacagggctcttatctgggccccgccctagccagatgctacagggtctctgcattgtccacaccgcagggcctatgaggacccctcacacacttcccagtgggcatgggttggaggatagatgctgtcagcttccgaggctgcagtcaccagtagacctgggggttcacctctcatgtggggagcatcctccaaaggtgagccttgttcttggtgggaacaagccctttcctcagggtgcatctgggcctgcagaagttcccctcctggtgcaaccccagaggaggaagctctgacccagcttggtctcacaagcctgggggtcacattgtggagcagaggttggcttcacagactcccaggacaagcccaatggcagggactgaggctgatgcacacttcctgtgtgccagacctgctctgggcacccctccctattattgctacagccaccctgggacatgggtacttttattatctcctttttttataagtgaggaaactggacacagaggtacaaacccttccccaagcccacagaaccataggccacagaggagtttgaacccaggcactggctccaagctttcctctcacctggccaggctgcatcctgcccgacttcaggcccagcaccaagctgttcctggtgcccagaccccagctacaagtatctctctggcgagcctcatgctgggtgtctgtgcaaacttacagggctttcccaagcagtgtaggaaatgtggtggtacctggggagccctgagagcctggcgccccaggtgtagcctcggaagaagagcacagacagagcctgtccctccccctggcagcctctgggaggcagccccagccagcttgcagaggtttctcttgctgacctcacccaagaggtcacaggacacataatcagggcccacagccaaacgtacaacttttcttgcctgaggacgcccccacactccctgcagggcatctgaccctcatctcttcagcagatgctcactgaatgccaggtgcggcacagggcacagaagcagagttgacagtgggaccaacccctctcaagggcggggatctgcaggaaagaacctcagtcaagttggggacaggctggggggtgaaggaatggggacagatgaagagggaccaggtcgggcagctgctgccagaagatgggagcaggggacctgcactgaggctggagcagaggcggggagggagggagtgaggctgagctgtgagcagcaggaggtgagaagcctggaggcgccgggctgcagagcaggggcatcttggggcagggtggaagcagggcgtcaggctgtcctaacaatccctgtgcagggatgctgggcgcaggcttggtgaaagcgataagagtctagacttattctgaagggaggtgggaggggctgaggagaggaacagaagggcctgggaagaagaggttccatctgacctgggagttgggttgtgggagttgggatcttggtctgggcatgttaacacatctgccagccaaggggcgatttgttccaagtagcagttggccatgtgaggcccgagttcagaggagagtctggctggagaggtagatgtggagccatcagtacagagacagtccttaaggccactggcctggacatggtcaccagggtgtacaggttggatagcagtgggagaggcggagctggtcaggcagggctgccaggggcaggatgctgtcccttttatgcagtgagcagtgctttgtgaccccacctccagaacgcagtaaaaaaggcaggatgccttctagtgccgcctttggcagatgtggactgaggaactgtctattccagcactgggaggggccggctggtggagctgtgggtccctgaggaaatggccaagggccagggcagtccctgggcagatgctgcaggcctgggggctccagagcccatccgagtgccagatgtccagctgtagcctggccccctccattcctgggccctcaggtggctatgtacacagaagtgagtggccttgggctagtgcccacattctcctgagggacagaatccctgatccaccaacccctggaaatgccatgcagagcccccagagagccagacagccctgggcagccagccagctccccccataaaagccccaggccaggccccggacactggtgtcctgggtcaccgttagctccaggaataagtaccctagaacccctcgagaggctggacactggatagccacagtgaggaggggtggtgggcagagggccagtggcaggcacagctgccctagccaggacccccaaggcccatgtgcctccttccaaggtgccccaagcctgctcgccttccctgcccccagccttagttttggtaatctgcaaaaccaagggccctgccctgggtgctgctctcccagtgcaaagtccctaactttggtgtgacccttaccagagtcaaggctgtctgggcctggctccttgtgacatccatcgccatctctccgaggggctaagaggtagatgctttgggaggcagagatgctcctgcctgctgaggcctagcacatgctgtagccttggagcgtaaggcccgcctgtggcagcaacggctgcttggatggagagctgcctgaggctggcagcccagggcttctgcactgaaagggctcagcctggcggctgctcaaatactctgccccctgccatggggtcagaggcagggcagaaagggagggtaggccatgtgggtaacagttgacagggccacggggacagagccatggggcagccggccacactctgtgaacatggggtagggattgctgcccagcaggagggggtgtgcagagccagcctacccatcttccattcctcagccttgtgcgggcagaaagtcaccaggctgccttggccacagaacacttactgaaatgcccttggacagggagggggtcctaagggggcctggcccgcgctggtgcaggtctggacttgctcttggaggcaaggggatccccagtggattttcatctgcagagaggttcgatttgcatttcatacaatccaggggtctgtatggaacttggggaaggggtggtggaggaaggtggccaactgatcaaaaacaaacaaaaaacaggggtatcattcttaattttgtgactgcaaagtccaggcctcaggcttgctttgggtgcctccatgggcatagaccatgacttccaggctctggcccaggcctctccttgggctcacctgggagtgacatccacatgctatgtacttgctggcacctgccaaagcctgctaaaattagctggagctggcaagtgggtcagggtatggagggtgccttgtcagaatgccaggtctctcgccaatggccagagtgatcactcccaagaaagcccttgatacaattgatccctttcccaatatagagcagagatggcctcatcagatctcatgtgacaggccactgacccccacagcccccagctctgagctactgtttgctcatgggggcagggctcacacccaggtttggagtggcactggggccttctggttcagccaggccaagaagcagccacccagcgagacttgcccttcttctgggccaagcacacagcacaggggaggagaatctaaattcagttctcaagaaaggctgaggatgtgtacaaagcctgaagctgaggcaagtgggccccctttcttggttgactgaactgccagtgccctctctagcctctatttagagcaacaggcatcccctagagttcctttctgggagccacctgctgatattcattggcatccatgaggccagaaagcggcccaacacccctacttccccacaccgtctaattctccgggaccagattctcatgactcatgccagccctcctgggcacccacccttgtcctgtctcagtgcctcttcttcaggataaggggtgacaccaacagtctgtactgcactggagttgagagtcattgtagcaggaacagttcctgctttccaggaattttggaagggcaagactgtccagaacctgtccagagaagaggggccaagaaggggagggcctcagagatgatggctcatggaggatgaccaggacatgcttagagtcttcagtagctcaagggctgtcccgaggaggatggatgaacattgtttctgcttagagctttctaaaaagacagaactgtgcagctgtgggctaggatgtctcagtagatagtgaactccccatttcatggggagagaaagacaagagcagaatcagaagggaccttgctctatgtcccagtggtacccccatttcttagttgctcagggttctgattgacagacatgacttgattttctttttcattcatcaaaagaaaataatatgacaagtttggtgatggatattcaagatgattaattctactatcaaaaaacgagacacaacccacatacccaactacaggaggttggttaaataaattatgctacacttacatgtagtcattaaaaatggtaagattcatctgctctattggcatggaaagatgttcatgacatactgttgaaagggaatgtgtagccgcccttgaagctggccttcaattagccctgcttctggtattcaccccatggtatagtctcttccatgcagaataggtctagcctgtgtaactaatatgataatgcagaaatggtggagtatgactttggagcctaagccagaaaagaccctgtggtttctgccttgttctctcctggactgttccctctgggggaagccaactgctatgctatgaggttgcctacaagaactctgggaagatccattgagaagaagcgaagtctcttgccaatacgcaactccaacttgccagccatgtgagtggaccactttggaagcagctcctctggccccagtcaagccttcaggtgatgcagccccagccaaaaccctgacctcaggagagacaccaagccagaccacccagctaagctgcttctgaattcttgacctacagaaactgtgtgagataacaaaggtttgttgtttcaagctactatggttttttttaaaaacactttatgaaataaaattttgttattacagaacaaataagtttagaaaccattttctatcttttagcatatgatccagatataagacagtgtcataccacattcttgtcatcataatacacggaaaggtgaagccactaagttttgaggcagtttgttatacagcaatagatgactaacacaggggaagaacaggaaacatagtatgatccatttttgtcgtatatacgatatagataatatatgtattgggaggaaatataccaaaatggtgacagtaattatcttgatgatggtggtatgaggattttaatttattttcctttttgcttatctgtatttcctaccttttctgcagtaaatgggtattaatggagtaatatttaacaatgaagttaaaaaaagaaaggttgagccttatctgccattttgcacagaagcaagcctggaggcccagattctaaagggtagaggttcacagttaaatgagccaagctgctagaccccatatgccattgggaaagatattgggagccaggaaaccagggaacccaaagtgtccgcccttccaccactggcctgttccctgataccctcagtaccagctgggcaccaagtgtgggcacgctgatgcaacagggcctggaggtcagcatgatgttgcaagtgtttgcttacagcagggtagacttgagaccggctgtgctcttgtgctaaggggcaggctaagggcctggtgagtgggagggtgttaggcagtggctgatggccaggacatcagggaaagaggcaaggggagagccgagagacagcagagcatgccaggatcaaatgaccacaactagtgtgtgccctgtggcttccacatgccaggggatgtgctagaccctttagatggattgaaactggccgatgagctgaaggctgtcattttatatgcagggaaactgaagcctatgggagttaagggatttactaggatgcaacagctatgagtgacttggctaagattcacccatgggtcactctgactccaggattgttaacagtttggtcttcttgactagatggggagggcttcagggtcaagcatatgctgggggacaggaaatatcctttggggcttcttccatgctggagatgttcagaggcttcagctgaagctggtggaggtggacacagtggtatccacagaggtcagttttgccccagtgtttgcctctgtcaacagatggaatggagcctggggctgggtgtcagggataaagcctaaggccagcactgttggggttgaagagcagagcatgagtaagggtgcagggagcagccctgtgcattgcctagggaggggttaggagaatcatccaagactctgtgctgagaggcaggataacactggggtaacacagaactgtaggatctccagcctgagtctggagactggctttgccactcactggctctagggcctcgggcaaattccttaatgtttctaggcctcagtaaggggcaggcaacaattctactacctcacagggctgttgagaggattcaatgggataatgcaggtaaggctcttggcacatacaagttgttcaatagtttgtagctgttgttgctaccaaaggatattttagcccttgggtcagagtttaagacatgggctgtccccagctcttgatttacggcagatctaatgccaaactcctaccccaatgcatactgattatttctgtgttttaaggagacagactaggtggcatagactctttgatgctagtcctacagtaaatcaatgaagctttttgtctgaaaagagttactagggaatgatcctcatgaagctggcaacgtaggaaacttcaggaattggttcctctatctaaacaaccagcaagttagaaaagaaaaaaatcctgtaagagtcaactctttcagaattctggaacctgattggacacttacagcaaccatgggagtgctcgatgaagggagaggcatgctgatggctcataagtgagtggtgtgggcaaaccagctaccatcctgcattcttcaacattcctgtggccatgtggacagtaattgtgttcctagagcagctggctggagcaggagtgggcagaaaggaccttgtcttccagaaatttggagaatcaaatttcttttgtttatctggtggttccctgagggctcagagtagagcttgcctttgtttctgccccttcaggcagcagcagccttccaggtggcatctatcagaagatttttaaaaaggtacatacatgctaggttttttgtttcttgggttttaaaaaaatctatgcatttaaggaatgctcttccaggtcataggctgactgcagaggcaccagaacagaaacgtcagtgaccagacacaagagagaatacatactttgcaaaaatcgtttggaaaagtcactatacaaatggacaactgcagccctcaacaaacaacaaaaccaatctcaaaggagggggagaatctggcttcagaattaccacattttactactcaaaatgttaagttttcaacaaagtattacaaagcaaataaagaggaagatatgactctctaacaggacaaaaataatttaaaagaagctatccataaggaattttagacattggaattactagtcaaagacattaagtcaactgtcttaaatatgcttaattaactaaagaaaaccatggacaaagaactacaggaaattgggagagcaatgtatgaacagatggggaatgacaataaaaagaatttattaaagaggaaccaaatagaaattctggatctgaaaagtacaatactgaaatgaaaaagtcactggaggggttaaatggccaatttgagcaggcagaagaaataatcattgaacttgaagaaaaggcgattgaagttatccagtctgcagagcagaaaaaaagaaagaagaaaaatgaacagaacctgagggaccagtaggataccatcagtcatgccaactaagtatacgggagctccagaagaagagagatggaaaggggaagaaaaagatatttgagaaatggtgaaataatttcccagatttggtgaaagacaaacgtacacatccaagaagctcaatgaaatccaagtgggataaactctaagaaattcacactgaaacacattatagtcaaattgtcaaaagacaaagacagagagagaatcttggaagcagcaagagagaaatgacacatagcatacataccaaggatttgcaataagtttaacagatgatttctcattagaaaccaaggaggccaaatggcagctgtaataataattacactttagaccaggcatggtggctcatgcctctaatcccagcactttgggaggccaaggtgggtgtatcacttgaggtcaggagttcaagatcagcctgaccaacatggtgaaaccccgtctctactaaaaatacaaaaattagctgggcatggtggcgggcacctgtaatcccagctaactcgggaggctgaggcaggagaattgcttgaacctgggaggcggaggttgcagtgagcagagattgcgccactgcactccagcctgagtgacagagggagactccatctcaaaataataataataataataataacactttaataataattgaagtgctgggaaaaaaactattaactaagaatcttatagccagcaaaactattcttcaagaataaaaaagaaattagacatttcagataaagaaaaccaaagggaattaattaccggcaggcctgccctataggaaatgctaaagggaaacattgaggctaaaatgaaaagacactaagtagtaattcaaagacatctgaagacataaaaatacactgttaaatgtcactatataggtaaatataacagcaaatattaatgtagtttttctttgtgattcttgttttcctgtatgatttaaaaggcaaatgcagaaaataataataagtttatgttagtgaggatataatgtataaaaacataatttgtgggaataacaatataaaggaagaaggatggagatatataggagtagagtgttcatgtactattggaactattattcaaactagcttcttataagtgtaagatgttaattgccatcctcaaggcaatcattaggaaaataactaaaaaatatgagaaaaggaaagtgacacaggattttttccttggtcactttgcaagccagggaccttggtgatgccctgcccaggcctcacttggccatgctacctgctgtgggagatggcccactaacccgtgctgcccagaccaagtctggcttgtgcactggttcccgagttcttgtaccacacccaagaaaaatgaggatacgctgacaatcaaagagggagcaaggtgagagtttcattgagtgatgaaaacagctttcagcagagaagggatacagaggtggtccccctacctgaagttggcaaagtgcccccaatgtggctgattccagggcttttatgggctcagaatgggggaggggcaggccataggtagtattggaaaaggcaacattcgattggttaaaagggattatttagagggcaggcaaacaggaatggaagttctcactctggatcatgggtttcatctgggaccagcagtccggtctttcagccttcaggctattttttggcttgaaggtggggtttcatgggggacaagcttctatctgccaggcatttggctgcctcctgccgctatcaaaaggagaaaataatcaaaatgtaacaacacagacacaaaatcaagaagtaaaaaaaaaaatccagtaatggaggaattgagaaacttaaaaatgtataagacacacagaaaaaaaatagctgagtggtagaagtaagtccttcctaatcagtaattattttatatataaatagattaaactccagttaaaaggcagatattggcagagtgaataaagagaacattatccacctatatgctatctacaagaggctcactttagatataaagatagaagaattttaaagtagaaggatggaagaagatattctatgaaaataacaaccaatatgagagttgtggtggctgtattatcagcccaaatagattttaagttaaaaaaaaaagtctcaagagacaaagaacattatatgttgataaaagttttcatccattaagaagatataaaaattataaagaacagaacaccaaaatacatgaaacaaaattttgcaacattgaagggagaaatagagttctacaatagtagttggagactttagtacactactttgttttttgtttttgtttttgttgtttctcgagacagagtcttgctctgttgcccaggctgcagtgcaatggtgcgatctcagctcactgcaacttctgcctcctgggttcaagtgattctcctgccttggcctcctgagtagctgggattacaggcgtgtgccaccatgtccagcaaattttttgtattttcagtagagacggagtttcaccatgttggccaggctggtctcaacctcctgacattgtgatccaccctcctcggcctcccaaagtgctgggattacaggtgtgagccaccgtgcccggccactactttgaataatggattaaacaactagacagaagatcaataaggaaagagaggactagaacaatactctaaaccaattagacctaacagacatatacagaacactctgtccaacaacagcagaatgtgcatttttctcaaatgtgcatggaaattctcaaggatattttagtcacaaaacaagtcttagtaaatgtaaaaaaattgaaatcatataaagtatctttttggatcacatgaaataaaactagaagagaataacagagggaaaactggaaaactcacagatatataaaatttaatcaagacacttttaaatgactctcaattgcagggagggggagagaaagaactcagattattaaaatcaggaatgaaaaaatgaaagagtgaacgttattactgactttagagaaaaaaaggactatgagagaatactatgaacaatttagtattgtttgttggcttacccaagttagataaaatggaactttaacttaggtaaacttggataacttagatgaaatagaaaaattccacacatgagctactacaactagctcaagaagaaacagaaaatctcattagactaataacaagtaaggaaatggaattagtactaaaaaacctcccaacaaagaaaatcccaggaccagatgtctacactggtaattctaccaaccatttaaagaagaattaacaccaattctctcaaattcttccaaaaaataaaagaggaagtaacacttcctgattgatctcatgaggccagcattgccttgatactgaaaccagacaaagatactacaagaagaaaaactacagagtaatatttcttgtgaatatagatgcaaaatcctcaacaaaataccagcaaataaaattcttcagtattaaaaaatttgtttttagtgatgaggtcttactttgttgctcaggctggagtgcagtggtgcaatcatggctcactgcagcctcaacctcctgggctcaaacaatcctcctgcctcagcctcctgagtagctaggactaaaggtgcacaaccaccacatcaagctaattttctttcttttcttttctttctttctttcttttcttttttttttttttgagacggagatttgctcttgttgcccaggctggagtgcaatggcatgatcttggctcgctgcaacctccgtctcccaggttcaagtgattttcctgcctcagcctcctgagtagctgggattacaggcatgtgccaccacgcctggctaattctgtattttcagtagagacggggtttttctatgttggtcaggctggtctagaactcccgacctcaggtgatctgcctgcctcggccacccaaagtgctgggattacaggcgtgagccaccatgcccagcggtaattttcaattttttgtagagatgggatcttgtttacttgcccaggctcttctaaaactcctgatttcaggtgatcctcccacaccagcctcccaaagtgttggaattacaggcatgagccatggcacttagcctcttcagcatatcttcaggttatggttatggattatacaccataaccaagtgaaatttatcccaggaacacaagaatagttcaacatgcaaaaattaatgtaatgtactacaataatggaataaaacaaagaaactacatggtcatattgattgatgcagaaaaagcatctgacaaaactcaacaccctgtcatcattgaaacaagaagaaaatttcctcaacatgataaatgtcatatatgaaaaccccatagctaacgtcatatttaatggcaaaagacttaaactttcttcctaagagaggagcaagacaagaatacccacttttgccacttcttttcaacatagtagtggagcaattagggaagacatttctaaccaaagcaattagggaagaaaaataaataaaaggtatccatactggaaagtgctatggaaagaatgtgtcccctcaaaattcatatattaaatctgctgtgtgatgatattaagaggtggggccttagaaggtgctaggtcatgagggtagagcccacataaaaagaaaaagagcccttataaaaagaataccggaggacaggcacggtggctcatgcctgtaatcccagcactttgggaggccaaggtgggcagatcacgaggtcaagagatcgagaccatcctggccaacatggtgaaaccctgtctctactaaaaatacaaaaagtagctggacatggtgatgggtacctgtaatcccagctactcaggaggctgaggcaggagaatcgtttgaaccagggagtcagaggttgcaatgagccgagattgtgccactgcactccagcctggtgacagagtgagactctgtctcaaaaaatcaaacaaaaacaacaaaacaaacaaacaaacaaaaaggaatcccagagagctaccttgccttttccaccatgtgaggacacagctagaaggtgccatgtatgaaccagaaagcaggccttcatcagacagtgaattagcttgggccttgatcttggacttctcagcctccaatttatggcattttgttacagcagcccaaatggactaagatagaaagaaggaaatagaactatctttatttcagatgacatgatcttatgtagataaccataaataatctcccaaaatatttgagctaatatctgagatcaaattgagctaataagctaattcagcaaagttgcagcacacaaatatcaacacacaaaaatcagggtttttttataccttagcaacaaataacccaaacaggaaattaagaaacaattacgtgaaattagggaacacttcacaccgtcatttaggaatccaggcttctactttatggctccacccactccctaaagcctcatcattatctgcagctagcctacggaaaggtgagaaagaacatgaagaagccaccctcttcttaggagcctacacctggaaatggaaatggtatatgttgctccactgaaattgcatggagacatctcactgcgagggaggctgagaactacagaacagctggccagctgttgctggcattgtcctcactgtggacaaagaggacatgggtttgggtctagagctagcaacctctgctatgttccctggattcctaaatgactgtgtggaggagaacctcccagctgatgaagaactgcacttgactattatatgggcaagaaatacaattctactatgtaactgtatttcacgttttgctgtattggttactgcagtgaagtgttccctagtaactactcagaatgatggtatcaatgaccaaaaatatgttggaaggggataccggatcactcattattcaatgtttcttgagaacctaatttgtgctcagtctgaagttagaaaagtgattagtttttagtttccaaggagcttaccatctagcagaagagacaaatgaacagctcaatacaaccagataccagcaaagctatgtctttggggacataaggagactgataggtttcgttttgttttgttttctgaaggcaaaagagcaggatttctttgatgcactagggggaactggccaagaagggaaggatattccagatagagaaaccagcaggacagtgtcaggggtgtttagagaaacacaaatatttgagtggctcatacttaaggcacaccaagggaacacctagcaaatgaggcgaggcagacgagaaataaacaacagaggggaaaccaaaatattctgtctgctcagaaagagaaaagtgctgctgtaaatggcatttgggccaaaggggaaatctgcattgcattacagaccatttataaatgaataaccatgaatgtacaaaatattaaaagtatggctaatagccaaagctgtctcagaggaacatttatgcccatgaaggcacttacta

SEQ ID NO: 27 - DNA, 72777 bp, Mus musculus
ccagtggagaaagctgtagtgactgcctgcaggaacaacaggaagagaacccggaaccttcagcagaaacacaggcagaggctggcagcagtggccctaatccagcagcaggacacaggtgacctgaaggccagagtcagccccaaggaggaaatacacagaggcagcatttcaaatgtctcctggcttggatagacgggatggggaaaccgtggcttctggaacattcacccctcgtgcttcagactctgcacccacctgagtttgtctcacacctgacatcccagccaatctagtccaacaacactcaccttctccagcaaggtgaaggccactctggaagggtattcgctgtcagcaatgaccacacctgccagactgtcgctccggacgtagacatggcaaagatactctacggagacaagagatctcacataagaggagggcttcagactgttgtcaacctgccaatgcatcataatgctggttcttgatttctagttcaaacagagccactctgaactattctgaatcttaaatgctctgagcgaggtctacgagaaggctctttaccacagttctatgggccacacccaggagctctgactatttaatatcctagatcccctgatagtatgtgtgtagcaggatctaaatgagctgccagggatgaaaaacacaccaaagacaatttccctaggagcaagtctagatcactgcccaggccaggtctggctacgtcttggcaatttatggccctccccggctccgtgctgttcctaaattgagggaataccagacaggacaagctgcttctcctttcttaaaataatcttgacagggtggctgagtagcagaaaatgacttcctagggcttcaaccccctgtaataagacaacacagtttgaccttctctagcctgtggtgggtggctggaggaactgtctagagaaagcccagatagccatggatgaggtctctggggttattgcactaaagctgccttatgattacagaggggatggtttgcagaaaagcctgaaaataatcataatccacaggactgttgatttccatcccttgaaaggattcagaaatgacatggctaaccgcatccccagaacagaagaaccttggatgagagcttacaaaaccaacctcttgtttatggagctgacccagaagattccaatgttaaacagaaagaaaaacaaaagaggaaaagagtgtaagtccctggaatccgagagaagcagagatcaacaaggacagagagggatgggaattaccatcttatttcatatacattcccaaataagaaggatccaaacatggagtcagtttccatggaaactaagaagcttgccagggtgagaaatggtccttatgggataaaactgtgaagggtagacagcaggaaggagagaacactgatagtcacgagtctttttcacttctatggtagtcacaggacagaaactcttcacagagaatatacagccagtatacagatcagtgatctatcatcaattcaggaactctatcctgaggccactgattaggacaggtcatctttgtttatgcttcaagaaattcatgtaagatcaaatttgtctgtgaagtgtatcagtctgaaataaatactccaacctgatatccaaaacctgaattatgaaataaaggaaagatcctgctgaaaaagaaagagagaaagaaaggaaggaaggaagaaagaaagaaagagagagagagagagagagagagagagagagagaaagagagaaagagaaagaaagaaaggaaggaaggaaggaaggaaggaaggaaggaaggaagaaagaaaacaaatgttaaggaacacagtattacctcagtgcaagctagaaccttcttctgaaggctctactctgggagggaacgcaggatgtgatggctgctgctggaccagagaatcagcgcctatcactattcggcctgccaggctggggcaggtggagagccagagtctaacgagcagtgagtgtaagctgtctaagtgcagttgcacatcagggtgcagcaagtgtggacttcaacatttggtttagtgctctttatggataggagaagcaaggcgaggacatgcggtagcagaggagcacaggcctgggagcagtcacacggcacgggcagcatgtgtgacagccaggccagcactcagaggggcgggagtcctcttaccttgttctttgacagaagctctgctgcctttccccgagcgttccacaatcagttgacttgtaaaggtcatgaattcctgcacactaggaaatataacacatatttacaaccttctttcggtcacactgtccccaacacagtggaaagtgacctccgaggttctcttggttttattcattccctcttaaccttagaaacagtattaaacccaatgtaaatgaacacgaaggtatataacaccattcatgtcacacttgcgtacaacaaaccagccaggttgtctgagaaatcttcaggctacagctatcttaacatttcactcaaaacatgatttggggtccagtgagatggctctttggataaaagcaccttctgtcaagccaggaaacctgagtttgatccctggaacccacatggtggaagaagagaagtgacccctacaggttgttctctgacttccataggcatctcatgatacactcgtacccacacacaagcacacagaaaataaaactgtgattgaaatcttaacatgtctgggttctagtgtcaaaacagaaagcacctcctgttcgaatttccaagaaccaggataaataaaatacactgctctagaaaaacactagtggtaaaaactgtcaggcagaaagaagcatgcctgctagtactatggccacaggacagatcctggctgggaatgtcacagacctactaggtgagagctagctcaggtctgctgaagccctggacactgtggaggaaatggaaagaaagcctagtcaaggtagaagtgggagtcactcatatgaagctgcaatagtggtttatcatgggcccaaagagaggtacaaatctgaccagaataaaagaatttatggtccagccagaggacaggtgagaaaccttcaactggagatgcatgatcaagggcagccaaggccatcagttcaaggttgatcattttttgagacggggtctatgtggccctggctgttctagaactctcacatagaccaggctgagattcacctgcctctgcctcccaagtgctgggactaaaggtgtgcactactgtgtccagcactacagtactcttaactacaatatctgaagacctagctctgagatttcaagtcttactaggtgtcacccaaattactgtgctgacctcgatagtaaaatcaagactggtgcgatagttatgagtgagttaatatacacaaagcaattgaaacactacctggcacataatacactactattattatcatgagggaatgacatgatgaaaatagtcaaaaatatttcctttttaattctcaagaaagcctttgcaataaaacaaaaaaagagctatctagagcaagatgacagtcgtgtgattgggactactactagtgcactaactgtgagagactttagtaatcacagtgacatgaaaggtaagactgcggggtctcactcaactggaacatgtgtctctctgcttcactgctagtcatctgacagtagataacatcagggtgtcaaagaatgagatgatagcattgtgaagctctgagaatcctccatataaacagagagagagaaaaacggaaagatccagagccaagttggcaccacaggttccatcccagaagaagaacaccaagcacagagcaggggccagggcacacagaggagaggagcaggaagagcaaacggagccagagatgactcaacaattccaccttcaggggtgcacaccacagcaaattgtaagctgtgtctctgtgtatctgagcatccacgtgccatctgtgtgcagctgcatgtgtacgcagggagtctttcctcaggagccatccacctttgttaggatgaagttggttatgcgctcacagagtaggcttgagcagggggccagtcatcgcgccatgatccccagcgggtcagtcatcaggcgccatgatccccagcgggtcagtcatcaggcgccatgatccccagcaggtcagtcatcaggcgccatgatccccagcgggtcagtcatcaggcgccatgatccccagcgggtcagtcatcaggcgccatgatccccagcgggtcagtcatcaggccctgagccccatcaccttgtctctgtttccctagctttgaaagtacaagcatgtgtcaggacacccagaggttggttggttggtttgtttgtttttccttttgatgtatttgggatcaaacccaggcccctcatgcagcaagcagtctcctgaatgaactatttctccactcaagctaccttccaaccccttggcaaacactattcacataactataatccacagcaactcatgtccatcagcggatggatacataaacaaaacatagtgtttacataaaactcaatactgtatatattttaaaggggagaaaaatttggtatctgcagaaacataggtcaaccttggggtcattctgcttagtaaaatcagtgggacacaaaaagccaactactatatatcccacttatatgaagtcattagaaccatcaaaagctgagacacaacctgaacaagcagatttccccagacgttgagtcaagatgaccacaggtcctaccctgttgggcccttttccttttgtgtctgagtcactcccacaagactgggtatctgtgcagcttacaattaaagcaccccacaatcctttacatgcctacaagcaatacaaatccagtggttcctgcctagctaccagtgtggacccttcctgataatcaaggcccaaacactaaaaagaatgagtttgacccctgactcccaatccttgaggaatcaacgattttactcataaaagaaacacctccatacagaacttctggaaagagctttgaccagcgactttcacaaactgtgggctgcaacccctttggcaaacctcaatctccaaaaatacatatgcataacagtagcaaaattacagttatgaagtagccacgaaaataattttatggttgggggtgggagggttccctcaacatgagaaacggtactaaagggtcgcagcgcaaggaaggtgagaaccactggcaacgacgaaatacaaaggttaagacaccaaacactggttaaatcacagggtgcgaggcgtagtcaacatacttatttctgagtccggagatcccagatcagaacagttggcagcgcgtctgtaatcaatggccttccaatctttctacaactgggcaataccgcgtagggcagagccctttcccagggttgctaacgactcctcaggtacagcctgccgcccgagggaggccaaagccgtgctcgcccttcgagagactcgactccctggactccgggtccagccacccgggcccggcccacttacctggacctctggaagaaactaaaggaagacacgtcgtacgcggccttgagcagcaccgctttcggatcgcctttgtaaaggacactaaggctgtacagcttcatggcgccgcaccttcgggccgccggctgagccccagacccgctcccaggagcgcggccacagtccctcagaacagcggcggccgcctcctgacggggcccggccggcttcttcctcctagagtaaggcccacttccggttccggtggcgagttgctccagccgctcctcggaggcccgaaggcagggtacgcgcgtgcgcggacgggtagctaagcggcggggcgcgcccgcgtccgcccgggtcggcgccaggaggctcggtctccgcctgcgtggcagtgccttggcgcaggttcccttccgggctgtcgcgcggaccctggctgccggtggggagtgctgtgccgtaccatcgctcttttttccccattctgctagaaaaacaacccgtagctgtccccactctatacttttgttgcattctatgtgtaacagcaccaggctacccaacctcttccctgggtgtcccaagtacagacgactaaaagaaaggcccttcatcctttctcttgcaataataaaaatcagaaacgtcactggctatggccactcagcttggacacacttgttcgacaagccaggcggccagaggtgtcagctatattcacctgcactgacaccatggctccacaggcggcagacggagaaccatttctgaagaaagcctctttatccaaagttgtacaaaattaccaggatagtgaccttgcagaaagagatgtggattaagaaaattgatagcaagaagcagaccttgggcttccaatgtgaacagcaaaatgcttatcaaactcccttacagccactcttggcacctcttcctgcttttctctgactttacccagcctcccttggtcccaggaagtctcatctagagatatgcgaactccccaagccaagcttgttaatcaatttcaaatgacattgttttcccctgcgtttccccagctgttatccagcctgaattcggtcccagtacttccgcaccgcaaaagttaccccccccccccaatctgttggactcaaaaaataccttttttgtagacatgttggtaaaagtgataaactatcaaattccaagtcctgctcattgcagatgtttaacaatgacgacgatggttatttgcaccattacgttaaatgacagaaagaaagaaagaaagaaagaaagaaagaaagaaagaaagaaagaaagaggaagcaagcctcatgagaggccgaaggtgcccttgaggctgttagaagcagagctttaaagggaggctaaaatctgagcaaggtctacagattagataagagcactatatctttatttccagctttcagtcactgactgccctgaccttataagagaagtctctggtgcatgcatgcatgcacactaacacacagtaacataaatagatgaacactatgtatacaacttactccgaagaggtcatatgcatacatacctacatgtaagtatatctacatctatatatatctatgaacacatatatatgtttctatacatgcttgtatatgaacatattatacatgtattaaagttctctaaaggaacagaattgataggacatatatattaagagaggacttattagattggcttcaggatgctgtgtgtgtaagtagtccaacagtggctgtctcacactggagaagcatagagtctggtatttaagcaaaccacaagactggatgtcttagcaaacttaatcttgtgctgaaagtctggttgattcctagagagattggtcttcagcctacatttgaatccctaaattggtttaggtgtagaaatactgcggtggcagggtaggtgacctagccagggaaggcaaaagcaagcaagcgacaagccaagtttccttcttccacatccttccatatgaattaccaccaggaggtgcttgctgcccagagttaaggtgggtcttcccgctgcctttaatctgctcaagcaaagcgctcacaggactgcccagcagttgattccagatgcggtcaagttcaaaagcaaggttattcatcacgatgccaaagacagagcaaatgcggggaaaaaaagaaaaaaagaaaaaagattaagtgatgcagatggagagcgtccagaaatttctgtccttgttcaagaaacctgaaagtatggggagagaaaagcttgcaaaaataattcattgacaagacaagcatagcatcactggtgtgggatggtggagctcttatgtccagcctccccgagtcctgagatgtcaaagaaaagcccttttgcagagcaggagagatggctcagtgggtaaaggcatctgctgccgtgcctgatgacctaagttcgatcctctggccccaatggtggaaggagagatccaagtcccacgtgcacacatgcacacaataacatacacgtcagccccctgaatactcattcatatgcatgcatgcacactaacacacagtaataatgttatagatgatatatatatttataattaaaatgttaagggttttttttttcatgagtgttactctacgttgtacccgaggaggccagtagagggcgtcagatacttagattcctggaattagagttccacatggttattagctgccatgtaggtgttgggaaccaagcatagaatctgtaagagcagctagtgctcttaaccaccaaggcatctctctagatcctagtttttaaaaagcttctttgaaaacatatttgtaataacagtgtccatgatgaaagacccaggtcctatgactttgcccagtagatacagcaaacacctacctgcctctgaagctttgccatgctcacaagaggtgttcatcccagctacacagcagagcccctaagaaatcaagacggtattgaaagggattgcctgggtagtcagatttctatgagaccagttatcaagctttaggtgtgtgaatatctactttggtgctagggccttggtcatactaagtaagtttccccttcactggggtgtaccagtttaccctggactgtctaagcaacaagaaggatagacatggcctaccacagatttcatgtctgccactggctatgtcagaacatgtaggagcttttggaatcagtgaaacaggtattttcagactgccttccctgcgtggggctttcccgaagccatatttttcctagagtcagcctttcccagctgaggacaagctgtactggacagatgccagccacttgaactgggaatacatggtcatttaggcagctggcttatctcatccatggtacttgatggcttcgggtcagcacctcacagaaagttcagacgggaggcttccgagaaaacagagaagcaggcaggagatcctgcaggcaatcctcctgctccacagcctgcatggacttccctcagccttagtgcgtgtgggtcccatctgagaacattggttatatgttattttcaaaccgatctgcctttaaggagtggaagaaaaaaactgtggtgtttgggctacctttatgataatggccttttcatcctcctaataaatattgccaagtagggtagattctatacgaatgctcttaacccatggtattagcaaatcatgtaggtgctaataatgaatactggatgcagtcagtacagggatataaaatggaatgtaagagcctgttgctatgaatggttagctaactagatgttgtacaagaaatgttgacgttatgacgtgtggaaacttggtattgaagatgtggactcgaaactttgtggattttttgatgccatgataaaaatgtgaagaatactgttccttaccaaaaagaagaagaagaaggagaaggaggaggaagaggaggaggaggaagaagagggggaggaagaagaagagaaggaggaggaagaggaggaggaggaagaagaggaggaggaggaagaagaagagaaggaggaggactaggaggaggaggagaagaaggagaaggggaaggagagagtagccagaacatttggggtgccatcagaataccagatactccagacatagtcacagaaggactggtttgtttgttaaataggtgctttgaaaagtttgtggggaaacctgcagtgagattgtgtgtcttagaaatgataggcaagattcatccacaagaatgcgacaagatggctgcctgaacaagccctgaacattaacagcaccagtagacctgcttacacggaagaaagcaatctcataggccctcaccccaaacaaagactacagacagcagaggaactggagagcaggagaaattgggtctcccttttatgagccccctaactggttgtcaaatactcaatggtcagccctgaaatcatatgcacaaagtaatactagcgcaactgaacagattgtagctgtgtgtgtgtgtgtaatgataacaaagaagaaaaggccccatgttagagagggagcaaggtgggcatggaggtatggaaggagttggaaggaggggtgagaaggggaaagtgatgtaattatcttttaatttataaaaaaataaaaaatgggctggtgagatggctcagtgggtaagagcacccgactgctcttccgaaggtctggagttcaaatcccagcaaccacatggtggctcacaaccatccgtaacgagatctggcgccctcttctggagtgtctgaagacagctacagtgtacttacatataataaataaataaatcttttaaaaaaaataaaaaataaaatattagaataaaatgtagaggaatatttttaatttaacaacttgggtgtggcaaaagctttcttcaacaaaaacttaatccctcagataagaaaagactagaatccacgacgtggatagatacttctgtatgatgcaagacactatttatcaggttgtaacttgagcagaacttgagttgtaacttgttgggaaacacaacacccttggcaaacaaaagattactagatattttagatgaaatataaaaatactttccacaactgataggtaggaaacagttcaatagtaatataattattgaacaaataatccttaaaagaagaaatccagaggaatagcaagttaggggaagagagggtgtgtgtgtgtgtgtgtgcgcgcacatttatagccaaaatagatgatatacttaaatgaacatgccattataaaacccattattttgcatacagtttacatatgctaatgaatacttaaaaaaaaaacattgggattggagagaaatggctcagtggttaagagttcaattcccagcaaccacatgatggctcacaaccatctgtaatgggatctgatgccttcttctggtatgtctgaagaaagtgacagtgtacttataattataaataaataaatctttaaccaaaaaacccccataatttcaacaacagatatgtcctggtctgaggcttccaggcatagaaatagaaacacacagagtgtggagccagtgcggttcaggtccgccattccagttcaggcttcagaccaagagaaagggaaaagaagagacaagcaacaagaagcttcctccaggctggcagccaagcatgcctttcctgttcttttggttctcagatatagagggctctgctccttagtgtgataggcaccaaggcactgacctgggaactaagcaggtggtaatgtctaccaagctggcagtcactgtggtgacagggtgacagagtggtcaccatggtgacaggagtagagaggcctttggcaatcagtcccagttttctgcatggtggctctaatgagacaatggtcaccatagaaaccacaggccctcccaggagcacagaggccctgacaggagacatctactccacacctggttggaacagaagcaccgactgtgactgagcccagagaagaaagctgaggcgtgagggacagagagttacctgttgcctcattactcaaaagccatccccaagccactggagggagagaccttttgtgctgagtccgtctagaggccaccagttcctcacagctcagcagagctggaagaaagtcagtcaacactgaggaaccacatggctcctcctgaagaccgctgggcctgaagaggccttggtggggaggggtccagaagtgaacaatgaaaaagaggaagctgtggcttcaaccagcctgaggtggacggcagagctctctgaggtccggggctggctgtgactctgtgggggaagtctgggctacttctgctttggaaagctgctgcggaacactgaggggtcccagctcacctgggctggcggctgggcagatgctggatgacagagccaggatggaggccaccaagaaggaaaaggtagctacctcatgaagcattttagaagtatctgtttgcatgtccccaacactcacagggttggctgccacctataagtgtctatgcctcagaatttgcttttatctttaagaaagatgtggctgggggcacttgtcgggcagaaagatctctacttcctggactggtgttgaaatctagcagtggagctgttcagaggtgtgggtagcaatctgtggagagactctgaggtggtgatggtggtggggatcagagatcctattgaggtatttgggtgactgaagcattagtggctcaaacctactgcctgattttgagaatatactgaacagctacagcaagccaaaggtggcctcctccccctcctcccctccccgttcccctcccccacccctctcccttctcctccccgctcctggaaggaagcacttcacaggggccttgagggttgctgctccataataagaatcatagggcagtctccttcccaacaactgagttccagatgtcagcgctggccctgggctgagcagcgagcaaggagagagatgaggacaggacattggctgggaagcatgaacgaagagcacactcatctctcccgttctggagtgagcaggattcagtcattttgggcacatttcccccctggcttgtctcctctttgtgtgaaacggcaaggtcagcataaacaccctctagcctgcttctgacagagctaatgatgttaggagacaaaacagccagagctagcccacatgacacaggcagggacaggccaggacctaaccaagtcccacatgtgcctgctacgggtgcttcggttcagctaagctgggccaagcaaggaccactttataccatctggggagaaggaagctggtgtctagcacaaggtagctggagacagaaaaggggggtttgttcaaactgggaaagaaagtgtggagtgcctgcatctgtgttccctcgcttccaggtagggattactgtctgcaagaaaggcatggcctccacttgatgtctgggccttgcctgctagaagggagatgggccttttcttatacatgccttctgttttattttattttatttcttcctttcctcttcagagaactgcagggtcacctctccttgtaagctgctctctattccctgccttctcagggctcctttgggagccctaaggagagtctaaagcacacacacgggtgtgtttgtctgtctagtgtgtacataggggcccctggcttggccaagatgggcccaggtggactctaagtcgctaacggagcaggaagctgccggaaggactggagtcagaagggttaaatgaactcccgcatttcctccccagccccatcagcttcctggctcttgttcttaattccataggctgcgtgtattcaaacctatagccctgtagcctctgctactgatttgctacagctcgatcctgcccaatggagtcttgagcagccacaagccagatctgtgcttctctcttacttcccagtatgtctgtctctgagggaggtgatgtctggacctcggagggcagacaggccaggctgagtctggaggttgttgcttgacttctttgggcctatgattgatcactaattgattagaacagtgctgtttacttccaccagctgctgagaggaggaaggagaactgcctgtcaaaatggtcagctgctgggctgatagcctctctgggcagatggatagacacgctagaaatgcaggcaccaagctcaccagacctataggtcatcccatgtgtaatgagaggtgttgctaccaggacaaactgtcacaaacctaagagcttaaaacaacacacacttaggttacagttctagaatctaaaatggatctctgagggttaaaataaaggtgttgacagactgaccccttctgggtaccgtagaagaagccatttcctttcctgtcaagcttctccgcccagccaaactcctgggtacctgcatccttcctcctatattcaatgatggcctctgcacctccctcatctatgcttgaccatcacataatctctgtctctcctgcccacttctgatagcatcggcccgaacagataatccagaaccatctcgagtcactagctaagtcacatctgaaaagcctttcttaccacatccgattctcaggcccccagggctgggacatctgtaggtcatgaccctgcctcttatactgtcctgtctcccaccttaagatcctccttcaaccacaagctcttccctgactcgacctgtggtcctgttgcccttacacattattagcttcccggatctgagaacattctcttgtcagcaacagtacggccaagtctgtgccacgccccctcccgcagtgtcggtttacaatctcattcacctgtggccaactgcagtccaaagatattatgcagaaaactccataaacaagttaataataaggttcaaagatttactttttacttttaattgggtacttatgtatatctgtgtctgggaatgtgcacacatgagtcctagccggcagagtctagactcggatcccctggagctgcagttgtgagccatccgatctgggtgctgggaacagaactctgatcctttgcaagagcaatatgtactcttaagtgttgagccatctctccagccccccaaataagcttaaaattgtatgttgttctgtgtagtaagatgaaacacctcacatccctcttttgtaagtcatactttctcaagtgtatccactatttactggacagtagtgcacagtatatggtgtattcacttcctgcccagtagccatttagaagctgtctgtattatcaggttgattgacaatatcaaaacttcgtgttcagccaggcgtggtggcgcacgcctttaatcccagcactcgggaggcagaggcaggaggatttctgagtttgagtccagcctggtctacagagtgagttccaggacagccagggctacacagagaaaccctgtctcaaaaaaccaaaaacaaaacaaaacaaaacaaaaacaaaaaccaaaaaaaaaaacaaaaacaaaaaaacccctcatgttcaagtaacgtctgtgcagtagcctaactgccccatgatgcctagcggcacctgctagctccatctcatgatacaggcactcatcacctcccctcacaggagaagtgaggcacagcagagccgtatattttaaaagaactcttatcatggaatattgttataattactctgctttgttattattactgttaatctcttactatgccaaatttctaaattaaagttcatcataggtatgagtatatgggaaaaacattggataagtggggtcctttgtctcccagatcttcaagcatccaccgagggtcttggaatgcatcccccgcaaggagtacagcggtttttgttgttgctttgttttgtttttgtttggttctttggggatttttgagacagggtttctctgtgtagccctggctgtcctggaactcactctgaagaccaggctggccttgaactcagaaatccacctgcctctgcctccctagtgctgggactaaaggtgtgctccacctctacccatcacaacacagagttttaatgaaattcttatatttaaatataaagtaaagcacgtggaggatggaattaaggataaaggaacatggcaggttgtgctcagacctgtcctaggtcacagcttttgccattcatacaaaagtcccgtgtgtggcccagtgaggctcaaactgggtgtgtgagaagagggtgctctcgcctgggcgggtgtttggtatgcgggccaacaggatgcacgtccatggccttcctgtccagtgctgcctttctgagaagtttgcatgggggaaggttcagcaggaaggcacattgtcccttggttgtttgtcctatgagggctctgaagtagaaaataaataccttcaggatgtatggagtcttacagctcctgaatacaggagaaagatctactgatgcagaatccatggagacaggagtcaactgcctgccacctggcctgctctcatgagcagtcttggcatttgactctttgtgtgtgccatggattctcagtgttcttccatggccagtgagggagcctcgagttgaaggaaaaatacgtcatcataggcagatggccaggactgctctggtactgactcattgggtcataaaagcagaacctggggtgagcacttggtatctgtggtttaggagtccctctgaggcaggcccagccttttgcactcctatacccaccagccactggggggccctgcaaaggccagggcttccagacttggtaaacaaaaaattaggacatccagttaggtttgcatttcatataaacaacaaatggttcattatgcaccccaagtagcccatgggcactctattttctttgccacacttaaggaaagagcaactccctcaagttgtcctgggtgcgctgattacatctggggagtgagtctcaggagtgagtgtatctgtgagctgtggccatccctgagccttagggaggggccattgcccagcagacaccactgtatccacagaaacatttacaatggctgagatgattattcatacatacaaacatgcccattatagaccttatcaagtgttaagtaattaggagggtgatttttaaaatgttttatgtcatgtgtaaatatttagtgacctgctttacccagagagcgtttggtgatagttcctgggtgggcactgtactttctcttacgttaacactggagtaatcctaccatcagtaaattagctcccagcacatttttaaactggctgcaaagggggctaaatggatgtctcagttagtaaagttcttgctgagaaaccatgagaattccagtctgcaaccccggcacccaaataaaagcagagcatggtgccttacacctgagatcccagagctgagaagctgcagacaagaggatacctggggctaactgacaagttgatttagccaaataggcaaactctagactcagtgagaaaccttgtctcaaagaataaggtggcaaagccagtgagatggctcagtagagaatggaatttgctgacaggtctcatgacctgagtttgatccccaaagcctatgtgatagaaggagggaactgactcctgaaagttgttctcagtctcaggcatgctgtggcatgtatacacacacacatacacacacaaacacacacacacacacacacacacacatacatacacacaccacacacacaaacacacaccccacacaccacacacacacacacacacaccacacacacacacacacacacacacacacacacacacacacacactttcttttttctgagtcagtgtttctctgtatagccttggctgtcctggaactcactctgtagaccaggctggcctcaaactcagagatccacctgcttctgcctcctgagtgctgggattgaaggtgtgtccaccaccacccagctctacaacatcttttaaatggctgcaaaaatcctgagcatccaggaagtctaagaggccaccttggctgagattgtctggagaaagtcagcaggtagagcagatagcttcttcaacacatttaggtgaggcacagcccactccgttaagccatctgggagaacttcagcctcttggaagtgggcagagtgacttcagacttccatggatctggaggactggatgtctaggaaattcttggcttgggggcagcttggtagagaaagcaaatcttgggctaggagaaggggttctgtgagcagatcttgggggcttagggaggagcttgttgtggtattatgggaaatgtcctccctaggctatgtttgaactcctggtcgccagtggtggcactgtttgggaaggttgtggaacctttaggaggtggcgcttctgtgaagtgggtcactggagtgggctttgtcctgtttcctgtttactctctgattcctgaatgtggatacaatgtgaccagccagcctccagtttctgtctcgatactatcccagccttgtcttcccaccaggaaggactgtatcctcttgggactgcaagccaagataagcctttctccatgaatcagcttttgtcggggcaattttatctcaacaagagtaactcagagctagcactcactgctgagccccctccccgctgtctggtcaagagtaactcagagctagcactcactgctgagcccctccccgctgtctggtcggagcgtttataatgcagaaggaacagagcaaaagcctccccttaggcctttttccaggaaggctacttgtctgccctcttctgcataacactggggttccatctcctttcagggtgcctcctttcctgcctcactagagctcctgacctcttccctcctggttcactcagggtcaccgctgatgcccacttcatcttgttttcattctcttagacatcatctccctggagcctatgacttgttaatgccgctctgcccattaggggtgttgtgctgttccagatacccaattaaactgagcacatctgaaggtttgtcgtgttacccggccaacagcctagaggcccgtggttttcagcctcagaaaggctcagcttggctttcctgattctcttgaaccttcgctcatggctgccagatgtgccacaagtgttgcaggcacaaacaaatcaagcaccccagaagcaaacatgtatggtggctcaccatttcatggctccagagattgacctggccagggtagagaggaactaaagaaaagacacacacgtggacatagagaaaagctgggatcggtgttctgggatgatgaatggagaagcctcagcatatcggagcgcagtgtatatagttaagcatggagctagagttacggcacatagatgaacaagaaggcaggttcagctaatctgagtaggagcagtctcaagaggggagcagtctcaagaggggagcagtctcaagaggggagcagtcttcatatgataaatttccgggcgggggggaagctatagtggatattttctgcacaaactatcagtatccacatatggaccagaggaataccgccattgctctgggcctttcccagtgaaggcttttctgatccaatgagacactggggctgagacactagggtctttgacatagcaacaacatgcatccactcagtacttcattccatccctacaggaagaggcttctgtcaccacatctcccagatacagaaaggtctagaaagcaattcagcagatacagacgggaaggacaaaccacacaggtttgtgcccaatgctgggtaccagaaaccagttgcaggcacatctccaggttgcaacagcccctgatggcagagccattgctgagcactgggtactcgcaatgggccaggcctggggatctggacctgcaggaggtacagcatcctgccccctggctctgtctcacgaaattcaaagactataaccctaaacaaagagagcaatgtgtgggctccaacagtgacagacaccatctgatatttgggctaagacctcagatgaaggcaaagaggagctttctcctgctgggggcattgttttcaggaaacttactctcccattcagtagaacccacctgagttcaaggaaactttggctctcttgtttagaggtcttgtagggctcagatcgccttggtcccataaaaacaaaaaatcctgtgtgaatggcaagatttatcttctaatccctgtgaagtgctgtcaaatggtctgtcatcagatccctatttgatagaaattggcagcagttttgaaggtatggattgctcctggaagaaagctagaaagagtcccttaccagctccaaagcatccatcccttggcctccatcacagtatcagagctgggatgacagcttccatggtcctagatgcccaaaagtcttcccaggggacctcactgtacctgtgtctagcatcatcctctgctcttccttctaaatgtacactatcacaaaaatgaaaccctcttctgtgagccaggtgtggtgattgatgcccacaggtaaccctaacacttgggaagtgggaacaggggcctcagaggttcaaggccagcatcagccccatagtgagacctcaactcaaaaactcaaaaccaaaacataaaagccatctttttaggtacactttggtgaatttggtcaaatgtaagcaccaacgtcaagactcctgccattgagctgggcagtggtaatgcacgcctttaatcccaaaactggaaagacagaggaatcttactgagttcgaggccagcctggtctacagagtgagttccaggacagccagggctacaaagagaaaccttatctcaaaaaacagaagactattcccatcactccaagaggcccctccattgcctcctcaatgacagtcacccttgctgctccagtcctgggaaatctccgtctgtttcctcctcctgtagatttgccttttccaggacgtctgtaaacaggacagtctgatgcatctgactctttccttacaggaagctttgctgtcagcagctgggttgttcccagccttggctgtcatgtgtaacgcgtcagtggacattctagcacacgtctttgcatgggtgaccatttggggagcagtgggagatgtgtggaatgacatcgtgtaggactttagcctcagaagaagcccaagctctttcccagagcagaggaggcctctgcctttcccaggacagggtcagggggctcagttgatgcacgcccctcccactccccagtttctgctcatgttcatgttttaaatgggagccatcctgggactctgcagtggcgtgtcagtgtgaccttatgtatcttttgactaatgatggtatgtgtatgttttgacatctgtattggacatcctttggagacattttcttttaaaataggggtgttgtcatcttattatgttggcaaggctctttatgtcttctagcctcagtcattttaccaggtgtgtatttgataagttgagtgggtctacatggatcctgagggcaagagtccacatctgtttccatgaactgtgtccacacctcctatgccccatccccccatctctccccactctcctgattcctgctgtgtgatatcccatccccagcatctctccccatccccctgactcctgctgtgtgatatcccatccccaacatctctccccattcccctgactcctattgtgtgatatcccatccctagcatctctccccatccccctcactcctgttgtgtgatatcccatccccctgactcctgctgtgtgatatcccatccccagcatctctccccatctccctggctcctgctgtgtgatatcccagttcatttgtccctcctcaaagatttatttcttttggttttctgatacatggtttctctgtgtagctctggttgtcctgaaactcactctgtagaccaggctgcacagccacctgcctccagatcttgtaggcaggcctgtcttcaattctgggtcctggtaaagaccttccagggagaaacactctaagttggggtctcacattccccactccttctagtaatagttctaatcttagaactaagaaaattaaacctctggcccagctgtcaaacaaagccaacatgaggtctcaactttaggatttgtaacattgagagcctcagaagccccttgaatgagactagagagtctctcgtcagtggtaggagggagggaggaggttcctgtgcagtgcctggtgagtgtgagcagggctgggccagtgggcctcggcaggtccaggagggggagcagcagggcttgtcagaagcaccaggtagggtccttttcatctgggttcaaggttgctggaacggtggcgccagaccaggacaggatctcctatttgaaatttatgtggcaccgcggtggttcctggttcatacgttttttattttttcagcaattcccaggcgtcttttctgaccagttctagggccttcaagcgagctagcaggggctgggaaaaaggaacatcagggtcaaacattccccctgcttctgttaaggggggcggtcccccacggaggagttcaaagggtgtaagtttaaatttccctaggttgttccatactcggaacaaggcaaaaggaaggagagctgtccaatctttccaccggtctctaaagccaatttagtcaaggtttcttttaatgttctattcatccgctctctctacctgtcctgaactctggggtctataagcacaatgtaacttccaatcgatccccaattgtctggctaacccttgacttacctgggcaatgaaggaggggccattgtctaaggaaagtaccttagggatgccaaatcttgggaaattttcctctaatatcttctttgccatgacattggcggtctccttcttagtgaggaaggcttcgacccaccctgaaaaagtgtctataaaaactaatagatatttattaccatacttggctggtttaacttcagtaaaatttacttctcagtatgcccctggccggtcacctcttagccgccttctgggggcgttcttgtggtgagttcttaacaatttctttgagctttttagttctcaagtgtgtgagccggtgtagattggctacatattgttgcccttctttggtgggcaggaccgagcgaccatcttgggttttagccaccctctggggagtatacccacatatctcagctattttgcctattagttcttgatcttctggagtgtagtcaaagcctgcgtctttgagttcatagtggtccttaagttctttatttttctctctagctatgaggatcatagctcctttggccgcctgtttggcagccaggtcagccatctgacttttcttcgctatgacatcatggcctttatggtgactctagggcattgtatgatggccagttttttggggttttttttgtttgtttgtttttttggcaagtgtatggcttctaataggctcaagattcttgagcgcgcccaactggccaggaagaacgacgctacaacaggatccttctgcacatgtttattcagtcctgtttcttcttgtttatatctcccttctttatatctcccttgtttatgtctcccctttttatatctctccctcgtttatatctcccaataataacaatcctctctcgaataataatcctcctctaacccgggcctctcactcttttatactctcagttcccatccacgcacagcaggccacaccacctcaccaggcacgcagcttcagctaatcagggcagcaggggcatatctccatcaaaatggagtcaccagtatcctggtacacctgcgcagctctcaagatgtttgtggcttatattcaggtgtatgaggaagtcaggtgcaaatcatatgacttagctgcagtccctagcgcctttgggactgccgccacacccgctcctcacatctcccccttttttcttttttggcagagagaatgtctgtagatagccccccgcagccatgccccttacccgtcctgggagacaaacagcattggtttgatccctgtcttaggttggtgacatgcccagggagtcttatcactgactacctctctatcatgccaagccacacctggggagattgtgttttgcttgcggcaggtgcatcaaaaggccaggatgttgattaatctatggccagatcttagttgctgcaagcaagcctcatgggtgaaggtagaggtctgatccccagtgtgcaagcataggggccctacacaaaaccatcccttgggctcatcacccagagaggtcttggccagctcccgtgtcgtttttcctgggggaagagaactaggacactgaaccttcatgcaatcagacatgccttccacaggatgccaacagcaagctatcctctgtgcagtgcttagcctcgcaacccacggcataacacagcataatttcttttagagcagcaaaccgaatctgaggagattgtcctgcctccactgcagcaaaagcctacgctaccatggcgaaagtgcaggacccgcacactctgcacctaacacatgtgccaaacacacaacacacacacactataacaagcatacatcccagggctctcatccccactcatcttccctgaagcaagggatagatagccagagggactatctctttaaggggaattcagggatcaaaaacggcatggaaaaaatttgaacgtcatgttgagctggtatcggcttctggaacaccgaaaggatctcccatctcggctccatcgtttgtgcttgtgggaccatccaccacatccacaggggcaattggatcaggagcctcattcttgcagcgtctcaccaacctctccggcacccaaagaggttccgtctaatcctgtggaaacacacaaacagaccctctcacccacgtcaacacctgatctggtagatccccagggagatggatacaatacctcgtggtgatgagacgataacctcaatcacctgtgtgtccatctggggagtcattacgagagtcaagttttcactagcttcccctctgttgggcaatgatttccacacccttatagcaatctgattcacctgctcaaacacctgcagtggatatcctgtctgttgttgtgcaaatcgaccttgaccaagcagcatatccctatcccatgctggatttcctgcaacagcattagcagctgcctgttcatttgcaaattcaataaggaaggctttccaatctatatactgcccaggtgaaaggcatgccttcactaagcctgcccaatcggacagcgtcatgcagtgtctattcaaggcctccacttgagccacagtataggaggcagttaagctgtacgtctgcacagactcagcaaagttcctgattactttgaaatctagaggctcatgatatctctgccctgcttggttggtgaaaataggacatcccagcaaggagaatctaacctctctccaaatctctggacagaaggtccgcctataggtggctgctgaggaggcatagggaggaggcgcaaaagctaattcgccttcctcctccacctctactcttttattttgtcctttctgtccacctgataacactgtgtctcctttctttttcctttttctttttaagcccttctcctcttccgacatactttcttgttgctccataagaattttctgacctgtcttgactgcctctcgattcaaacagtaacagagtccatatatcagaacaaacaagaccaaaactatcacacctacccacaaagggtcaatgggagaaaaaagcataactacacagtgaggatctattgatcactacactgaggttatcatagttccttaatctatcccgaaaccgtgaaccttaacttgtcccaaagccaggaaccttaacttgtccccatagtttcacttttactttgtgcctgcttcctggcaactttatattcgcctctattttatccgaggtcctttccaaactcctggggtcgtaaatttcactcaccatgaacttaccctgcctgcaaccactgactgctgaaagttctgaactcggtgggggagtcggttccccgtacgggccaccaattgtcgcgtccgctctcgaccagcaagaacgacacgaccaccagtccttctaacaacagtttattcagtcttcatctttcttctttctcttcatcagtaccgttccccagctgaagagttttgaatccacgccggatccttctcaacagtctgttttacgggaacctttattaaccactccttccccgtgatgcagttctgaatcctccctgtagcagggggtcttcactcgtgcctgaagatgtttcttgtcccgggtttcggcaccacttcttgcgcgtgcccaactggccaggaagaacgacgctgcaacaggatccttctgcacacgtttattcagtcctgtttcttcttgtttatatctcccttgtttatgtctcccctgtttgtatctctccctcgtttatatctcccaataataacaatcctctctcgaataataatcctccctctaacccgggcctctcactcttttatactctcagttcccatccacgcacagcaggccacaccacctcaccaggcacgcagcttcagctaatcagggcagcaggggcatatctccatcaaaatggagtcaccagtatcctggtacacctgcgcagctctcaagatgtttgtggcttatactcaggtgtatgaggaagtcaggtgcaaatcatatgacttagctgcagtccctggcacctttgggactgctgccacacccgctcctcacacaagatttcttcttcatttttaatatctttcccagcaaatgtgagtagccgctttggtctatagattgccccatgtatgtgaatggcagcgaaagcatacctgctgtctgtgtagatattgatgttcttctcttctgccagctgcaaggcttgggtgagtgcgattagctctgttctctgggctgtcgtcccttcaggcaagttgctggcctaggtggtttgttttccgttgaccactgttgactccgcttttcacttaccttcaaccaaaaagctcctatcatccgtgtaccagttgggacatcctgtatcatccttgccatggctggtcagtgaggtctttcttagttccggtttcttctgccaggatgtccatacactggtgcactggtagggagtcgtcggcttccggcagcaaggtggcaggattcaggacagcagggggtgcaaactgcactctctcagtcagtaagaggctctgataatgggtcatgagagcattagtcatctagcaatcagacggttgtctaacgatactttctaaggcatgagggggctactactatagttcgttgacctagagtcagtttgtcagcatctttgagaagtagtgccacagcagcgatagcttctaagcaagatggccatccactggccactgggtctaatttttttacaagtaggccacaggtcgttttcatggccttagagcttgggtcaggacccctctcgctattcctgctctttcgtctacatagagtgaaaggcttggtcaggtccggcagggctagggctggtgcactaagcaaggcttttttaatctctttaaaggccttctagtgtatgggggtccatgagaaagtctcagtctctttagtaagggggtagagtggggatgccagggtggcaaagcctggctttttaactggtagcaatggagtattccaggaagactgacaagggaccaaaacacctagttctaagagtctttgaacgtaaggtctgattccctctcaggcctctttgctcatggggtattgtcgtatcccaataggagtcgcaccagttttcagcgtcacaacgatggagggcaccctctttgtctctctcatacccccagtctctgaccaggcttgagaatatctctctaaccaggtcccttttattacttttcttgatggggcttgaggctcatgtaatctatatttttctttgaattttaaagctaaaattatagagatagggacttgccaagaggttgaagttccttccgaagagaagcttatttgggctttgaattttgatagtaagtctctccccaacaatggggtggggccttcagggatgatgaggaaggtgtgagttacttggcttcttcttaaattaactttcttatcagtggtccaagagtatggtttctgaccagtagccccaattactatggtttttgttgttgttgttgttgttcctcaatttctccagtggctctttcaggactgaaaactctgctccagtatcaacaagaaaatctgtgggggtcccctccacagttagggttaccctaggctcggggagggggtctgagccccgtctcccctagtcattatcttccagggtaaggaccttgggtggcctggtgtctgtctttttcttggggcagtctcttgcccagtgtcccttttctttacagtatgcacattggtccttatctagaggtggccgtgaaggtcctccagagctctgaggtcttctcggccctgtgttgcccaggtaccctgtctgcctacttcctccaccttttctataaacttccttatcacctgcaaatgtagccaaaatcttagttaaatttcttttctgccttctatctcgtctactttttctttcctcagcctctctgttttctatttttcttttttcttcttcagtctctctcttatggtacactttctctgcctcctcaaccagatattgcaaagataatgtttgtagactctctagatgctgtaaccttctcctaatatcagaagcagactgcccaatgaaagccatggcaactgccgcctgctggccctctgacgtatggtcaaagggagtgtaacacctgtatgcctctaagaggcgctctaaaaacactgctgggggctccttttcctcttgtaggatctctcttatcttggccaaattggtggggcacctgtcagctcctctcagtcctgctaccagatcccagcagaaaattgtcaactgctccctaccttcaggcctgttagggtcccagttaggacgtgtcagagggaagcctgcatctatttcatttggaagttgtgtcggtagttcattggccccccagaacgttctttcttgcctctagcagaatcctctccttttcctctgtggtgaaaagaacctgtaaaagctgctgacaatcatcccatgtgggctgatgagagaacatgagagattccattagattagtaaggctagaggggttttcagagaaggggccatgatttgccttctaattatagcgatcagaggaggaaaaaggccagtactgaagggggccataagtatgtaaaggcagtgcggtggttgagtctggtccctctgggctctgagctcgccggctttgggttctagcagctgatctctctgctgtgtctctagcagcaccctgttgagagatctgggaggggatcggttagggatatgggggtggggtgttacgccattttggaggttcttctatctctggatagaccttgggaggagctgagggttgtggttcagcccccgtcatttttaatctgagtcacggatagctaggacccgggagcccagcttgttcttttgaacccaaggcttcagccaggatggggggtcctgtgctaaatttttccagatgagaatgtagggcacttgatctggctgaaaccctggtctcctctgcaaaacaacaactttaacagcagaaatcacaaccaaaccaagagtgccctctggtggccaaccaacatcaaaagctggccattccgcagagcagaaagttctccaaaatctctttctgacatccacagacagattgtgagccctagtcttaatttcagtccaatgctcgatagtcagtccaaggggagtgctaatagtctgtcccatcgtcagagtcacatacagggaaacaaacaatatatacacacaaaaagactacgataactgagaccaggacccaaacagacggccgagtgagcacactctcacttggcacccagtaacagaaacagatggccaagtgagcacactctcacttggcaccctgatggagatctccaggcgtccctggagctccctcagacctcctgggacgtctcccagggtgacagccggttactcctgacacgtctgtcagtaacgctcccatccattccggacagggagttcgttgctctcacgagcgcagacgactgcaaaccgagaataccgaattcaaacacagctggcagacaaaggcatagacaaagataggatcctacctccaagcaggatctctgagaactggggtaggccacaaatcctggatgagcccccacatgtaagaccccccaaagctgggcctccactcaagtcctgggatgagctggccagcaccccaatgacccgagagaaaaccacacctgatacaaactgcaagaggttttattatcagctagctgaggacaaactcctcgcgtctcccagggcaggggagtttgacccagagtggtgataatagggggcttttaacagctagctgaggaattgggaggagttgggaggagagttgggaggagagtagggaggagttgggaaaagttgggaggagagttcttctcttccgggtgtccttggtgaaatttacaaggcaggagtggggagtgagttctttctgaatttttatctccatgtcctcggcacaggaaggcaggcatctctggttgtaaagtatagaaacaaaaaggctttttgctggctatagagaacaaagagcttctttctagctgtatttttagagatcagggaaaacaagcttgggaaatgtccaggggctttaccttccagggagaaacactctaagtcggggtctcacactcatacacttgatctttatgtttctccattttcacagcagaatgtcctgttgctctaatagttgcttttcccataatgtaaccaaatactaggcagagcaacaaaagggaggatgatttgttaggcttatggctatcagaaatgcaggggaatgtagtcagtcagtcatggtgggaaagtgtgacagtggggtttctgtctgtgtgcactggggtgtgacagtgtcattcctgtctgtgacactgggtatgcactggggtgtgacaatgggtgtgacactgggcgtgcactgcagtttgctcatttctggacagacctgagagactgggcaggaatcagaagcagatgtcaacccacttctacctaagtcacacctaaagcttccagagactcccaaaacagtgtggagagcagagatcaaggattcaaacacagtctgtgaggaacttcctacatttggacattgcttgtccactccaccattatgcaccaaggagactttgtgccttaagtctaagccatcagagattgatgtatctcttcaaacatctggaattgcttcaaccccctcccctccatccctaatctaccgcttcctcctactcaggagctacaagacctttaagaaaaaagatccagagacagctgaaatctaagagttctgacaccaccagaatcataggaaggacaggctccagtcagatatagcgagggcaggtggcactagagataattagatggcaggaggcaagtgtaagaacagaagcaacagaaaccaaggttacttggcatcattagaacccaattctcccaccatagcaagtcctggatacaccatcacaccagaaaagcaagactgggatctaaaatcacttctcatgatgatgatagaggactttaagaaggacataaataactccctaaaaaaatgtaagagaacacaggtaaacagttagaagcccttaaataggaaacacaaaaatcccttaaagaattacaggaaaacacaaccaaacaggcgaaggatatgaataaaaccatccaagatctaaaaatggaaatagaaacaataaagaaatcacaaagggagacaaccctggagatagaaaacctaggaaagagatcaggagtcataaattcaagcatcaccaacagaatacaagaagagagcatctcaggtgcagaagattccatagaaaacattgacacaacagtcaaagaaaacgcaagatgcaaaaagctcctaacccaaaacatccaggaaatccaggacacaatgagaagaccaaacctaaggataatagtcatagaagagagtgaagattcccaacgtaaagagccggtaataccttcaacaaaagaagaaaacttccctaacctaagaaagagatgcccatgaacatacaagaagcctacagaacttcaaatagacgggaccagaaaagaaattcctcctgtcacataataattaaaacaccaaatgcaccagacaaagaaagaatattaaaagcagtaggggaaaaggtcacgtaacatataaaggtagacctatctgaattacaccagacttctcaccagagatatgaaagctagaagatcctgggcagatgtcatacagaccctaagagaacacaaatgctgacccaaactactatgcccagcaaaactctcaattaccatagacagaaaaaccaagatattccatgacaaaaccaaatttacatcatatctttccataaatccagtcctcaaaggataataggtggaaaacaccaacacaaggagggaaactacaccctagcaaaagcaagaaagtaatctttcaacaaacccaaaagaagatagccacacaaacataattctacctctaacaacaaaaataacaggaactagcggtcacttttccttaacatcttaatctcttaacatcaatggactcaattccccaataaaagacatagactaacagactggataactggataacatagactaacaaacaggatccagcgttttgctgccaacaggaaacacacctcagtgacaaaggcagacactacctcagagtaaaaggctggaaaacaattttccaagcaaatggtcccaagaaacaagctggagtagccattctaatatcgaataaaatcaactttcaaccaaaagttatcaaaaaagataaggaaggacacttcatactggtcaaaggaaaaatctaccaagatgaactctcaattctgaatatatatgctctaaatgaaagggcacccacatttttaaaagaaactttactaaagctcaacacatcgcaccccataatagcactctcagcaatggacagatcatggaaacagaaactaaacagagacacagtgaagctaacagaagttataaaccaaatggatctaacagatatttatagaacatttcatcctaaagcaaaagaatataccttcttctcagcacctcatggtaccttctccaaaactgaccatataattggtcacaaaacaggcctcaacagatataagaagactgaaataatcccaagcaccctatcagatcaccatggactaagactggtcttaaatactgacaaaaacaatggaagcacacatacacacgaaagccgaacaatgctctactcaatgataacttggctaaggaagaaataaagaaaaaaactaaaggctttttagaatttaatgaaaataaagacacatcatactaaaacttatgggacacaatgaaagcagtaagaggaaaactcatagctctaagtgcctccaaaaagaaagtggagagagcttacactagcagcttgacagcacacctgaaagctctagaacaaaatgaagcaaatacacccaagaggagtagacggcaggaaacaatcaaactcaggtctgaaatcaaccaaatagaaacaaaaagaactatacaaaaaaatcaacaaaaccaggagctggttctctgagaaaatcaacaagatagataaaccctagccagacttaccagagggcacagaaacagtatccaaattaataaaatcagaaatgaaaagggagacatatcaacaaaatatatttttaaattattattttgtttgttgaatattaactgctgaaaatattaaaatcatgttctacaagaaaacaaacaaacaaacaaacaaacaagatccagctgaaaccccagtgtcttagtactcaggaggcagaggcagatctttgtgagtttgaggccagcctggtctatatagggagttctaggacagtcagtgctatgtagtgagatcctgtctaaaacaaaacaaacaaacaataaagaagaacccacagtctctcttatgttctccaaagaccctacagtgtccatggacacttctctacttctctttccttgttctcctttctttcctttcctttcctttcctttcctttcctttcctttcctttcctttcctttcctttccttctttctttctttctttctttctttctttctttctttctttctttctttctttctttcctgctttctttgctttctttgcttgctttctttctttctttctttctttctttctttctttcttttgtttttgtttgttttttgtcttttggagacagggtttctctgcgtagctctgactgtactggaactcactctgtagaacaggctgtccccgaactcagaaatccgcctgcctctgcctcccaagtgctgggattaaaggcgtgcgccaccactgcctccttccttttttaaaaaaaggtttacagtttctggtcctcttttcagacattggtgccactccaaaggatgagtcttggaagagtcttcactccctttgccaccatccagtccccattggccttggcaggtcttctcccttccccccaattctgttctgctgcccttcctggtatctcaaggtcttttgcctctcataaaggccatgtcatacaagtctgtgttaggctcatacataatcacgaagcccattgtgcaaatacaaagataacagctggtgtggctgtgtacattttgactacctttagctgaattgtctgaatgtgtttggcatgttgccttcccaggatgaaggacattcacaaccatttgtttccttggtagtagacacttacttagtcatgaacttcccggcctggacagcaactgagccatccgtgatgacattagtcctccagcagccaaggaggggaaggaaagtctgccactttgagttttgactaaactgtctctcttttttgtttgctagacactagactcctggaagttaaatatcagtttctagaagttcttgcttaggtggcccaagctggaacaagacagaggagatgagcatgactgcaaaggatgtgttccatatttcctgaacacagttgtcctgagtactgcaataaatctaggtagacagacagacagacagatggaccggcagaccgataaaagaaataagtcacttttgtgactcagattgagcacaaacgtgatacgcagcagtattgaaggaatgagtgagtgatctcatatcctgttcaaatctcttgctgatcatcaatcaatcctgtatgctgtgttccttaggacacacttcactgctgtaaccagtcttatgaaagactgtgtttctcatcatgtacgttagtgtgggaggtctgacggcccagattatccacactgttgggaacgcagacttcttcaattccatggctgtgactattccctaaagccgatggctgtctgcgtctagccaggaagaggcaggcaaagatattctcttcttaagcatgtggaactgaaaattgtacagtcactcacattctatggagtcagcttgttaggaagaaggctgagaaagacatggtagccaggagctcagcatcgtcaccagcgtggaaaaaggggtcaatggccatgggaaatgatctcttccattgtccactcttctgtgtgcttcagttcacaatcccatgcacactttcttctcacacatggaatgtgcatcaaccaatgcagttcctgcattcaaagcaaagtacgggatctgggaggccggagacggggctcgccatgcatgtagatagtgccactaattggttgtcatcataaaggaaaaactagcaatctaccgtgggatatgggaacttgggtaggagatcttcattaggttcccatcactgccagaaatatttggtataatcagcttatacaaataaaaggtttaatttagctcacaggttttaaactgtccccatttttgactggttagtcctgctccttggaacttgtgacacagtcctgatatgagaataccatggagtgacacgtggctagaaagtcaaagaaagaagaggaagggctggactcatgctctgccctcatggggcgcccccacccatgacgtaaagttcctatccctataggaccttggggggacatttaggaaccaaacttaagtgtcagcttccattcagaaagagaaagtgagaaaaacaagtgtgtagcactaagatgtagcaccgtgcaggacctggatggaccggacaagtgtagaccttgagaacactgatcgtcctctgtggagagctcacatcctccccagcctcggccccacctttgggagactggtgggcactctgagtgtgcactgtcctttcatgacccactccccactgataaattatgggtcccaagaattatcttttggtttggataatcaaagacttcatttcaagccaagcttaaagggttttcatgagaagctgccaacggctcctcccaccctagcttttagatctatcttctcctaacagtgggacttcgaggcatctggaattgcacattgaggtaagaagtcacagcaaattaatcttcagccagcgtgagtccctttgtttaagtgagaaacctaagctaacctttgccatggcttccttgggagaacagagtgtgattgtgattgagggagtaaaaaacctgcttacgatgaaaagagaacgctttgtagtcagtctctcctttaccgtgatgaaatcctcagaaccggggtttcagatcactgtgagccacgtggtgtgagttctgagaaccaaattcagcctctggaaaagcagcaagcagtcctaacgactgagccgtctctccaggacccattttaaccatttttaaaactacaatttggtggcattaattaccaacaacattgtgtaactcctcactccttccaaaatgattttatcactccattcagaaatgcactaactttctaccccccacaccgaggcaggcaccactcctatttcaatgaacttactgttttgtatttacaaaacggtaatcgtcatatatcttttcatataaagtttattttgcttatttaatgttgtcgaggttgatctatgttatgtcatgtatcaaaacgtttctctttttcatggctaaatagcatttcctggtttgcacagacaccttttctctcattcatttatcaattgataggtagttggggtgagtctaccttttggctgttgtgaatagcactcctatgattgatcactggtatgtaggaatttgtttgagttcccacttcaggtttttaaaagagtgtacttgggtgtgcaattgctgggttgtatggtatcctctgtctaactttacaatgaatcaccaagcttgtttttgcacagcaactgaattattcacacgtttgcatatgcattcgtgtgcatatttgcatgcacatttacatatgagggaccaaactctctcctctgccaatacttcatcatggccaacaactcttgttattttctgtcctaaatgtcttagtgggtggaggaggggacttcacagttatgattagcatttccaccaatgattaccaacatctgttcatgtgtttttgtctactctgaaatcttcttcagaaaagggtcctaattttcttccccaatatatggggttgtttgcctttttgttggcattgttgagttgtaagaatttttcttattgatagatgtgaattaagccactccttactagatagatgcaagattaacaaataccttcttccattcaacgctctcttgaaggtgcccttctgcctactgagtctgttgttgtttgctgccattgttatctgagaggtactcttgctacgttgcccagattagcctcaaactcctaggtacaaatgaccttcctgcttcagtctcctgagcctctaggagtactggaacagaccaccatacatggctcaaaacgttcatgaagtctggttgatctgtgacctcttattacagtgcccttcgtgtcacattatgccagggctgggtatgtggctcagtggcagagctcttgcctagcatcaagacctagactggatcctcaacactagaaaaaagttcaaaagaggccactgttaaaatccaagatttatcccatatcttctaagaatgttctaatttcaccatttcaatccatttctttttaaattaagggtttttttttgtttgttttggtttggtttgttttggttttttttttttttggggtgtttgtttgtttgtttttcaagacagggttttgctgtatagccctggctgtcctggagctcactttgtagaccaggctggcctcgaactcagaaatctgcctgtctctgcctcccgagtgctgggattaaaggcatgtgccaacacgcctggcctttaaattaagttttgtttggcatacaaagtaatgggtttcattgtgctatcgccacacacacacctgattctacccgccctttgatccacgacaaggtaattttgttatagtattgggagagaattcagcttccttcttatgtgcatggatgtcaaattcacacaacatcttctactgaagagattggttttcgtcccctgtactgtcttagcacctttgtcaaaacacaagccatatgcagggaaacattgttactgggcacgctactctgtgtcactgagatgtctgtctgccattaagccaacatctatcatgatactcttggttgctttgacactttgtagtaactttgaaactgggactatttggtgtgttgtgttgtggtttttgttttttttttcaaaattgttttgaatattcagggctctttgagattccatattgatttcaaaataggagtcataatttagagagttaggaagtgcggagcacccgtggatcacgtggggcagtgtggttttcccagggctagtgtcttccatttgctgaggtgccctccttcctttcagcactggtttgctgttgtgatgacttccttatcaaggaactcctttttggtgctgttgtaaatggagttgcttttacatggtttgtttttgtttttgtttttgtttttttcagttacttgctactggtgtataaaaatacaactgacttttgtgtaatttttatatcctgcaactttggtgaatgagaggatttttacggattagctgtgaccttctacagatacggtgatgtcttctgaattagaggtagttgaaggtccatttggaaactgtagaaaatttataaattcagccacttgaaaatagcagactcttttttttttttcacagttctggagtctggggagtccaagatcattctgtcatgtggtcaaggcccgttcctcaagtctcattttcagtatcacaccctgcaaggtctagaagctcttgggacctcttacatagtcgaatccctgatggctctgcccttgtgacctaattagctttgagaggcctcaccctaagatcatcccactggtaattaggattttacagatggacactgagggtaaaacacatcagcactccagcccttcatagtttggttatcttttatttgtttttccttccccaattgttctggctagagatttcagtactgtgctgtttagaagtgggtctctttgtcatgttcctgacttagtggagaaaaatgtattttactgctgagtatggcatcagctgtgtgctgtcatctgtgccacatgaagtgacatactcacaggtaccttgagctttataagaacgacaactctatcttcttaagatgtcctaacccacgctgggtcccttctcaaccaaaagggacccagctttctgtctagaatatctccctgtagcgtttcctatagggcaggcttacaggggactcatctatctgtttctgttcatctgaaatatcttatcctttctgtgggagactagttttggagaccacggaagcctcagttacagctttttcttccaatgctttaagaatgctgctggctggccccggcagcttctgatgagaaacagcttcccagtctccctgaagatccctaatgtgggtagagcaggtttcaagcatctctttgtcttttgacactgtgactacaatgtgtctcaaccagggtcacttggagtctctcctgctaggagctccactgtgtgtttgtatttttcattagacttggaaactgtttcaccactatttctccaactattctctgcccctcatcaccttcttctccttctaaaagcagttgtctttataatgacatgctcgatgggtcccatgggatggtctgcagaggtctgcagagatggctcagtgcagaggactcaggtttgatttccagcactcacgtggtggcttacaaggttgtcagtaaatccagtcccacgggatctagtgccttctttctggcctctaagggtccccagcgcgcacgtggtacatgcacagacatacatgctgttaaaacattccaacatataaaataaaaatagatagctttaaaaatctgccattgagctcttcagtgacgtttccacatctgttatgcttttaagccctcagatttctattgcgtttttaataccttccatgcttttatgatggaccatctcttatctgttgatctgttgatacatgtctctcctgacttccccgaatcctccatctactaatcatgtctaagacatttgactccagagtctgaattcctgattaatagtttccttcttttttttttttttcgtgatccctatttcttcacatactgtatcagagttctctgaagaaacatgactgatagaattatatattaaaaggggatttactagcgtggcttacaccatatggtctgggtgatgcaacagtgcctgttggtcacactggagaggctgaaattctgatagatactcaagtctagatatctccactgtcctggaatggggctggaggaaaggctgactcctggagaggcccagctctgatatcagtgaagaaaggcaactgcagtgggcagcagcagagtagatgaagttggcatcaagacagaaccgctctgctccattcccacccaattctccgcccctgctcccgcctcacattctgccccattccacgccccgccccctcgcccgccccacgctttgcactctgtcccgccccattccgtgctccgcccccatgccccatctccaccccatgtagagttctggcttctcagaccttcatcccctcctgctctcagagacaagcagactagccaccatatcccctcacctgccagcggaagccgacgcctcctttacatctgtttcccacggaagcagctctgaggttgtttcctgacccatgtgcttagccctagaatgcaccctccacatctagtccggaagaacaaagtcttggacaaacgatcccagcacctggaaggtggcagtatgaggatcatgggtttgagggcatcatagctatacagcaagacaaaggaggagaagcaagaggtgcttaaatcttaacaatcttggaattagaatggcctgggtatgaatcccactgagtggtttgaggctggagcatccttctaaacctcttaaatgtcatgggcctcagtctccaaagagcatacaacctgtaatttggtcaaaactctgccacagcatcctacaaaaggttgtcgatgatctcaggtagctgtggcatttgtcagggtgggttctgctgtctcttagtctatctccctcctgttctccatccccaacaccctggtcacaaaccattttctaccgtctgacacctcccactcaccaggcctatggcctgcccctttacacaaaggcccggccaatttctagttcactctgcgctaagcaaacacttgcaacactcattggcctccataccccattgcatcagggtacctgtacctggaactagactaatactgagggcagccagagaacaggccagttgggggtggtctggcattgtggactccctggcatctgcttcatttccctctagataaggagcctggaaatgtggccaatttaactgagaatctgggccttggaccttttgttcaaaaaaaaaaaaatagctatacctctctaatctgttattttttaaacttaattttaaaataatattcaagtgatgtgtgctggctcctgcctttactcccagcacttgtaacagggcaggtgagtctccatgaatttgaggccagcctagtctacataacaagttgaagaaaatacatatatatatatatatatatatatatatatatatatatatcatattcacatcattatggtataatatttgtcatatttccttcaacatgaacatcatcaacatctccttctcatctccatggcaaaactacagcattaacaaacaatataaaaaagaaagtaccatttgctttatgttagcaacgtgctaacaagcccagttatgtttttaaaaattactttcaagacgtggagacttaagacaagtggactttactctcctgcatggtttctgtgggtccagcaggtggtctgccttttggtctctcctgagatttagtcaagggagtggctgggcagcagcatcagggagtaggcttgtggctggtagatctgctgccaacatggcagattatcagtgtcttcattttttcctcccaatgttatggggacaccttcttcccatgtcatgttctcacctgatggcacttggcctccctcagaaggaacagactaagagaaagacaggaaccacagtgtcttgtggcatagctgccatcatttctgcaaaatcctatccgttacccaagacagacctatgcacacaggaggtatagccgaagcgtatgccaggccagtgtctagtaggaaattgcaggatggtagctgcaatccctttaaacagacagtcattgacatctttgcatactgtgttagttacctttgctgtgacagtgtctgctaagaaacaacttaaaaggagtcttattttggcttctggttttaggggacacattccatcacggcagggaaggaatagctctaggtcacgaggcagctggtttcacactgagtccacagtcaggaagcaaagagaaggcaggaagtgggattgttctggggtctgtttaaatccaatataactcagacaccaggccagtgcatatgataaaaatgtgttagaatcaagccaatactactgtatcagagcagcagaacagactctggagttaaaccataacagtgagccagaatatttaagctcacaaatcacaaacatctgtgccaagttacatttccccatcaatcaggatgggcgttgattcctgagcctgagaacctgaactgggtttccccttgccagcaagatggaggctacccttgagatgacaactcagacaactctgccctaactcgagaagctgtccagctgtgggaaagtcccctagcacctagcaccaatctcccctagcacctaggaccttgaacttagtttcccccaagactaaatggagtctgaaaacaaaatggcagttctttaaacaagtttcttttgcttgtccctaacagggtctggctatcaaaccataaggcctgccacccagggactcacttcctctagtgaggctccacctcctagaggttccacaacattccaaagtagatagcacccccagttgcgagggacatttcatgtgctaactttagagatcagcctgacaagctggagagagggcctgtcacgggctgttcttctgggttccattccaacacccatatacatttaaaaaaaaaaaaaaaaagaaccaaccttacctttttaaaaactatttttgtcttaaaattttaacttattattattattattatatgtgcttatggcacacttgtccagctcagacaacagctctgtggaatacccgctctatggtgtacacacatgagtgcacacacacacaaccatgcagttctctccatcttactttttctttattttatgcttttggatgctttgcctgcatgtatgtctctgcactatgcgtgtgcctggtgcccagagaggctagaagagggaagtggagttatagaaagttgtgagttattaccatgtggatgctaggagttgaccctgagtcctttggaagagcatcagagttctacactgctaagccatcttcccagccccctctctgtcatctttacgtggttccagagatcagactaacgtcaccaggcttccatggcaagtgctctacctgctgagctatcctgtcagctttcacgtgacctttgttacgactgcacggaagtgctgcccaatgctgtgattattattttttgatactagaatgaataagcttgattatcagttactatccttgtcctgctgataccttgaggtaaatgaatagaaaatgcagccacgtgtatgaaatgacttcttgaacaaggcacagggaccggggtgggggaggggtgctcactgagtaagagcacttgatgtacaagtgagagaaactgagtttgaatccccagcacccacgtaaaacccaagcatggctctgcattactaatacaccagaagttggaggacagggacaggcagagccccgcagccagcttagctgaaaacataaacttcatgttcgcttctgtctcaaacagagaagatggcaagtgatagacaagacacacatattctcctcctttggcctcttctgcatggcagtgcataggtgcatgcacgtgcatatgaacaccacacacacacacacacacacacacacacacacacacacatacacacacacacacgcatgcttgcatacacatgagaggagaaaaaaggaggtggaaggtcaccaactaggacagaaaatggttccttcagtttactcactccctctatcaaatgaaagatgaagatgggaaaatgctctaactcatggctgcaaggctctgtttttctccaaatccaagcagacacagtgttcatgcagctttccatgtcctgtgcgtccatcatgagatctcatccctaaggcaccttctgtcctgtcccctcctctccagtcgtgactgttgagtgtaggaagaacatcgagctacgtgtccttactgcagaatggtactcctggacgaggtggattcacaggggggggcggtgagttgccagagttgtcctgggtgcttagccaactagatcccattcttccctcaaaggtgcagtgactggaaagagaccacgccctgggacatgttctgggaggatgcttgctgctcatgcgcagtctggctgagacagaaatccgctccgtttgtctctggctttgcattggttcacacccttcctcccacctcccagagattagagcttgaagatttgcctcctcctcctcctcctcctcctctatcctcctcttcctcttcctctcctgtgacttgcccaggagatgggagcaaggctcccaggcagctccaagaccagccaccccaaattcaggcatgagctcaacccccaaagcaaaaggggctcagagccaggggttgggtagtcagaggcttgtcatatgaggtctggtgaggccagctttgctctattttgggaaagtgatcaatcgtgtcaaggggtgaccatactggccaatcttgggaaaacctggcattctgacaggcaccctatgtaccctgtcatacttgccagtggcagctaattttagcagggcttggaaatgccagcaagtgcagagtatgttggggtcactcctggccaaacccaaagaaaggtctaggaggtgtctgaaccccgtagaagagcccagaatgtcctgagcattgctgtcacaaaatttaacggcctcttctattctatttcttgctgtttgggttaaaggaaatttaagaagattccacaatagttaaaaaaaaaaattgttttacttgcaggggagggggtgtcagggaagccagaggacctgaatcttctccagcttgtatgtgcacagatgtccttcccatctgccccagtccatgccgtgaccaaactctcccttccacaaacgcttggcttccttccttccttcctccagcttctccttcccagccaagttctatggtggagccccagactgtgtggctgtgcatagccaaccctccataggtgaaaccccatgaggatctccactacccacaagtctgaagcctcactggctcacacagctcctcgtgcctacctgtttcaaagcatccgatcatcatcttctgtaacaagtctggaagggggcatgtgagtgggctagctccagccacttcatcaacctctccacagcagctccaaccagtgttcagagaacatggtagcctgtctcatagccctgtccctgtggcctttgtcaaacctgatcccacgtggttctttgtcctggccctggccctgtccctgaccccgtggcagtaggcagggtattttaggagccacctctcagactgacccattagtgcagaagtccttggctgcctgtcttttgcaacactcagccagacagtcctcacccacagcaggtggcctcgggagtcaggaacatctctacttccccaacgacccctgcttatcctcagatggctgtggatactacaaggaggggagcccagtcgttgactctggtaagggcccctcacaggccaaaggccttgaattgggggagacctggagggcagcatgctcaggttggagagagggattggttcaaggatgagtgcgatcctgtaggagacctggatttgtcccttcttccctgtatcccttctcattggtgctacgattgtccagctcttgaggagtccaccagggcttgtttctggaatgacagtgcctagcctcgggatgttttctgagtgctgctcatctctaaggggcacctcatggctgtactcagtagagtgtggggctttcttctccagaagtatgtggatggctgacctagggccactcactcctttgtataaagccaccataggaccttggaaaagaggatccaggctaagactggacatgcaggtgctgacactgtctctggaccttcagaactgtggcttttgtctgtaggctgctatggcccttgtccagatcctctggggtctacagttccctggggctacctctcccactgctaagatggtaaacacagcacttgatggtgtcttctttttttcctgcattataaggtgggcaatcagagtgtgctcagggatctgaccctgccagctctatccctcccacttttgctattagttccctgtgacctaatccagacttgtataagaacatctccatgctaagggcttgtttccccactgtttccctgaactgtgtctgcacacagccagccatacatacttgaggcagctatgtgcaggcagatgggttgcttagattggtttcccaggatgcctaatcccagtggatccctgctgcagctgctcaggctcgtccatgtgatcctcctagtgtgtctcttcctaaaccccctagaccaagctgtcaccagatgtctgtatgttctctagaccttaccacatctctgtcctgtgtgcactgtcacagtacacagattctggagacagcctaatgccacccagttccaccctgtctcaagaagtccgcattctgtagccaggcgtctctagccttctcgtggttgtcggggtgactcctttctcccctctatgcaacttcctcactttctaggaaagtgaggagctgcacccctcagcccaccctgacacccacttccttgcctcaccacccaactcaactctactgtcatgtaattctcttccgtgactctccgtgagcactggcctcgtgtggtactgtgcttggacagatagacagacagacagacaaacagacagacagcaaatgctctcagctcttctctaacatcccacacaccacagagcacactggctagaactggcatcagctcaggaaacctgccagtgctcttcaggggactcaggagaagggagtcctcccacaggaaaagccctatgtttgctcgtggccatgaaccttggttatgtgtcctgtgacttttcagacaaggcccacaagagaatctagtgagctaccagggtctccctgcagcacgaggtacttctagagacacgtgagaatggctaactggacacctgccaaagccagctcctgaagtcctgcaggaaggatcccaatgggcgagtgtcggctccgagtccaggcttctgcttacaacccagctccgcactcttggctctgtaggctctgcacaccgtggctttgtgggggtgggttgtagagtgtgtgtttagcaaccctggattgtcttggaatgattcaggaatatggagtgtcccagggatacccacgataggcctggcccacaatccttgctcatgtgcacaatgcacagaggctgttaagactgacacaatgcccatttcccctcccaaacccgcagcctgagggctgtgaagcctctccccagggttgcacactgagctggtgccaggagtatgggcatcttcagacccagtgcacacgaagaggcgctgtctagcagagcccgttagctactgcagcctaagcctcttccagcacccaccctccgacctgcatcgcctgcattgggaaagacaacgtggggaatgcgaggtgtccttctagccacagtggtctgggtcagtatgggaagtactgaagcctagctggtttggccaaggctcagaatgagggttctgtggccaggtcctaccacttgggggcagcctctccacttccctaaagcctcctgagcatgcagacctagtttgttggagacttctgtagaaggacctcaattttaaataaatttttaaatgttggcagatccacaggccaggtgcagttctgtttatgagagtggggctgggctctcagaaggtcctttctcacttcctcaatgccagaaaattctacccccttctctggaaaactgcagaaggtggcatggtggcggtatgtgtcttgggtttcttcggcatggccttgtgagtgaatgcagtgtcttaggggttttttttgtgggtcttatttcattgtagaggaggtcctgtgtccttcctgtgatgtgttcatatattctatgtcctgaagttgctgaatcaaaattaaattttgatagagacaatacctggtcttctggacatttggcatcagtttggcttcagtcatgtccaggccttcaaggtacagtgacatagaaactgcagaacctgggaccatccaggacacgtgctctttccaacatctgtataaagatgatggcacaaacatattggccctgccaatccctcgccacagtgaaataagaaacagcaggtaccattcgctacattctcaccagaatgctctaagctctggacaagttctcctcaactccaagaggaaagtacaagtcacttggagccctcatcagccagagtccagccatgtatttaccccgtcaccctgagccatctccctagccctcatccttttcagagaccccagcctaaagtgttggcttcttttatggagaatcttgaactgaaggcaaccttaaccctcaccttcaacctcaccctcagccagggcccaggcctctactcactaggagggacagccattacagagaggcagggatggggcccaccatggccagaggattgaacccttgttaagatcaaccctccttgttccccaagaccaaaaatatcttataattgggtcccttttggtttttggtttggtttggtttggtttggtttggtttggtttggtttggtttttgagacagggtttcctgccactgactcccaagtactgggatcaaaggcatgtgccaccacacctgggcagtcactgggttcctttgtactgctgtacctgaaaggagaagacacgtgtcctgtggctgctagttctcaggaaatcttacaaatctaggaaagaaacagaggaggccatccatatgcaggaatggcagtgttggatctgagctattcacacacaggtctcccatgtcagtatccagagtgccctccctctccacttaaagcctgcacactgtgggacgccatgctttgctagccagacccgtttggcgctagaggtcactccacctactctagtcttggctaccctgtgcatcctgactggcctattcattccataaagccttacagcagaaaaatattggctctctacagtgatgccagctccagttctgcctcaccaaatcccacgtagagcatcttctcccctcatccacactcttagggacaaggggaggcaagttaagtcatcgtgctgccaaggtcctgttaagggcaaaggctacccatctccctgggatcaccaccccagagctcccaggccaataaccattgaaggtctggccttggaatgtttgaaatcaacgatggtaaatagtctgagatgtagaccatcctgcatcgggagtcagaggaccaaaagagacccttggtgtgtggtggcttctagcggcagccatagctgctcccatcccctccctccccgaataggtagagcagatcctggcagagttccagctgcaggaggaagacctgaagaaggtgatgagccggatgcagaaggagatggaccgtggcctgaagctggagacccatcaggaggccagtgtaaagatgttgcccacctacgtgcgttccaccccagaaggctcaggtacctcagggctcatctgtccctagacaggaccctctaggcaaacgatgacatccccgaatcactggacctgcgtttgtccagctacctgaagccctggggtgctcaggtccagcctaaagatatcagtccctaggagaattggcctttttgtctctgaggtcacctggggaagctcctcctcttctagagtctggtctgtcactctaggtcttgtgtagctccctaggttctggctgcctctacctaaggcagggttttcccgctggtgctcctacttcacctttgacccttccacaggttgctctagcattaccccacccccagtgtctaggctagcatcccctcagccacgttgtctgggctccccagacctagtccacccgtcaggtgggccacgagactgaacatctctccctttgcctgcagaagttggagactttctctccttagacctgggaggaaccaacttcagggtgatgctggtgaaagtgggggagggggaggcaggacagtggagcgtgaagacgaaacaccagatgtattccatccccgaggacgccatgacgggcactgcggagatggtgagcagccagaggggctggcaaaggagggctaggggtcaacgtcacccagaacctcaggagaattggtcctgatgggagggttccaaggacaggagtgatggaggtccacccagcttcagagactcaagaaggtgtctcagaggcttaaagtatcccaagtcccaatcccagccggcccagaacaagaaggggctgaagaaaggtcagcagcaagagaaaaccccagctcctgttcaatttcctagtggaaaatcaaagcttaggactgagcagccagaaccatacttgcccctccttcctcacaggccgccattacccagcaacaggatatgccaagtggcatggccgaagccacattgcctaagcagcaaaggtccctaagcatgagaaagacccagatgggagaccaggaaatagaaggacccgggttaagatagagccccccactgacatccccagggacaaagcaaaaccctttaccagaggggcaaccaggcaagaggtcgcctatagccactcagccttcccttagcagaccttgaaccaggcatgtcatgacccagctccctcatccatctgcaatgtgtcagcaatgcccagtgattgagtggtcccacttgaagggattaggatcggccttcagcgggggcagggggccagtatacctgggaaacagcaaaagagacagaaatcatagtcatagctaagaatggactccacccagagcttcacaggatagtcatccaggtttaacaccagccagtcctgtgctgtgtcaccttgctctggagactgcaatgtgcagggtgctccacccagggaagtgtaaggccttagtcctgttgagaagcaaactctagacaggtccagcatacagttgcctcccattgtccctaagagtgtggatgaggggagaagatgctctaagtgggaatttggtgaggcagaactggagctgcctcaggggtcaaatgtcttaacatctccaagagacactttggtacagttcctggggagagagaactgctactgtcccagccctgacctaatgccacactggtgcaactcctagctctttgactacatctctgagtgcatctctgacttcctggacaagcatcagatgaaacacaagaaactacccctgggcttcaccttctccttccctgtaaggcacgaagacatagacaaggtgagcaggtggaggagagaggagatgaatgggtggaaacacttgggaagaactctgccgagactgccttcagttgcagctccccaacccatgccgagtggggattgcaactgtgacccctgtcacttcctatcagtaaagctttggcaaatagacataaatcagttgattcttactgtgtggcaaagcctctcaggagacatgctatggtcaccccagtaccgataatgaaacaggttaagcaagtcgcttgtagtgggaggtggcaacaggctgtaagagtgaggcccagttcaccacagagcagaaagataccaagctgcttcactctgagtcagatgtgggaaagttctgagaatctacccaccagcaagcacaaccttatgagttacatcacaaagacacacacagacacacatagacacagacaggcacacacatagacacagacacacagacacaaacacacacagagacacagacacacagacacaaacacacacagatacagacagacacagacagacacacatgcacacatacacacacatacttcaatgtaacttttattctcctgatgtaactgttgtctggaggcttaccacctctgtctgctaacctaggcctagtcctggaagcttctagctttcatacaatctaacctaggcatagaatattttcagcctctgggagttcctgctgaataagctcaccctttcttgttctttctgaactctagctggctcaactcagctgttcttgctcaaacttctctccaagctgactgattcaatttggcttctctctcctcctctcttaaattactctgcatggcctcaaactacctctagcaacctgttctaatcttcaggctccttcttattctctggcttgttctatctctacctgtgtctagcttgttctctctgtaacctgtctctgtaaaactcttcagtaaaactgccactttgctatcttttttctctttctgtgctctctcaagtagcttccctttcctctctcttctctgataattgggcagatcctattctgtcaaatctttgtctgattcgtcactttgtctgccacgcaattcgacatcactttcaaacatgggtgcttctttttgcaaactaacatcaccttcattgtttgggatcaaaagtgtgtcctaagagtatgtctgtattccagccaaagagattaaaggtgtgtgagccacatcttaactgaatataggtttattttttcttcagtaaataacataatctcagggttcacagtatgataaaatatctgccgggcgtgatggcgcacgcctttaatcccagcacttgggagtcagaggcaggtggatttctgagttcgaggccagcctggtctacagaacgagttccaggacaaccaggactacacagagaaaccctgtctcgaaaaaccaaaaaaaaaaaaaaaaaaaaaaaaaaaaaatcctacaaaacacacacacatacacacccgtgcacacgtgcacacatatcataagatctctgctttagtttccttcgtagttaccatgaataagtagtcttctgacaaaagagacataggggagaaaggccttaatttagctcactgttcaggttatagtacatcacagcagggaagtctcagaggcaggagcttaaaggttggttgtatcacatccacaatcagaaacaaagagcaaagaatgcatgcttgcttttactgagactctgagactcccttcccaggtgattcctcactgggacaagttgacaaggcaaatcattacaacctctgtctgagacaaaacctggtcacgcccacagggacaaaagcaacagccaacctcccacctcctgtcgtttttaaagccctgagatccacagagaaaggcacatttggttcatccatgtgcatcaggattcagtgtaagagaggaacccagtgtcgttcagcactgctctgcccggctctgcccggctctgcctggcctacctctgctctgaagtcgtatccctgagctttcctgctcagcattcttaggctggggttatagagcatttaccccaaattctcacggtcctgggttcactctttgtgtgtgtgtgtgtgtgtgtgtgtgtgtgtgtgtgtgtgtgtgtgtgtagaaaattgctcccagtgcctctcaaagctgtgtgagtctacttcctcaaatgtgaaacaaggtgttgggagtgtcatggccttatggcctggttggttgaaggccacagctccatgtcagtgcagcagccatgaggctatcctaccctacagggcatcctgctcaactggaccaagggcttcaaggcctccggagcagaagggaacaacatcgtgggacttctccgagatgctatcaagaggagaggggtgagcatagctttgcctgccctcaggggctgtcctgcggatgttctccctcatcacagggccctctcctcagctccatgtccacagtctctgtacttcttggcaggactttgagatggatgtggtggcaatggtgaatgacacggtggccacaatgatctcctgctactatgaagaccgccaatgtgaggtcggcatgattgtgggtaagggcttctcccccttgcaacctttgcaggctgcacaggctcatagcactcagtgccaaagcattaacaacaagagccagtcagaacaggcctggtgcctgagccaggcagccgtggggttcggagtgggagagaatcggcaaaatggcaccattcatgtggcttgtcacccctgccccagtctggctctgctgccaacagcggacccagctctgaatctatgaactgccagatcctaaacctactctggagggaaggagattccagaaaaagaagccaaagctagctcaagcttgtcccgcccacctcaatcagggtgggagctccacaccaatgccctcctcccgccctgcccccactgtctcagaggttcctgagttcttccgaagcagtatttcaaccaaatcagttccctgctctgcacactggtgtagggatgtatgtttgcacactctgcacactggtgtagggatgtatgtttgcactctctgcacactggtgtagggatgtatgtttgcactctctgcacactggtgtagggatgtatgtttgcactctctgggcactgattacccagaaaacccgtgttttaggtgcttcagagacagatctccaataatgtgtttatattcataggctctcatctgtacttaaacttgtgcaataaatcctggaactcattttgtagaccaggctgtcctcgaactcagaaatctgcctgcctctgcctcccaagtgctgggattaaaggcgtgtgccaccacgcccagctttataaacatcattcatcttatattatcttatatatatataaaacattataggtgtacatatacacatacacacacatacacatacatatacatatatttgttgctgttgttgttctgagacagggtctcattatataactctagctgtcctagaactcactctgtagaccaggcctcgaactcactctgtagaccaggcctcgaactcacagagatcgttctgtctcagcctccagactgttgagactaaaggtacatgccaccacacccggctacgtgcatatattttatgctctagcctgacccctctgcatctcttcttatttcctacttttactttcaatcttgccttggtagtgaaaatttctctctccagatgtccttggctatccctgcctctacgtttcctctttaactcctcctggagctcccaagacacttcgatctgaacttagcctagccacccgcagctactctgcccaggcacagctcctctgtggcatgatccgaaagtgatgggtatcttttgttggcacatgacaaactgcagcaggccctgcctacggtggcttctgagtggctctgaggtacctacctacatggtgcctcactcactttgagagtcctctaaaagggttcaggagagagacttcaagatgtgcctgcagcgtgctagagagcaaggggctggagagatggccgagctgttaagagcactcagtgttcttccagaggacctgggttcaattcccagcacccacatggtgacccacaactgtctgtaactctagttccagggatctataacttccactggcttctctaggagtcagacagacacatatgtagtgtgcagacaaaatacttatatacagaacatttttaaaaatttaaaaccatgacacctcacattcatttccggtgtcaaacccacattggcacgcctggtttttcctccatccccctgacttcccaggtaaggagctctcgttggagggccatctgcagactgacccaactactcttcactgcacagctgctccagccgtccagcattcaccccccgggtcttatagcgtaaatgtgcctcatcccgtaggcactggctgcaacgcctgctacgtggtcttatagcataaatgtgtccatcccgtaggcaccggctgcaacgcctgctacatggaggagatgcagaatgtggagctggtggaaggcgatgaggggcgcatgtgtgtcaacacagagtggggcgccttcgggaactccggtgagctggacgagttcctcctggagtacgaccggatggtggatgagagctcagtgaaccccggtcagcagctgtaaggatgccccccgccctcctagcccaccccagtggctgtgctggctgggcatgccacagctggctcacagcacataataaatagcctgcttataagcagctctggggagaagcaagttgatgagccatctgtgagctggttcttttcttcagctcagttatcccctgccctgtgaaatgtggagctgtcatggtggttagtataaagtcccacctctctactcctataggtggcctcccaccagatggccctgaaagacccttagcaaggtttatctggtttaaggaagaaactcccaaagtacatatgcatgccagttccacaaaataagaattggcatttaggggaatgctgtgggttggcagaacatagcttgggaaccagctgccttgagtcatggctactgcggggtattgaggtatactcctctaatctcaccacttaggaggcagtcagacagatttcttcgtgtcccaggccagccagggatacatagtaagaccctgtctcaaaataaaagtaactcagtaaataaaatgaatcatgcctatcacaagttagtcacctatgtggtaccattctcatgctaactattttatgagtttcctcacagaccctcacgggcctctgttaggtcatttaatatctgctggatttcaagacgaaaatatggagcctcacacattagacaaaaatataccaggctgcatgtgccatgccgggcaccaaccctgtgagccactgagaatggttgtcactaaattccagggtgtgggcttcacacaaggcctgtcaccagtaagctttcaaaggaccagaggctccttaactctttgtccctttaatataccagggtcagcacagggccagatgtacccctcaactgggttaaaactgtgcatgttctcaggacctgaggtttctgaagcctctagttacgaatttcggggtggggggcaggttgtgaggacaagaccttggataatggcttgggggtggggatgagagggatcagtgccccacgtggtcacctcctaaccagaatagggcgcttggggatttcctgacggtcagctggcataaccgactgttctgtatccaggtacgaaaagatcattggcggaaagtacatgggcgagctggtacgacttgtgctgctcaagctggtagaggagaatcttctgttccacggagaggcctcagagcagctgcgcacacgtggtgcttttgagacccgttttgtgtcgcaggtggagaggtgccgaaaaggggcaggagcaggggccgagtgcgggaggagaagggatggggtggggacagagactggctcagtggacacagagggatgaagtggggttctaagggaagcggagtgttacgtcaggggcaccggggaacatgaagctagggccagcgctcctgggcctctgtgttttataaaaaaaagctaaggatatgttttatagagcgtggtatggtgaggtgggaggggtgcctcggtggatccatgctgaggcatcccttccccgtgaggtaccagccacatgacgacaggtatagtgtataatagagtttattaagagaaagggaggtaagaaaggaggagagagacagagatagagagacagagtgtcacagagaaagagaagaggccgccagaaacacgtggagagaggggggaggggagaaagggacaaagggatgaggagatgagagtctgagagagagcaccaggagaagccaaacagtcccttttatagcaagccaggcctacctagctgttgccaggtaactgttaggcagagcctaaaaggaatgctaacactgagtgtccagtgactcagtgtccacgttccccagtcactcctcactacccagagtcagtgtcttgcaatttcatgctacagctcggagaatgtggcattgtcatcctcacgacagagaaaacccgggggctgaccaaaggactgctgggcagggcagggcattcccattcccccaggaccctcagtgacttccctccctaataccgcccgcagcgactctggggaccgaaggcagatccttaacatcctgagcactctgggccttcgaccctctgtcgccgactgcgacattgtgcgccgtgcctgtgaaagcgtgtccactcgcgccgcccacatgtgctcagcaggactagcgggggtcataaatcgcatgcgcgaaagccgcagtgaggacgtgatgcgcatcacggtgggcgtggatggctccgtgtacaagctgcacccgaggtcagcctccaccttcgctcgcgctccaacctcccgggctccaagggaggctccaagggcgcggctttcaactccaggcttttgtgagccgatcctgcttgattctccctgggcctggaatactgaatatatactgcagtctggggtgaggggtgggagtgaagaggtggggcgtggcctggtggggcgtgggctgccgtggcgggggtggcaaaggtgggatctaaaggatggtagcagaaatagcagccccattttcctcctgttcagcttcaaggagcggtttcacgccagtgtgcgcaggctgacacccaactgcgaaatcaccttcattgaatcagaggagggcagcggcaggggagccgcactggtctctgcggtggcctgcaagaaggcttgcatgctgggccagtgaaatccaggcaaggacagggacctgggttccacggggactccacaccccacaaatgctcccagtccactagggcaggagacctattctgctgctacccctggaaaatggggagaggcccctgcaagccaagtcagccagtgagacagccctagggctctcagcctggggcaaggggcaagaggatcagcggcaccaaaagcctttcttgctagaatcaactacagagaaaggtgaagcacactcaggtcttgctctttcagcttctggcctcccacagctgtgggtctggcctcccaagggagtgcctcctggacttgcaatggcctggcttccctgggaacacatctccatggggaggtagcttcagcagcttggccagaccagacctgggcccccagaagagtaagggctgcccagacctggctgttttcttgcctgtggctgaagaggctgcaaaaccatgggagaccgactatctagctacatggaggggactttccaggccacaaacattccagagacagtctccttcatatacctccacccctgagtggcttacagttctgggatgaaccctcctaggagatgccagaggatagaggcccagagtccttgctctaggggacctgaaggggagcgcctcactctgcactgttagcaggatggcagcttcaacactcacatcagtgatccgggaagagaagcaagccacccacagcatctctccaggaaaccacccaggtccctctgtccctcatccctgtcaggtttcccagatgccatgccgccctctccacaccagcttggaaccatgggggagtttttaattaaatatttaaaactacttaaacatggcctgctgattgttctttggcctctgtgcatactgatggtggtgaaagcatacagagaaacgtcactgatatacacagacactccctaaactcggccatgtctcaatttgctgtgtcctccagacactatacccaggggcctgtgagaggtaggctataggaataggaatgtggaggcatggggacactaggggtactgaatagcccctgctgggcccagaccccacccccacccccagctgcccttgcaacatgtgaaagatagaggctaggatgccaggctagctgccactctgaggaggggaggggttggtccagctctaggatggtctcagcaacattctatctcagaaccagggaggaagcaatatgggccaaggctaggagctattaaacagtttctaaggtccctccagaggctctggtagatggaatctacctaatgcttttctatgcagcatgaatatgccttcaggtgaacggacttgtatgcgtttaatgcacatttatctctcactgggaacccagggagtcaaaggcttactctgttctctgcttcagaaaaaaaatcccaaattggtggttctgtgggaaagtcacatttttcttgaaatcttgctgttttctggtaattctcgtgtagaattgcttctatcggcttcactttcttgaaccaacacgagcatttgcattaacagagtacaacactcatattggcacactcacacattggaacagattttcagtctttcatcttttcgtacatactgggatctgaggcattgtgctggtttgtttgtttgttttgttttgtctctctttatacatccaacttgaatgattgaactttgttttcaggtagttaggagggtgttataaaatattcatacaaaaggaggccttggagttgtgtgtggtacagacttgtaatcccagcaccagcctgggaaacatcgtgagttccaggctagccttggctacatagccgaccctatctcaaaataaaagaggatggagtgggacttgagtcctaacaggagatagtgcccatatcctaactcaccttgcatagccacattggggtgaggatgaacactgaacctagtcagagacctactcatgatctcccctaagctgtccagcttctctgactcctctgccacactaaggtcctcaaaagttgacggctgctgcttgcaaccaaagccccttggtcccaaattcagaaacatgagatggtctttgtgggccagtttcataagaacccaaaacttttcctgtgaaacagcatcatgtaggcctgccacgtgccagggtttctggattccagatgtggagcaagctgggtgcccaggagaaggctacagctctcagttgggaacgtcagagagaatttggaggaggagggtagagttgagatggagcttaagaaacacaagattccgtatagggtgggtacgcgcgtctcagcaggacaggccgagtgaagagcgcatgtctgaatgtagggagagcagcattcggtcactccaatcctgagttacccccaaatcaagccaatggtcctgtggggctcacagcctggttagaactgctgtctgtccattgtcagatggccagcaggccagaactcaggggttttatctgacccaggggattcaggccagagaccattctcagaatcatgtactgcttcccaagcccagagtatagacagcactagtcaggtgagaggacggtcagatgcaggcatcacagggaatcacaccaccatgacctggactagcacacgtttggagcgtctctgaccagggaagacatggagcctggtcacaagagatggatgggtggatcctaggatgttacacttgggggcctgaaggttaccaggagtgtgaataggatctatgtggagccctgtctttctccaccagcgggggcttccaagtttagcccaatcatccattcctctccttatttgggcctctgggtgataaggctgagacataaagagctgggtggcacgatcactcagtcagaccgccacagatcatggtgagtgctgggtggggaacaagagaccagccacacccaggtgctagtctctgagctgccctgggacagagccagggacttgtgtgcctgtgctgggctcagggaagtgatctcgggtggggaaaggcacctctccctggcactcccacgagactacatgaggtagggaggaggtctttggagaactggagagaggacccctctgatcatcagtattacaggccagtaggaaggctgggacccgaggcaaggctgcagccaccaagcaggcacaacgtggctcttctaatgtcttctcaatgttcgaacaagcccagattcaggaattcaaggaagtgagtagcctatcccaaacagcctctccccgatccggggagccacttcataccccatgcacacggctctcctctgagggtcagtgctcctgcctccaacctcgctcatactacccgagactctcccttacccgccatccctggaagagatggggtgagcagctcccacctgcaggccatctcctcacaggccttcagctgcattgaccagaacagggatgggatcatctgcaaatcagacctgaaggagacctattcccagctcggtgagtgggtccaggagcaacctcccagggacccggcttgttcacctcaggcacttgctccgagagaggacagtgccccgccctttctctcctacttagcctcattcaggcaggaatccccctcccccacctgccacacagctagagctgcccctgcctctgccctcactgcctgggaagcccgggagggcggcctgggtcacctcaagacctactctcctagggagggtaagtgttccggaggaagagctggacgccatgctgcaggaagggaagggtcccatcaacttcaccgtcttcctcacactcttcggggagaagctcaatggtgagttggcaggaggtctgagtctccttagccacagcgcaaacccgacctcacctgacccgggagccccacgtgaggctcaacctaactcccctgaaacctgtgcaccctgcctgcccagggccaacgcagaggatgtggagcgcctgaactggcttgggttcaggaaatatccacttcctaatcacagttttgacttcccagccgggcctgccaacccctttgatgcccaagaaacactctgaattccgactcaagtctcttctgcaccctccaatctaccccaccccacctttattcactcggtatagccggagcccttcaggccccagtacaaagaagctcccttgtactccaagttcatcctgggtggggcctcgcggcaggggatctgagagttcacttggctgcctcgccccgcccccccctccagggacggaccccgaggaagccatcctgagtgccttccgcatgttcgaccccagcggccagggggtggtgaacaaggaagagtaagtgaggccctttcatgccccagggcgggcgccatggggaaacccagaaggtggtgaggttctttgtgcgcctcaggcaggtgagcagctctaccctgggccccagcctcgcactcccagctcaggcattctctctcctcaggttcaagcagcttctcatgacccaggcagacaagttctctcctgctgaggtgagacacccagacccaccaactcctgttcctgtcatgacccgctgccccccccctcacgccccccacagggctgtgttggtgggagccaaatggataacaggatcttctgagaagagatataggctctgttaaaacccaaaagggaggacgcagactcccaagagggtgggtttatctatgtggtgagccctttggccccttccccattgggcctgtttcctaatctgttcagaaacaggaaaatccagcagactgcagtttggggttgaaaaggctgagtccggaagcacagctgttgggacagggtatcatagggtgacatctctgctgtccccctgcaggtagagcaactgtttgcgctgacacccatggacctggccggcaacattgactacaagtctctctgctacatcatcacccacggggatgagaaagaggagtagacaggctgaggtcacctcaataaactctgtgcctgaactagaactgaggtgttggcttgactgtggcagatgggctggagagggaccccacatggtaccaccttgagtcaccctacaccaccaagtaaaatatgaacctctattttgcccacgggtgaactccaagagaggaaacggggtacacacaacctccatgaggcccaggaatgagccacaagtgggcaacccagctcttgatgtctggggaaggaagaaacatcttgctggaccctttctgcccaacatccagctagaggatgcagccccagggactcccaaccacatagccttcccgtgcactcaggtctactgcccactcttctcttgatgtgctgcctgtgtgggcctatgggaaaaccacaggcagaactcaatgctggctctgcggtgcaagccttgcctagcatgttctatgtcctggattccattcccagcaagcacctctcccttaggtgggggaatcacaatcatattgggattataggaagattttgacatgatgggacatgatgctggacgcagagccagatcacatgcaaatgctgaaaactggtctcctgcttaatgaggccctcactaagggttctggcactgggtcacacaactggagtttagggaggggactgcccctacagaattgttagtctccccatatctcccttctctgtcaaaccacaggttgcagaaacaggtgattcgccccacaagtacctagggagagtcaggaaatgagtgagtgctcaggcaggccggggctgagcaggtctcagagctctgcctccctccaagcctgccacaatggccagaagcttggagctgggatgagatgagaaagaggagaggaaaagagggcaggggggtggggggggtggggggggggcgggaaactaacgtttacaccatcccttcctgaaggcaggagagaaaaggcctttttacctgggaaggtgcttggcactggcctctatccaaacctgacaatttaactagagactttaggttcaaatcagtcatttggtggctcagcaggtaagaacactgactgctcttccgaaggtcctgagctcaaatcccagcaaccacatggtggctcacgacaacccgtaatgagatctgacgcccttttctggtgagtcagaagtcagctacagtgtacttatgtataataataaattaatctttaaaaaaaaaaagcagtcattgcagtttctgtggctcataaggtcataaaacccacagcctttgccccccttccatccagagggaagtgcagcccgactcactgggagtgctaaccggaacatgtgcaacccacggctctttgcagacattgcggaagactgaaatgcacagaaaggtctcaggagtgaggccagtggcgaatggccgttatcccagcacccagaaggcagggccaggggggttgagagtcaaagccagtctgggccaaataacagaaccatctttcaaaaagagaatctctaggttggatgtggtctctggatctgtctttgagcagtttcaagctctggagtcatgagaaaccagcagccagcctctggctttcagctgaaggagctggtgcaggtgatatcccctctgctcagtcagagaggccaggtttcatctgcagagcagattcagctcagccttccagattgtccaacatctggcgctccttgaatctgctttcaaactatttgtagaatctcactgtgtctctcatgaatgagcaaataaatcttccccgggcattcattttgtttcatacttgagtcatatgttctactttgcacctgttaaaaggccagagagatcatgaggaccttagaatccccagaacctacaggggaaagctggatgtggtggagagtgctggtaacccagtactgtggagtcaggggcaggtggattcctggagctcactggccagccaggctagactaattggtgagtaacaggccaagtgaaatactctgtctcaaaatgaaaaaaaaaaaaaaaaaaggcagacattcctgaggaacggcacccaaggttgcacacacacataagtgtgcacggctccaggacacactcacacccacacagccctgggtcccacctgccattgcagcttcccctggaaagcagacccaagacatgcagcagggccgcaggagcccgtgcttcaggctgcacccaagttctgtgtggcttgagactaggcctctatactctgtactcccaccgccccccaccctgcaccccagttattcctgaggctcttttcaggggcctttatcagaaggctgcagacaaaccctccacctctgatccttctgtcttcttgaagcccaggaagcctccttgtactccaatccaaggggacattccagactctccagagctctctggcctctaggacctctcaacctattttaccccagggccccacatcgtgaccccccccccaagcttcttgctctacatcagcaccagagttccccatctccctggatggactctagtcaccttctgcccctcctcttttagggaagcccacccatccccacctgtgccccagcagaccctgtgtaaaggcccctgggagcctcttttccctacaatgcggttatctaacggcagctgctggtcttctctgggcattcagggcagggcccactgcagagcacagtgccctaatatcatctttaagggacagatgcagacatctagatgattcttaaaataagaaaaagttaaattttgctctcataaaaggtgaacatgaagccgtaatgggggggaagcggagagaagaacgagagctgaggtcacttcaaggagaaataagctctaattgccgtggcacaggaaggggctacagagaacaataatggccctggtgtctcacagaacctacaagggtggatgctgtgtgctgttagaaaagaggacaatgacacaactcaccaagatatagacaagcaaataaggacttcagagatggctcaggggtgacaagcaccagctgctcctgcagaggaccctggtttgttccccagcacccacgtggggactcacacctgcctgtaattctagattctagtttccgggatctggcctcctcttctggcctctgcaagcaccagacacacaaatagtgcacagacatacatccaggtaacacacacacacacacacacacacacacacacacacacacgaataaatattaaagttttaaaaataaacaaaataaaaacaagttaatccccaggcacaaaggaggtgaggacatccccttgtcttctggggcatttgtttagaaatcttgtaacttcagcaccttttttggattcagttatataaatctatctgaacattaaaagagtctccttccagagttacagcccaggactgtttcctaatgacctgggagccccactgaaatgtcatcaccatgggagacagcatccttatctcgcagatccccaggagggctgaggcctaacttcagcaggcgcctgggtgtgcttgtaaatgcactcccagtcttaaagataagagtttatttttttccctttggataaaggcaattagcacagtcagatggtccagtcctaagggagactcaggattcactgcgtgtaacatatggttcccatatctctccaggaagtgaatggaataggttgcctctggcagcagatggctgtcttcgatctcttctgtgttgccagagacaagtattatggagtgtttagtggttcttctctgtggaagagttttctggattgacaggacattttgtttgtcattatcttatcagcatgacccagtgatccatccttgcagagccttacaagccagggatatgcaatgcaagctgccccctaaaggcccagttagtggaggctgggatggatggacggatgctggtgttttcatgccctctgatttcatgctgagacacctccagccccagaatctcagctcctgccttgcttccacccagcctctctccacattttctcttcagctgaattaacaccacggattcagtgggagtcagactcttagattgctgccctagtatgaggactatgtgaccccacatacttctctggcaggcacgggctgctccaagccccacactgccaaaggcttgatggatgcctgctggctatccacatgccctctccggactggcctccacaggctccccacctgccactaacccatcacacccttcactgcacttgagctcagagggcccggggatgctgcagagacaggagtaggctcacatgtgcagtgaagctgctggaatcttctaggtgtggccatagagagggaatcgtgccagggtgaagaagaaggcatacgtcctccgtgtatgacctcaccctctctggggtttcatttcctcatctgtcaactgactgggcagcaccttaacagcccccgatggttgccccagtgctctcttctcgggggtcactcctcagtgcccacacctccatggctgccctctcttcctccacagtaactaagtcaggttgggatcttggccccagaataaagactccactttcagcaattttgctggcaaataacaagcagacaaaaacggtagcagtttcctgcctagaagacagacataggaatgtcctttcgcctcagatatctgacagtcttagcctttggaaggtgaaagctagtgatctgttgacacattccaaaaaagatttacctaaatagtcacaaacacagagatgaccattcgtggatatcaaggggctaaagatagctcaagataatttggctccagctctcaacaatcacagctccaatcagtcctctgactgtagaccctgctacatggtgtgcctttcccaccttggggatttcaggccacactgcattgctatttgtgcacaggaatcccagagcagagcagagcagagcagagcagagcagagcagagcagagcagagcagagcagagcagagcagagcagagcagagcagagcagagcagagcagagcagagctgcagggctaaaggtatgtctctgcagaattggccagcaggacagatcccatggtgcagctgctccctacactcggggatttttatgactctcacattcccagaggcttcaaatgaagacaatggaattgcacaggcttgagacagcacccaaccaacccctgcagcctcctcttccaggtggtctgcctggagtagtttgatttgggtccagaacttctgggcacatacactctctgggcctgggtgagtacccacatctcctcgccagggaacagcgtcttagaagccatagtcctgtgtgagcggcacccaggagtgatgacaacagagtttagtggtgagccactcttctcagcaaaagccaaaggggctgctccactcagaaggcaagacagcctgaggcatgctgaccccaagctggaagttctgccctcgcttgcttggcgaggaatccaaaggcactatgctgatataataataatactaatgtggcataggggtacacatctttaatcccagcagtcaggagacagaggccggtggatctctatgagtctgagggatctggtctacccagtgagttccaagtcagccaaagctacatagtgagaggaccctgtcaaacaggaaaacagagtaagagattatatacagacagcggcctggcccttagccattctcctagagctcatagaagattcccatggacccttatctcctgtcaaatggccatgcccaagctcaggcagtaaggcaccaggagccacatggtcacctacagcatcttgttttgagccaacaaaatctggccaggcctgtcctgcagatctgtggtccatcggcttagtcaatgtcccagtggagtctatcaataccattagccaataagaaagatcaacacaaatttgagactctagcacgtgttgtaagaaacagaatgtcactatcctctcacccacccagttgctggttggtcactaactccacaggaacctagggctctctgtgcagtctcctgaagccagaactgaatggaaggcatgaagaaccaagaccagagagctcaggccaaccctgagacaatggtgcacgcctggccagctcatctgtgttggaagaacttcagtagcccacagtgaattcctgtgtctgctgacacgtgtccatggtcacatgacaagagactccaaccagaccttcccctcctagtcctccttctcttaaaaaatatatatatatatatatatatatatatatatatatatatatatatatatatatatatgtatagtcaagctgagcagggaagctgagacaggaggatcaaatcagcctgggctatagaacaagaccctgcctcaaacaaacaaaaaaccttcaatgataaccgttaaagcacagtaagacagactttactctgggccatcataataagtgtaggaaccacagcaacatattttgtagcagggacaaagactgggcttgactccagatatatggtattcaaggagccagaggcagtatctgtggtggaaaataaatgagagggaagaccagagcagggaattccgactaagttcactgtccgggattttggttgaatacaaagccagagtggccagacagggaaggggtgagagaaggaacctggtcaggtatggggagtggaggatgtgaccaactagctgtactaagacaggacccatggaagtgagcaccagggcttcccagggctcacccggctcaccatgactttgagagaacgatgtgagtgtagccctcgatcccgacacagaacaggcactctgagtaggttagtagtgaataaagagaaaagaaaagtgtccagccagatacggaggcagaagagcctttagagactgggtccccagactttgcctctgggaacagttaatgctctgcttcctctctgggtagctgactgcgtctcccttcaaaggctgttgtctcaggacctgcttctgcaagcagagctggtatatggcagaggctttgcagaggaaaggagctctctgctgcctgcatctgcactgtatggtttatatgtgtgcactagggtgaggtaaggtgtgtgtgtgtgtgtgtgtgtgtgtgtgtgtgtgtgtgtgtgtgtgtgtgtgtacaccctatatatctatggtcccatttctccaggacattgttgtttctacaaccccaggcatctgaagtacctcccatccttccatctcgtcctaaccttagccctgcctcccctgacgggagatcatcccctggaatgtgctgctgatgtgcaaagccccacagctccaaaatagaaccctatctccctcttggccacgtgccaacagcagcacctccaccccactttcctcaggacccctgaactttgacttcctctgtatcctcacccttctggagaaattgagtgaattccagttagcctggaaaaataccctgacagtctaatgagctcttttattacaaacagccatgctcctgcctgctgctacttatatccttatgactgtcagaaatatgtcacagctccctgggaaggagctgaggagacataatcagaaacagaaaaatcaactgcacataaaacacaggtgcaaatggcttcatcactgagcgtgaccaaacagcccagaacgctgctgatgctggtgcaggcatagctttgaggctcagtgtgccagtggtacatgaagcagagcctctcagctgcctgcatctgcactgcccagtactctagggctcttttctctactcctt

SEQ ID NO: 28 - DNA, 72777 bp, Mus musculus
aaggagtagagaaaagagccctagagtactgggcagtgcagatgcaggcagctgagaggctctgcttcatgtaccactggcacactgagcctcaaagctatgcctgcaccagcatcagcagcgttctgggctgtttggtcacgctcagtgatgaagccatttgcacctgtgttttatgtgcagttgatttttctgtttctgattatgtctcctcagctccttcccagggagctgtgacatatttctgacagtcataaggatataagtagcagcaggcaggagcatggctgtttgtaataaaagagctcattagactgtcagggtatttttccaggctaactggaattcactcaatttctccagaagggtgaggatacagaggaagtcaaagttcaggggtcctgaggaaagtggggtggaggtgctgctgttggcacgtggccaagagggagatagggttctattttggagctgtggggctttgcacatcagcagcacattccaggggatgatctcccgtcaggggaggcagggctaaggttaggacgagatggaaggatgggaggtacttcagatgcctggggttgtagaaacaacaatgtcctggagaaatgggaccatagatatatagggtgtacacacacacacacacacacacacacacacacacacacacacacacacacacaccttacctcaccctagtgcacacatataaaccatacagtgcagatgcaggcagcagagagctcctttcctctgcaaagcctctgccatataccagctctgcttgcagaagcaggtcctgagacaacagcctttgaagggagacgcagtcagctacccagagaggaagcagagcattaactgttcccagaggcaaagtctggggacccagtctctaaaggctcttctgcctccgtatctggctggacacttttcttttctctttattcactactaacctactcagagtgcctgttctgtgtcgggatcgagggctacactcacatcgttctctcaaagtcatggtgagccgggtgagccctgggaagccctggtgctcacttccatgggtcctgtcttagtacagctagttggtcacatcctccactccccatacctgaccaggttccttctctcaccccttccctgtctggccactctggctttgtattcaaccaaaatcccggacagtgaacttagtcggaattccctgctctggtcttccctctcatttattttccaccacagatactgcctctggctccttgaataccatatatctggagtcaagcccagtctttgtccctgctacaaaatatgttgctgtggttcctacacttattatgatggcccagagtaaagtctgtcttactgtgctttaacggttatcattgaaggttttttgtttgtttgaggcagggtcttgttctatagcccaggctgatttgatcctcctgtctcagcttccctgctcagcttgactatacatatatatatatatatatatatatatatatatatatatatatatatatatatatatattttttaagagaaggaggactaggaggggaaggtctggttggagtctcttgtcatgtgaccatggacacgtgtcagcagacacaggaattcactgtgggctactgaagttcttccaacacagatgagctggccaggcgtgcaccattgtctcagggttggcctgagctctctggtcttggttcttcatgccttccattcagttctggcttcaggagactgcacagagagccctaggttcctgtggagttagtgaccaaccagcaactgggtgggtgagaggatagtgacattctgtttcttacaacacgtgctagagtctcaaatttgtgttgatctttcttattggctaatggtattgatagactccactgggacattgactaagccgatggaccacagatctgcaggacaggcctggccagattttgttggctcaaaacaagatgctgtaggtgaccatgtggctcctggtgccttactgcctgagcttgggcatggccatttgacaggagataagggtccatgggaatcttctatgagctctaggagaatggctaagggccaggccgctgtctgtatataatctcttactctgttttcctgtttgacagggtcctctcactatgtagctttggctgacttggaactcactgggtagaccagatccctcagactcatagagatccaccggcctctgtctcctgactgctgggattaaagatgtgtacccctatgccacattagtattattattatatcagcatagtgcctttggattcctcgccaagcaagcgagggcagaacttccagcttggggtcagcatgcctcaggctgtcttgccttctgagtggagcagcccctttggcttttgctgagaagagtggctcaccactaaactctgttgtcatcactcctgggtgccgctcacacaggactatggcttctaagacgctgttccctggcgaggagatgtgggtactcacccaggcccagagagtgtatgtgcccagaagttctggacccaaatcaaactactccaggcagaccacctggaagaggaggctgcaggggttggttgggtgctgtctcaagcctgtgcaattccattgtcttcatttgaagcctctgggaatgtgagagtcataaaaatccccgagtgtagggagcagctgcaccatgggatctgtcctgctggccaattctgcagagacatacctttagccctgcagctctgctctgctctgctctgctctgctctgctctgctctgctctgctctgctctgctctgctctgctctgctctgctctgctctgctctgctctgctctgctctgggattcctgtgcacaaatagcaatgcagtgtggcctgaaatccccaaggtgggaaaggcacaccatgtagcagggtctacagtcagaggactgattggagctgtgattgttgagagctggagccaaattatcttgagctatctttagccccttgatatccacgaatggtcatctctgtgtttgtgactatttaggtaaatcttttttggaatgtgtcaacagatcactagctttcaccttccaaaggctaagactgtcagatatctgaggcgaaaggacattcctatgtctgtcttctaggcaggaaactgctaccgtttttgtctgcttgttatttgccagcaaaattgctgaaagtggagtctttattctggggccaagatcccaacctgacttagttactgtggaggaagagagggcagccatggaggtgtgggcactgaggagtgacccccgagaagagagcactggggcaaccatcgggggctgttaaggtgctgcccagtcagttgacagatgaggaaatgaaaccccagagagggtgaggtcatacacggaggacgtatgccttcttcttcaccctggcacgattccctctctatggccacacctagaagattccagcagcttcactgcacatgtgagcctactcctgtctctgcagcatccccgggccctctgagctcaagtgcagtgaagggtgtgatgggttagtggcaggtggggagcctgtggaggccagtccggagagggcatgtggatagccagcaggcatccatcaagcctttggcagtgtggggcttggagcagcccgtgcctgccagagaagtatgtggggtcacatagtcctcatactagggcagcaatctaagagtctgactcccactgaatccgtggtgttaattcagctgaagagaaaatgtggagagaggctgggtggaagcaaggcaggagctgagattctggggctggaggtgtctcagcatgaaatcagagggcatgaaaacaccagcatccgtccatccatcccagcctccactaactgggcctttagggggcagcttgcattgcatatccctggcttgtaaggctctgcaaggatggatcactgggtcatgctgataagataatgacaaacaaaatgtcctgtcaatccagaaaactcttccacagagaagaaccactaaacactccataatacttgtctctggcaacacagaagagatcgaagacagccatctgctgccagaggcaacctattccattcacttcctggagagatatgggaaccatatgttacacgcagtgaatcctgagtctcccttaggactggaccatctgactgtgctaattgcctttatccaaagggaaaaaaataaactcttatctttaagactgggagtgcatttacaagcacacccaggcgcctgctgaagttaggcctcagccctcctggggatctgcgagataaggatgctgtctcccatggtgatgacatttcagtggggctcccaggtcattaggaaacagtcctgggctgtaactctggaaggagactcttttaatgttcagatagatttatataactgaatccaaaaaaggtgctgaagttacaagatttctaaacaaatgccccagaagacaaggggatgtcctcacctcctttgtgcctggggattaacttgtttttattttgtttatttttaaaactttaatatttattcgtgtgtgtgtgtgtgtgtgtgtgtgtgtgtgtgtgtgtgttacctggatgtatgtctgtgcactatttgtgtgtctggtgcttgcagaggccagaagaggaggccagatcccggaaactagaatctagaattacaggcaggtgtgagtccccacgtgggtgctggggaacaaaccagggtcctctgcaggagcagctggtgcttgtcacccctgagccatctctgaagtccttatttgcttgtctatatcttggtgagttgtgtcattgtcctcttttctaacagcacacagcatccacccttgtaggttctgtgagacaccagggccattattgttctctgtagccccttcctgtgccacggcaattagagcttatttctccttgaagtgacctcagctctcgttcttctctccgcttcccccccattacggcttcatgttcaccttttatgagagcaaaatttaactttttcttattttaagaatcatctagatgtctgcatctgtcccttaaagatgatattagggcactgtgctctgcagtgggccctgccctgaatgcccagagaagaccagcagctgccgttagataaccgcattgtagggaaaagaggctcccaggggcctttacacagggtctgctggggcacaggtggggatgggtgggcttccctaaaagaggaggggcagaaggtgactagagtccatccagggagatggggaactctggtgctgatgtagagcaagaagcttggggggggggtcacgatgtggggccctggggtaaaataggttgagaggtcctagaggccagagagctctggagagtctggaatgtccccttggattggagtacaaggaggcttcctgggcttcaagaagacagaaggatcagaggtggagggtttgtctgcagccttctgataaaggcccctgaaaagagcctcaggaataactggggtgcagggtggggggcggtgggagtacagagtatagaggcctagtctcaagccacacagaacttgggtgcagcctgaagcacgggctcctgcggccctgctgcatgtcttgggtctgctttccaggggaagctgcaatggcaggtgggacccagggctgtgtgggtgtgagtgtgtcctggagccgtgcacacttatgtgtgtgtgcaaccttgggtgccgttcctcaggaatgtctgccttttttttttttttttttcattttgagacagagtatttcacttggcctgttactcaccaattagtctagcctggctggccagtgagctccaggaatccacctgcccctgactccacagtactgggttaccagcactctccaccacatccagctttcccctgtaggttctggggattctaaggtcctcatgatctctctggccttttaacaggtgcaaagtagaacatatgactcaagtatgaaacaaaatgaatgcccggggaagatttatttgctcattcatgagagacacagtgagattctacaaatagtttgaaagcagattcaaggagcgccagatgttggacaatctggaaggctgagctgaatctgctctgcagatgaaacctggcctctctgactgagcagaggggatatcacctgcaccagctccttcagctgaaagccagaggctggctgctggtttctcatgactccagagcttgaaactgctcaaagacagatccagagaccacatccaacctagagattctctttttgaaagatggttctgttatttggcccagactggctttgactctcaacccccctggccctgccttctgggtgctgggataacggccattcgccactggcctcactcctgagacctttctgtgcatttcagtcttccgcaatgtctgcaaagagccgtgggttgcacatgttccggttagcactcccagtgagtcgggctgcacttccctctggatggaaggggggcaaaggctgtgggttttatgaccttatgagccacagaaactgcaatgactgctttttttttttaaagattaatttattattatacataagtacactgtagctgacttctgactcaccagaaaagggcgtcagatctcattacgggttgtcgtgagccaccatgtggttgctgggatttgagctcaggaccttcggaagagcagtcagtgttcttacctgctgagccaccaaatgactgatttgaacctaaagtctctagttaaattgtcaggtttggatagaggccagtgccaagcaccttcccaggtaaaaaggccttttctctcctgccttcaggaagggatggtgtaaacgttagtttcccgccccccccccaccccccccacccccctgccctcttttcctctcctctttctcatctcatcccagctccaagcttctggccattgtggcaggcttggagggaggcagagctctgagacctgctcagccccggcctgcctgagcactcactcatttcctgactctccctaggtacttgtggggcgaatcacctgtttctgcaacctgtggtttgacagagaagggagatatggggagactaacaattctgtaggggcagtcccctccctaaactccagttgtgtgacccagtgccagaacccttagtgagggcctcattaagcaggagaccagttttcagcatttgcatgtgatctggctctgcgtccagcatcatgtcccatcatgtcaaaatcttcctataatcccaatatgattgtgattcccccacctaagggagaggtgcttgctgggaatggaatccaggacatagaacatgctaggcaaggcttgcaccgcagagccagcattgagttctgcctgtggttttcccataggcccacacaggcagcacatcaagagaagagtgggcagtagacctgagtgcacgggaaggctatgtggttgggagtccctggggctgcatcctctagctggatgttgggcagaaagggtccagcaagatgtttcttccttccccagacatcaagagctgggttgcccacttgtggctcattcctgggcctcatggaggttgtgtgtaccccgtttcctctcttggagttcacccgtgggcaaaatagaggttcatattttacttggtggtgtagggtgactcaaggtggtaccatgtggggtccctctccagcccatctgccacagtcaagccaacacctcagttctagttcaggcacagagtttattgaggtgacctcagcctgtctactcctctttctcatccccgtgggtgatgatgtagcagagagacttgtagtcaatgttgccggccaggtccatgggtgtcagcgcaaacagttgctctacctgcagggggacagcagagatgtcaccctatgataccctgtcccaacagctgtgcttccggactcagccttttcaaccccaaactgcagtctgctggattttcctgtttctgaacagattaggaaacaggcccaatggggaaggggccaaagggctcaccacatagataaacccaccctcttgggagtctgcgtcctcccttttgggttttaacagagcctatatctcttctcagaagatcctgttatccatttggctcccaccaacacagccctgtggggggcgtgagggggggggcagcgggtcatgacaggaacaggagttggtgggtctgggtgtctcacctcagcaggagagaacttgtctgcctgggtcatgagaagctgcttgaacctgaggagagagaatgcctgagctgggagtgcgaggctggggcccagggtagagctgctcacctgcctgaggcgcacaaagaacctcaccaccttctgggtttccccatggcgcccgccctggggcatgaaagggcctcacttactcttccttgttcaccaccccctggccgctggggtcgaacatgcggaaggcactcaggatggcttcctcggggtccgtccctggaggggggggcggggcgaggcagccaagtgaactctcagatcccctgccgcgaggccccacccaggatgaacttggagtacaagggagcttctttgtactggggcctgaagggctccggctataccgagtgaataaaggtggggtggggtagattggagggtgcagaagagacttgagtcggaattcagagtgtttcttgggcatcaaaggggttggcaggcccggctgggaagtcaaaactgtgattaggaagtggatatttcctgaacccaagccagttcaggcgctccacatcctctgcgttggccctgggcaggcagggtgcacaggtttcaggggagttaggttgagcctcacgtggggctcccgggtcaggtgaggtcgggtttgcgctgtggctaaggagactcagacctcctgccaactcaccattgagcttctccccgaagagtgtgaggaagacggtgaagttgatgggacccttcccttcctgcagcatggcgtccagctcttcctccggaacacttaccctccctaggagagtaggtcttgaggtgacccaggccgccctcccgggcttcccaggcagtgagggcagaggcaggggcagctctagctgtgtggcaggtgggggagggggattcctgcctgaatgaggctaagtaggagagaaagggcggggcactgtcctctctcggagcaagtgcctgaggtgaacaagccgggtccctgggaggttgctcctggacccactcaccgagctgggaataggtctccttcaggtctgatttgcagatgatcccatccctgttctggtcaatgcagctgaaggcctgtgaggagatggcctgcaggtgggagctgctcaccccatctcttccagggatggcgggtaagggagagtctcgggtagtatgagcgaggttggaggcaggagcactgaccctcagaggagagccgtgtgcatggggtatgaagtggctccccggatcggggagaggctgtttgggataggctactcacttccttgaattcctgaatctgggcttgttcgaacattgagaagacattagaagagccacgttgtgcctgcttggtggctgcagccttgcctcgggtcccagccttcctactggcctgtaatactgatgatcagaggggtcctctctccagttctccaaagacctcctccctacctcatgtagtctcgtgggagtgccagggagaggtgcctttccccacccgagatcacttccctgagcccagcacaggcacacaagtccctggctctgtcccagggcagctcagagactagcacctgggtgtggctggtctcttgttccccacccagcactcaccatgatctgtggcggtctgactgagtgatcgtgccacccagctctttatgtctcagccttatcacccagaggcccaaataaggagaggaatggatgattgggctaaacttggaagcccccgctggtggagaaagacagggctccacatagatcctattcacactcctggtaaccttcaggcccccaagtgtaacatcctaggatccacccatccatctcttgtgaccaggctccatgtcttccctggtcagagacgctccaaacgtgtgctagtccaggtcatggtggtgtgattccctgtgatgcctgcatctgaccgtcctctcacctgactagtgctgtctatactctgggcttgggaagcagtacatgattctgagaatggtctctggcctgaatcccctgggtcagataaaacccctgagttctggcctgctggccatctgacaatggacagacagcagttctaaccaggctgtgagccccacaggaccattggcttgatttgggggtaactcaggattggagtgaccgaatgctgctctccctacattcagacatgcgctcttcactcggcctgtcctgctgagacgcgcgtacccaccctatacggaatcttgtgtttcttaagctccatctcaactctaccctcctcctccaaattctctctgacgttcccaactgagagctgtagccttctcctgggcacccagcttgctccacatctggaatccagaaaccctggcacgtggcaggcctacatgatgctgtttcacaggaaaagttttgggttcttatgaaactggcccacaaagaccatctcatgtttctgaatttgggaccaaggggctttggttgcaagcagcagccgtcaacttttgaggaccttagtgtggcagaggagtcagagaagctggacagcttaggggagatcatgagtaggtctctgactaggttcagtgttcatcctcaccccaatgtggctatgcaaggtgagttaggatatgggcactatctcctgttaggactcaagtcccactccatcctcttttattttgagatagggtcggctatgtagccaaggctagcctggaactcacgatgtttcccaggctggtgctgggattacaagtctgtaccacacacaactccaaggcctccttttgtatgaatattttataacaccctcctaactacctgaaaacaaagttcaatcattcaagttggatgtataaagagagacaaaacaaaacaaacaaacaaaccagcacaatgcctcagatcccagtatgtacgaaaagatgaaagactgaaaatctgttccaatgtgtgagtgtgccaatatgagtgttgtactctgttaatgcaaatgctcgtgttggttcaagaaagtgaagccgatagaagcaattctacacgagaattaccagaaaacagcaagatttcaagaaaaatgtgactttcccacagaaccaccaatttgggattttttttctgaagcagagaacagagtaagcctttgactccctgggttcccagtgagagataaatgtgcattaaacgcatacaagtccgttcacctgaaggcatattcatgctgcatagaaaagcattaggtagattccatctaccagagcctctggagggaccttagaaactgtttaatagctcctagccttggcccatattgcttcctccctggttctgagatagaatgttgctgagaccatcctagagctggaccaacccctcccctcctcagagtggcagctagcctggcatcctagcctctatctttcacatgttgcaagggcagctgggggtgggggtggggtctgggcccagcaggggctattcagtacccctagtgtccccatgcctccacattcctattcctatagcctacctctcacaggcccctgggtatagtgtctggaggacacagcaaattgagacatggccgagtttagggagtgtctgtgtatatcagtgacgtttctctgtatgctttcaccaccatcagtatgcacagaggccaaagaacaatcagcaggccatgtttaagtagttttaaatatttaattaaaaactcccccatggttccaagctggtgtggagagggcggcatggcatctgggaaacctgacagggatgagggacagagggacctgggtggtttcctggagagatgctgtgggtggcttgcttctcttcccggatcactgatgtgagtgttgaagctgccatcctgctaacagtgcagagtgaggcgctccccttcaggtcccctagagcaaggactctgggcctctatcctctggcatctcctaggagggttcatcccagaactgtaagccactcaggggtggaggtatatgaaggagactgtctctggaatgtttgtggcctggaaagtcccctccatgtagctagatagtcggtctcccatggttttgcagcctcttcagccacaggcaagaaaacagccaggtctgggcagcccttactcttctgggggcccaggtctggtctggccaagctgctgaagctacctccccatggagatgtgttcccagggaagccaggccattgcaagtccaggaggcactcccttgggaggccagacccacagctgtgggaggccagaagctgaaagagcaagacctgagtgtgcttcacctttctctgtagttgattctagcaagaaaggcttttggtgccgctgatcctcttgccccttgccccaggctgagagccctagggctgtctcactggctgacttggcttgcaggggcctctccccattttccaggggtagcagcagaataggtctcctgccctagtggactgggagcatttgtggggtgtggagtccccgtggaacccaggtccctgtccttgcctggatttcactggcccagcatgcaagccttcttgcaggccaccgcagagaccagtgcggctcccctgccgctgccctcctctgattcaatgaaggtgatttcgcagttgggtgtcagcctgcgcacactggcgtgaaaccgctccttgaagctgaacaggaggaaaatggggctgctatttctgctaccatcctttagatcccacctttgccacccccgccacggcagcccacgccccaccaggccacgccccacctcttcactcccacccctcaccccagactgcagtatatattcagtattccaggcccagggagaatcaagcaggatcggctcacaaaagcctggagttgaaagccgcgcccttggagcctcccttggagcccgggaggttggagcgcgagcgaaggtggaggctgacctcgggtgcagcttgtacacggagccatccacgcccaccgtgatgcgcatcacgtcctcactgcggctttcgcgcatgcgatttatgacccccgctagtcctgctgagcacatgtgggcggcgcgagtggacacgctttcacaggcacggcgcacaatgtcgcagtcggcgacagagggtcgaaggcccagagtgctcaggatgttaaggatctgccttcggtccccagagtcgctgcgggcggtattagggagggaagtcactgagggtcctgggggaatgggaatgccctgccctgcccagcagtcctttggtcagcccccgggttttctctgtcgtgaggatgacaatgccacattctccgagctgtagcatgaaattgcaagacactgactctgggtagtgaggagtgactggggaacgtggacactgagtcactggacactcagtgttagcattccttttaggctctgcctaacagttacctggcaacagctaggtaggcctggcttgctataaaagggactgtttggcttctcctggtgctctctctcagactctcatctcctcatccctttgtccctttctcccctcccccctctctccacgtgtttctggcggcctcttctctttctctgtgacactctgtctctctatctctgtctctctcctcctttcttacctccctttctcttaataaactctattatacactatacctgtcgtcatgtggctggtacctcacggggaagggatgcctcagcatggatccaccgaggcacccctcccacctcaccataccacgctctataaaacatatccttagcttttttttataaaacacagaggcccaggagcgctggccctagcttcatgttccccggtgcccctgacgtaacactccgcttcccttagaaccccacttcatccctctgtgtccactgagccagtctctgtccccaccccatcccttctcctcccgcactcggcccctgctcctgccccttttcggcacctctccacctgcgacacaaaacgggtctcaaaagcaccacgtgtgcgcagctgctctgaggcctctccgtggaacagaagattctcctctaccagcttgagcagcacaagtcgtaccagctcgcccatgtactttccgccaatgatcttttcgtacctggatacagaacagtcggttatgccagctgaccgtcaggaaatccccaagcgccctattctggttaggaggtgaccacgtggggcactgatccctctcatccccacccccaagccattatccaaggtcttgtcctcacaacctgccccccaccccgaaattcgtaactagaggcttcagaaacctcaggtcctgagaacatgcacagttttaacccagttgaggggtacatctggccctgtgctgaccctggtatattaaagggacaaagagttaaggagcctctggtcctttgaaagcttactggtgacaggccttgtgtgaagcccacaccctggaatttagtgacaaccattctcagtggctcacagggttggtgcccggcatggcacatgcagcctggtatatttttgtctaatgtgtgaggctccatattttcgtcttgaaatccagcagatattaaatgacctaacagaggcccgtgagggtctgtgaggaaactcataaaatagttagcatgagaatggtaccacataggtgactaacttgtgataggcatgattcattttatttactgagttacttttattttgagacagggtcttactatgtatccctggctggcctgggacacgaagaaatctgtctgactgcctcctaagtggtgagattagaggagtatacctcaataccccgcagtagccatgactcaaggcagctggttcccaagctatgttctgccaacccacagcattcccctaaatgccaattcttattttgtggaactggcatgcatatgtactttgggagtttcttccttaaaccagataaaccttgctaagggtctttcagggccatctggtgggaggccacctataggagtagagaggtgggactttatactaaccaccatgacagctccacatttcacagggcaggggataactgagctgaagaaaagaaccagctcacagatggctcatcaacttgcttctccccagagctgcttataagcaggctatttattatgtgctgtgagccagctgtggcatgcccagccagcacagccactggggtgggctaggagggcggggggcatccttacagctgctgaccggggttcactgagctctcatccaccatccggtcgtactccaggaggaactcgtccagctcaccggagttcccgaaggcgccccactctgtgttgacacacatgcgcccctcatcgccttccaccagctccacattctgcatctcctccatgtagcaggcgttgcagccggtgcctacgggatggacacatttatgctataagaccacgtagcaggcgttgcagccagtgcctacgggatgaggcacatttacgctataagacccggggggtgaatgctggacggctggagcagctgtgcagtgaagagtagttgggtcagtctgcagatggccctccaacgagagctccttacctgggaagtcagggggatggaggaaaaaccaggcgtgccaatgtgggtttgacaccggaaatgaatgtgaggtgtcatggttttaaatttttaaaaatgttctgtatataagtattttgtctgcacactacatatgtgtctgtctgactcctagagaagccagtggaagttatagatccctggaactagagttacagacagttgtgggtcaccatgtgggtgctgggaattgaacccaggtcctctggaagaacactgagtgctcttaacagctcggccatctctccagccccttgctctctagcacgctgcaggcacatcttgaagtctctctcctgaacccttttagaggactctcaaagtgagtgaggcaccatgtaggtaggtacctcagagccactcagaagccaccgtaggcagggcctgctgcagtttgtcatgtgccaacaaaagatacccatcactttcggatcatgccacagaggagctgtgcctgggcagagtagctgcgggtggctaggctaagttcagatcgaagtgtcttgggagctccaggaggagttaaagaggaaacgtagaggcagggatagccaaggacatctggagagagaaattttcactaccaaggcaagattgaaagtaaaagtaggaaataagaagagatgcagaggggtcaggctagagcataaaatatatgcacgtagccgggtgtggtggcatgtacctttagtctcaacagtctggaggctgagacagaacgatctctgtgagttcgaggcctggtctacagagtgagttcgaggcctggtctacagagtgagttctaggacagctagagttatataatgagaccctgtctcagaacaacaacagcaacaaatatatgtatatgtatgtgtatgtgtgtgtatgtgtatatgtacacctataatgttttatatatatataagataatataagatgaatgatgtttataaagctgggcgtggtggcacacgcctttaatcccagcacttgggaggcagaggcaggcagatttctgagttcgaggacagcctggtctacaaaatgagttccaggatttattgcacaagtttaagtacagatgagagcctatgaatataaacacattattggagatctgtctctgaagcacctaaaacacgggttttctgggtaatcagtgcccagagagtgcaaacatacatccctacaccagtgtgcagagagtgcaaacatacatccctacaccagtgtgcagagagtgcaaacatacatccctacaccagtgtgcagagtgtgcaaacatacatccctacaccagtgtgcagagcagggaactgatttggttgaaatactgcttcggaagaactcaggaacctctgagacagtgggggcagggcgggaggagggcattggtgtggagctcccaccctgattgaggtgggcgggacaagcttgagctagctttggcttctttttctggaatctccttccctccagagtaggtttaggatctggcagttcatagattcagagctgggtccgctgttggcagcagagccagactggggcaggggtgacaagccacatgaatggtgccattttgccgattctctcccactccgaaccccacggctgcctggctcaggcaccaggcctgttctgactggctcttgttgttaatgctttggcactgagtgctatgagcctgtgcagcctgcaaaggttgcaagggggagaagcccttacccacaatcatgccgacctcacattggcggtcttcatagtagcaggagatcattgtggccaccgtgtcattcaccattgccaccacatccatctcaaagtcctgccaagaagtacagagactgtggacatggagctgaggagagggccctgtgatgagggagaacatccgcaggacagcccctgagggcaggcaaagctatgctcacccctctcctcttgatagcatctcggagaagtcccacgatgttgttcccttctgctccggaggccttgaagcccttggtccagttgagcaggatgccctgtagggtaggatagcctcatggctgctgcactgacatggagctgtggccttcaaccaaccaggccataaggccatgacactcccaacaccttgtttcacatttgaggaagtagactcacacagctttgagaggcactgggagcaattttctacacacacacacacacacacacacacacacacacacacacacacacacaaagagtgaacccaggaccgtgagaatttggggtaaatgctctataaccccagcctaagaatgctgagcaggaaagctcagggatacgacttcagagcagaggtaggccaggcagagccgggcagagccgggcagagcagtgctgaacgacactgggttcctctcttacactgaatcctgatgcacatggatgaaccaaatgtgcctttctctgtggatctcagggctttaaaaacgacaggaggtgggaggttggctgttgcttttgtccctgtgggcgtgaccaggttttgtctcagacagaggttgtaatgatttgccttgtcaacttgtcccagtgaggaatcacctgggaagggagtctcagagtctcagtaaaagcaagcatgcattctttgctctttgtttctgattgtggatgtgatacaaccaacctttaagctcctgcctctgagacttccctgctgtgatgtactataacctgaacagtgagctaaattaaggcctttctcccctatgtctcttttgtcagaagactacttattcatggtaactacgaaggaaactaaagcagagatcttatgatatgtgtgcacgtgtgcacgggtgtgtatgtgtgtgtgttttgtaggattttttttttttttttttttttttttttttggtttttcgagacagggtttctctgtgtagtcctggttgtcctggaactcgttctgtagaccaggctggcctcgaactcagaaatccacctgcctctgactcccaagtgctgggattaaaggcgtgcgccatcacgcccggcagatattttatcatactgtgaaccctgagattatgttatttactgaagaaaaaataaacctatattcagttaagatgtggctcacacacctttaatctctttggctggaatacagacatactcttaggacacacttttgatcccaaacaatgaaggtgatgttagtttgcaaaaagaagcacccatgtttgaaagtgatgtcgaattgcgtggcagacaaagtgacgaatcagacaaagatttgacagaataggatctgcccaattatcagagaagagagaggaaagggaagctacttgagagagcacagaaagagaaaaaagatagcaaagtggcagttttactgaagagttttacagagacaggttacagagagaacaagctagacacaggtagagatagaacaagccagagaataagaaggagcctgaagattagaacaggttgctagaggtagtttgaggccatgcagagtaatttaagagaggaggagagagaagccaaattgaatcagtcagcttggagagaagtttgagcaagaacagctgagttgagccagctagagttcagaaagaacaagaaagggtgagcttattcagcaggaactcccagaggctgaaaatattctatgcctaggttagattgtatgaaagctagaagcttccaggactaggcctaggttagcagacagaggtggtaagcctccagacaacagttacatcaggagaataaaagttacattgaagtatgtgtgtgtatgtgtgcatgtgtgtctgtctgtgtctgtctgtatctgtgtgtgtttgtgtctgtgtgtctgtgtctctgtgtgtgtttgtgtctgtgtgtctgtgtctatgtgtgtgcctgtctgtgtctatgtgtgtctgtgtgtgtctttgtgatgtaactcataaggttgtgcttgctggtgggtagattctcagaactttcccacatctgactcagagtgaagcagcttggtatctttctgctctgtggtgaactgggcctcactcttacagcctgttgccacctcccactacaagcgacttgcttaacctgtttcattatcggtactggggtgaccatagcatgtctcctgagaggctttgccacacagtaagaatcaactgatttatgtctatttgccaaagctttactgataggaagtgacaggggtcacagttgcaatccccactcggcatgggttggggagctgcaactgaaggcagtctcggcagagttcttcccaagtgtttccacccattcatctcctctctcctccacctgctcaccttgtctatgtcttcgtgccttacagggaaggagaaggtgaagcccaggggtagtttcttgtgtttcatctgatgcttgtccaggaagtcagagatgcactcagagatgtagtcaaagagctaggagttgcaccagtgtggcattaggtcagggctgggacagtagcagttctctctccccaggaactgtaccaaagtgtctcttggagatgttaagacatttgacccctgaggcagctccagttctgcctcaccaaattcccacttagagcatcttctcccctcatccacactcttagggacaatgggaggcaactgtatgctggacctgtctagagtttgcttctcaacaggactaaggccttacacttccctgggtggagcaccctgcacattgcagtctccagagcaaggtgacacagcacaggactggctggtgttaaacctggatgactatcctgtgaagctctgggtggagtccattcttagctatgactatgatttctgtctcttttgctgtttcccaggtatactggccccctgcccccgctgaaggccgatcctaatcccttcaagtgggaccactcaatcactgggcattgctgacacattgcagatggatgagggagctgggtcatgacatgcctggttcaaggtctgctaagggaaggctgagtggctataggcgacctcttgcctggttgcccctctggtaaagggttttgctttgtccctggggatgtcagtggggggctctatcttaacccgggtccttctatttcctggtctcccatctgggtctttctcatgcttagggacctttgctgcttaggcaatgtggcttcggccatgccacttggcatatcctgttgctgggtaatggcggcctgtgaggaaggaggggcaagtatggttctggctgctcagtcctaagctttgattttccactaggaaattgaacaggagctggggttttctcttgctgctgacctttcttcagccccttcttgttctgggccggctgggattgggacttgggatactttaagcctctgagacaccttcttgagtctctgaagctgggtggacctccatcactcctgtccttggaaccctcccatcaggaccaattctcctgaggttctgggtgacgttgacccctagccctcctttgccagcccctctggctgctcaccatctccgcagtgcccgtcatggcgtcctcggggatggaatacatctggtgtttcgtcttcacgctccactgtcctgcctccccctcccccactttcaccagcatcaccctgaagttggttcctcccaggtctaaggagagaaagtctccaacttctgcaggcaaagggagagatgttcagtctcgtggcccacctgacgggtggactaggtctggggagcccagacaacgtggctgaggggatgctagcctagacactgggggtggggtaatgctagagcaacctgtggaagggtcaaaggtgaagtaggagcaccagcgggaaaaccctgccttaggtagaggcagccagaacctagggagctacacaagacctagagtgacagaccagactctagaagaggaggagcttccccaggtgacctcagagacaaaaaggccaattctcctagggactgatatctttaggctggacctgagcaccccagggcttcaggtagctggacaaacgcaggtccagtgattcggggatgtcatcgtttgcctagagggtcctgtctagggacagatgagccctgaggtacctgagccttctggggtggaacgcacgtaggtgggcaacatctttacactggcctcctgatgggtctccagcttcaggccacggtccatctccttctgcatccggctcatcaccttcttcaggtcttcctcctgcagctggaactctgccaggatctgctctacctattcggggagggaggggatgggagcagctatggctgccgctagaagccaccacacaccaagggtctcttttggtcctctgactcccgatgcaggatggtctacatctcagactatttaccatcgttgatttcaaacattccaaggccagaccttcaatggttattggcctgggagctctggggtggtgatcccagggagatgggtagcctttgcccttaacaggaccttggcagcacgatgacttaacttgcctccccttgtccctaagagtgtggatgaggggagaagatgctctacgtgggatttggtgaggcagaactggagctggcatcactgtagagagccaatatttttctgctgtaaggctttatggaatgaataggccagtcaggatgcacagggtagccaagactagagtaggtggagtgacctctagcgccaaacgggtctggctagcaaagcatggcgtcccacagtgtgcaggctttaagtggagagggagggcactctggatactgacatgggagacctgtgtgtgaatagctcagatccaacactgccattcctgcatatggatggcctcctctgtttctttcctagatttgtaagatttcctgagaactagcagccacaggacacgtgtcttctcctttcaggtacagcagtacaaaggaacccagtgactgcccaggtgtggtggcacatgcctttgatcccagtacttgggagtcagtggcaggaaaccctgtctcaaaaaccaaaccaaaccaaaccaaaccaaaccaaaccaaaccaaaccaaaaaccaaaagggacccaattataagatatttttggtcttggggaacaaggagggttgatcttaacaagggttcaatcctctggccatggtgggccccatccctgcctctctgtaatggctgtccctcctagtgagtagaggcctgggccctggctgagggtgaggttgaaggtgagggttaaggttgccttcagttcaagattctccataaaagaagccaacactttaggctggggtctctgaaaaggatgagggctagggagatggctcagggtgacggggtaaatacatggctggactctggctgatgagggctccaagtgacttgtactttcctcttggagttgaggagaacttgtccagagcttagagcattctggtgagaatgtagcgaatggtacctgctgtttcttatttcactgtggcgagggattggcagggccaatatgtttgtgccatcatctttatacagatgttggaaagagcacgtgtcctggatggtcccaggttctgcagtttctatgtcactgtaccttgaaggcctggacatgactgaagccaaactgatgccaaatgtccagaagaccaggtattgtctctatcaaaatttaattttgattcagcaacttcaggacatagaatatatgaacacatcacaggaaggacacaggacctcctctacaatgaaataagacccacaaaaaaaacccctaagacactgcattcactcacaaggccatgccgaagaaacccaagacacataccgccaccatgccaccttctgcagttttccagagaagggggtagaattttctggcattgaggaagtgagaaaggaccttctgagagcccagccccactctcataaacagaactgcacctggcctgtggatctgccaacatttaaaaatttatttaaaattgaggtccttctacagaagtctccaacaaactaggtctgcatgctcaggaggctttagggaagtggagaggctgcccccaagtggtaggacctggccacagaaccctcattctgagccttggccaaaccagctaggcttcagtacttcccatactgacccagaccactgtggctagaaggacacctcgcattccccacgttgtctttcccaatgcaggcgatgcaggtcggagggtgggtgctggaagaggcttaggctgcagtagctaacgggctctgctagacagcgcctcttcgtgtgcactgggtctgaagatgcccatactcctggcaccagctcagtgtgcaaccctggggagaggcttcacagccctcaggctgcgggtttgggaggggaaatgggcattgtgtcagtcttaacagcctctgtgcattgtgcacatgagcaaggattgtgggccaggcctatcgtgggtatccctgggacactccatattcctgaatcattccaagacaatccagggttgctaaacacacactctacaacccacccccacaaagccacggtgtgcagagcctacagagccaagagtgcggagctgggttgtaagcagaagcctggactcggagccgacactcgcccattgggatccttcctgcaggacttcaggagctggctttggcaggtgtccagttagccattctcacgtgtctctagaagtacctcgtgctgcagggagaccctggtagctcactagattctcttgtgggccttgtctgaaaagtcacaggacacataaccaaggttcatggccacgagcaaacatagggcttttcctgtgggaggactcccttctcctgagtcccctgaagagcactggcaggtttcctgagctgatgccagttctagccagtgtgctctgtggtgtgtgggatgttagagaagagctgagagcatttgctgtctgtctgtttgtctgtctgtctgtctatctgtccaagcacagtaccacacgaggccagtgctcacggagagtcacggaagagaattacatgacagtagagttgagttgggtggtgaggcaaggaagtgggtgtcagggtgggctgaggggtgcagctcctcactttcctagaaagtgaggaagttgcatagaggggagaaaggagtcaccccgacaaccacgagaaggctagagacgcctggctacagaatgcggacttcttgagacagggtggaactgggtggcattaggctgtctccagaatctgtgtactgtgacagtgcacacaggacagagatgtggtaaggtctagagaacatacagacatctggtgacagcttggtctagggggtttaggaagagacacactaggaggatcacatggacgagcctgagcagctgcagcagggatccactgggattaggcatcctgggaaaccaatctaagcaacccatctgcctgcacatagctgcctcaagtatgtatggctggctgtgtgcagacacagttcagggaaacagtggggaaacaagcccttagcatggagatgttcttatacaagtctggattaggtcacagggaactaatagcaaaagtgggagggatagagctggcagggtcagatccctgagcacactctgattgcccaccttataatgcaggaaaaaaagaagacaccatcaagtgctgtgtttaccatcttagcagtgggagaggtagccccagggaactgtagaccccagaggatctggacaagggccatagcagcctacagacaaaagccacagttctgaaggtccagagacagtgtcagcacctgcatgtccagtcttagcctggatcctcttttccaaggtcctatggtggctttatacaaaggagtgagtggccctaggtcagccatccacatacttctggagaagaaagccccacactctactgagtacagccatgaggtgccccttagagatgagcagcactcagaaaacatcccgaggctaggcactgtcattccagaaacaagccctggtggactcctcaagagctggacaatcgtagcaccaatgagaagggatacagggaagaagggacaaatccaggtctcctacaggatcgcactcatccttgaaccaatccctctctccaacctgagcatgctgccctccaggtctcccccaattcaaggcctttggcctgtgaggggcccttaccagagtcaacgactgggctcccctccttgtagtatccacagccatctgaggataagcaggggtcgttggggaagtagagatgttcctgactcccgaggccacctgctgtgggtgaggactgtctggctgagtgttgcaaaagacaggcagccaaggacttctgcactaatgggtcagtctgagaggtggctcctaaaataccctgcctactgccacggggtcagggacagggccagggccaggacaaagaaccacgtgggatcaggtttgacaaaggccacagggacagggctatgagacaggctaccatgttctctgaacactggttggagctgctgtggagaggttgatgaagtggctggagctagcccactcacatgcccccttccagacttgttacagaagatgatgatcggatgctttgaaacaggtaggcacgaggagctgtgtgagccagtgaggcttcagacttgtgggtagtggagatcctcatggggtttcacctatggagggttggctatgcacagccacacagtctggggctccaccatagaacttggctgggaaggagaagctggaggaaggaaggaaggaagccaagcgtttgtggaagggagagtttggtcacggcatggactggggcagatgggaaggacatctgtgcacatacaagctggagaagattcaggtcctctggcttccctgacaccccctcccctgcaagtaaaacaatttttttttttaactattgtggaatcttcttaaatttcctttaacccaaacagcaagaaatagaatagaagaggccgttaaattttgtgacagcaatgctcaggacattctgggctcttctacggggttcagacacctcctagacctttctttgggtttggccaggagtgaccccaacatactctgcacttgctggcatttccaagccctgctaaaattagctgccactggcaagtatgacagggtacatagggtgcctgtcagaatgccaggttttcccaagattggccagtatggtcaccccttgacacgattgatcactttcccaaaatagagcaaagctggcctcaccagacctcatatgacaagcctctgactacccaacccctggctctgagccccttttgctttgggggttgagctcatgcctgaatttggggtggctggtcttggagctgcctgggagccttgctcccatctcctgggcaagtcacaggagaggaagaggaagaggaggatagaggaggaggaggaggaggaggaggcaaatcttcaagctctaatctctgggaggtgggaggaagggtgtgaaccaatgcaaagccagagacaaacggagcggatttctgtctcagccagactgcgcatgagcagcaagcatcctcccagaacatgtcccagggcgtggtctctttccagtcactgcacctttgagggaagaatgggatctagttggctaagcacccaggacaactctggcaactcaccgcccccccctgtgaatccacctcgtccaggagtaccattctgcagtaaggacacgtagctcgatgttcttcctacactcaacagtcacgactggagaggaggggacaggacagaaggtgccttagggatgagatctcatgatggacgcacaggacatggaaagctgcatgaacactgtgtctgcttggatttggagaaaaacagagccttgcagccatgagttagagcattttcccatcttcatctttcatttgatagagggagtgagtaaactgaaggaaccattttctgtcctagttggtgaccttccacctccttttttctcctctcatgtgtatgcaagcatgcgtgtgtgtgtgtgtatgtgtgtgtgtgtgtgtgtgtgtgtgtgtgtgtgtgtgtggtgttcatatgcacgtgcatgcacctatgcactgccatgcagaagaggccaaaggaggagaatatgtgtgtcttgtctatcacttgccatcttctctgtttgagacagaagcgaacatgaagtttatgttttcagctaagctggctgcggggctctgcctgtccctgtcctccaacttctggtgtattagtaatgcagagccatgcttgggttttacgtgggtgctggggattcaaactcagtttctctcacttgtacatcaagtgctcttactcagtgagcacccctcccccaccccggtccctgtgccttgttcaagaagtcatttcatacacgtggctgcattttctattcatttacctcaaggtatcagcaggacaaggatagtaactgataatcaagcttattcattctagtatcaaaaaataataatcacagcattgggcagcacttccgtgcagtcgtaacaaaggtcacgtgaaagctgacaggatagctcagcaggtagagcacttgccatggaagcctggtgacgttagtctgatctctggaaccacgtaaagatgacagagagggggctgggaagatggcttagcagtgtagaactctgatgctcttccaaaggactcagggtcaactcctagcatccacatggtaataactcacaactttctataactccacttccctcttctagcctctctgggcaccaggcacacgcatagtgcagagacatacatgcaggcaaagcatccaaaagcataaaataaagaaaaagtaagatggagagaactgcatggttgtgtgtgtgtgcactcatgtgtgtacaccatagagcgggtattccacagagctgttgtctgagctggacaagtgtgccataagcacatataataataataataataagttaaaattttaagacaaaaatagtttttaaaaaggtaaggttggttctttttttttttttttttaaatgtatatgggtgttggaatggaacccagaagaacagcccgtgacaggccctctctccagcttgtcaggctgatctctaaagttagcacatgaaatgtccctcgcaactgggggtgctatctactttggaatgttgtggaacctctaggaggtggagcctcactagaggaagtgagtccctgggtggcaggccttatggtttgatagccagaccctgttagggacaagcaaaagaaacttgtttaaagaactgccattttgttttcagactccatttagtcttgggggaaactaagttcaaggtcctaggtgctaggggagattggtgctaggtgctaggggactttcccacagctggacagcttctcgagttagggcagagttgtctgagttgtcatctcaagggtagcctccatcttgctggcaaggggaaacccagttcaggttctcaggctcaggaatcaacgcccatcctgattgatggggaaatgtaacttggcacagatgtttgtgatttgtgagcttaaatattctggctcactgttatggtttaactccagagtctgttctgctgctctgatacagtagtattggcttgattctaacacatttttatcatatgcactggcctggtgtctgagttatattggatttaaacagaccccagaacaatcccacttcctgccttctctttgcttcctgactgtggactcagtgtgaaaccagctgcctcgtgacctagagctattccttccctgccgtgatggaatgtgtcccctaaaaccagaagccaaaataagactccttttaagttgtttcttagcagacactgtcacagcaaaggtaactaacacagtatgcaaagatgtcaatgactgtctgtttaaagggattgcagctaccatcctgcaatttcctactagacactggcctggcatacgcttcggctatacctcctgtgtgcataggtctgtcttgggtaacggataggattttgcagaaatgatggcagctatgccacaagacactgtggttcctgtctttctcttagtctgttccttctgagggaggccaagtgccatcaggtgagaacatgacatgggaagaaggtgtccccataacattgggaggaaaaaatgaagacactgataatctgccatgttggcagcagatctaccagccacaagcctactccctgatgctgctgcccagccactcccttgactaaatctcaggagagaccaaaaggcagaccacctgctggacccacagaaaccatgcaggagagtaaagtccacttgtcttaagtctccacgtcttgaaagtaatttttaaaaacataactgggcttgttagcacgttgctaacataaagcaaatggtactttcttttttatattgtttgttaatgctgtagttttgccatggagatgagaaggagatgttgatgatgttcatgttgaaggaaatatgacaaatattataccataatgatgtgaatatgatatatatatatatatatatatatatatatatatatatatgtattttcttcaacttgttatgtagactaggctggcctcaaattcatggagactcacctgccctgttacaagtgctgggagtaaaggcaggagccagcacacatcacttgaatattattttaaaattaagtttaaaaaataacagattagagaggtatagctatttttttttttttgaacaaaaggtccaaggcccagattctcagttaaattggccacatttccaggctccttatctagagggaaatgaagcagatgccagggagtccacaatgccagaccacccccaactggcctgttctctggctgccctcagtattagtctagttccaggtacaggtaccctgatgcaatggggtatggaggccaatgagtgttgcaagtgtttgcttagcgcagagtgaactagaaattggccgggcctttgtgtaaaggggcaggccataggcctggtgagtgggaggtgtcagacggtagaaaatggtttgtgaccagggtgttggggatggagaacaggagggagatagactaagagacagcagaacccaccctgacaaatgccacagctacctgagatcatcgacaaccttttgtaggatgctgtggcagagttttgaccaaattacaggttgtatgctctttggagactgaggcccatgacatttaagaggtttagaaggatgctccagcctcaaaccactcagtgggattcatacccaggccattctaattccaagattgttaagatttaagcacctcttgcttctcctcctttgtcttgctgtatagctatgatgccctcaaacccatgatcctcatactgccaccttccaggtgctgggatcgtttgtccaagactttgttcttccggactagatgtggagggtgcattctagggctaagcacatgggtcaggaaacaacctcagagctgcttccgtgggaaacagatgtaaaggaggcgtcggcttccgctggcaggtgaggggatatggtggctagtctgcttgtctctgagagcaggaggggatgaaggtctgagaagccagaactctacatggggtggagatggggcatgggggcggagcacggaatggggcgggacagagtgcaaagcgtggggcgggcgagggggcggggcgtggaatggggcagaatgtgaggcgggagcaggggcggagaattgggtgggaatggagcagagcggttctgtcttgatgccaacttcatctactctgctgctgcccactgcagttgcctttcttcactgatatcagagctgggcctctccaggagtcagcctttcctccagccccattccaggacagtggagatatctagacttgagtatctatcagaatttcagcctctccagtgtgaccaacaggcactgttgcatcacccagaccatatggtgtaagccacgctagtaaatccccttttaatatataattctatcagtcatgtttcttcagagaactctgatacagtatgtgaagaaatagggatcacgaaaaaaaaaaaaaagaaggaaactattaatcaggaattcagactctggagtcaaatgtcttagacatgattagtagatggaggattcggggaagtcaggagagacatgtatcaacagatcaacagataagagatggtccatcataaaagcatggaaggtattaaaaacgcaatagaaatctgagggcttaaaagcataacagatgtggaaacgtcactgaagagctcaatggcagatttttaaagctatctatttttattttatatgttggaatgttttaacagcatgtatgtctgtgcatgtaccacgtgcgcgctggggacccttagaggccagaaagaaggcactagatcccgtgggactggatttactgacaaccttgtaagccaccacgtgagtgctggaaatcaaacctgagtcctctgcactgagccatctctgcagacctctgcagaccatcccatgggacccatcgagcatgtcattataaagacaactgcttttagaaggagaagaaggtgatgaggggcagagaatagttggagaaatagtggtgaaacagtttccaagtctaatgaaaaatacaaacacacagtggagctcctagcaggagagactccaagtgaccctggttgagacacattgtagtcacagtgtcaaaagacaaagagatgcttgaaacctgctctacccacattagggatcttcagggagactgggaagctgtttctcatcagaagctgccggggccagccagcagcattcttaaagcattggaagaaaaagctgtaactgaggcttccgtggtctccaaaactagtctcccacagaaaggataagatatttcagatgaacagaaacagatagatgagtcccctgtaagcctgccctataggaaacgctacagggagatattctagacagaaagctgggtcccttttggttgagaagggacccagcgtgggttaggacatcttaagaagatagagttgtcgttcttataaagctcaaggtacctgtgagtatgtcacttcatgtggcacagatgacagcacacagctgatgccatactcagcagtaaaatacatttttctccactaagtcaggaacatgacaaagagacccacttctaaacagcacagtactgaaatctctagccagaacaattggggaaggaaaaacaaataaaagataaccaaactatgaagggctggagtgctgatgtgttttaccctcagtgtccatctgtaaaatcctaattaccagtgggatgatcttagggtgaggcctctcaaagctaattaggtcacaagggcagagccatcagggattcgactatgtaagaggtcccaagagcttctagaccttgcagggtgtgatactgaaaatgagacttgaggaacgggccttgaccacatgacagaatgatcttggactccccagactccagaactgtgaaaaaaaaaaaagagtctgctattttcaagtggctgaatttataaattttctacagtttccaaatggaccttcaactacctctaattcagaagacatcaccgtatctgtagaaggtcacagctaatccgtaaaaatcctctcattcaccaaagttgcaggatataaaaattacacaaaagtcagttgtatttttatacaccagtagcaagtaactgaaaaaaacaaaaacaaaaacaaaaacaaaccatgtaaaagcaactccatttacaacagcaccaaaaaggagttccttgataaggaagtcatcacaacagcaaaccagtgctgaaaggaaggagggcacctcagcaaatggaagacactagccctgggaaaaccacactgccccacgtgatccacgggtgctccgcacttcctaactctctaaattatgactcctattttgaaatcaatatggaatctcaaagagccctgaatattcaaaacaattttgaaaaaaaaaacaaaaaccacaacacaacacaccaaatagtcccagtttcaaagttactacaaagtgtcaaagcaaccaagagtatcatgatagatgttggcttaatggcagacagacatctcagtgacacagagtagcgtgcccagtaacaatgtttccctgcatatggcttgtgttttgacaaaggtgctaagacagtacaggggacgaaaaccaatctcttcagtagaagatgttgtgtgaatttgacatccatgcacataagaaggaagctgaattctctcccaatactataacaaaattaccttgtcgtggatcaaagggcgggtagaatcaggtgtgtgtgtggcgatagcacaatgaaacccattactttgtatgccaaacaaaacttaatttaaaggccaggcgtgttggcacatgcctttaatcccagcactcgggaggcagagacaggcagatttctgagttcgaggccagcctggtctacaaagtgagctccaggacagccagggctatacagcaaaaccctgtcttgaaaaacaaacaaacaaacaccccaaaaaaaaaaaaaaccaaaacaaaccaaaccaaaacaaacaaaaaaaaacccttaatttaaaaagaaatggattgaaatggtgaaattagaacattcttagaagatatgggataaatcttggattttaacagtggcctcttttgaacttttttctagtgttgaggatccagtctaggtcttgatgctaggcaagagctctgccactgagccacatacccagccctggcataatgtgacacgaagggcactgtaataagaggtcacagatcaaccagacttcatgaacgttttgagccatgtatggtggtctgttccagtactcctagaggctcaggagactgaagcaggaaggtcatttgtacctaggagtttgaggctaatctgggcaacgtagcaagagtacctctcagataacaatggcagcaaacaacaacagactcagtaggcagaagggcaccttcaagagagcgttgaatggaagaaggtatttgttaatcttgcatctatctagtaaggagtggcttaattcacatctatcaataagaaaaattcttacaactcaacaatgccaacaaaaaggcaaacaaccccatatattggggaagaaaattaggacccttttctgaagaagatttcagagtagacaaaaacacatgaacagatgttggtaatcattggtggaaatgctaatcataactgtgaagtcccctcctccacccactaagacatttaggacagaaaataacaagagttgttggccatgatgaagtattggcagaggagagagtttggtccctcatatgtaaatgtgcatgcaaatatgcacacgaatgcatatgcaaacgtgtgaataattcagttgctgtgcaaaaacaagcttggtgattcattgtaaagttagacagaggataccatacaacccagcaattgcacacccaagtacactcttttaaaaacctgaagtgggaactcaaacaaattcctacataccagtgatcaatcataggagtgctattcacaacagccaaaaggtagactcaccccaactacctatcaattgataaatgaatgagagaaaaggtgtctgtgcaaaccaggaaatgctatttagccatgaaaaagagaaacgttttgatacatgacataacatagatcaacctcgacaacattaaataagcaaaataaactttatatgaaaagatatatgacgattaccgttttgtaaatacaaaacagtaagttcattgaaataggagtggtgcctgcctcggtgtggggggtagaaagttagtgcatttctgaatggagtgataaaatcattttggaaggagtgaggagttacacaatgttgttggtaattaatgccaccaaattgtagttttaaaaatggttaaaatgggtcctggagagacggctcagtcgttaggactgcttgctgcttttccagaggctgaatttggttctcagaactcacaccacgtggctcacagtgatctgaaaccccggttctgaggatttcatcacggtaaaggagagactgactacaaagcgttctcttttcatcgtaagcaggttttttactccctcaatcacaatcacactctgttctcccaaggaagccatggcaaaggttagcttaggtttctcacttaaacaaagggactcacgctggctgaagattaatttgctgtgacttcttacctcaatgtgcaattccagatgcctcgaagtcccactgttaggagaagatagatctaaaagctagggtgggaggagccgttggcagcttctcatgaaaaccctttaagcttggcttgaaatgaagtctttgattatccaaaccaaaagataattcttgggacccataatttatcagtggggagtgggtcatgaaaggacagtgcacactcagagtgcccaccagtctcccaaaggtggggccgaggctggggaggatgtgagctctccacagaggacgatcagtgttctcaaggtctacacttgtccggtccatccaggtcctgcacggtgctacatcttagtgctacacacttgtttttctcactttctctttctgaatggaagctgacacttaagtttggttcctaaatgtccccccaaggtcctatagggataggaactttacgtcatgggtgggggcgccccatgagggcagagcatgagtccagcccttcctcttctttctttgactttctagccacgtgtcactccatggtattctcatatcaggactgtgtcacaagttccaaggagcaggactaaccagtcaaaaatggggacagtttaaaacctgtgagctaaattaaaccttttatttgtataagctgattataccaaatatttctggcagtgatgggaacctaatgaagatctcctacccaagttcccatatcccacggtagattgctagtttttcctttatgatgacaaccaattagtggcactatctacatgcatggcgagccccgtctccggcctcccagatcccgtactttgctttgaatgcaggaactgcattggttgatgcacattccatgtgtgagaagaaagtgtgcatgggattgtgaactgaagcacacagaagagtggacaatggaagagatcatttcccatggccattgacccctttttccacgctggtgacgatgctgagctcctggctaccatgtctttctcagccttcttcctaacaagctgactccatagaatgtgagtgactgtacaattttcagttccacatgcttaagaagagaatatctttgcctgcctcttcctggctagacgcagacagccatcggctttagggaatagtcacagccatggaattgaagaagtctgcgttcccaacagtgtggataatctgggccgtcagacctcccacactaacgtacatgatgagaaacacagtctttcataagactggttacagcagtgaagtgtgtcctaaggaacacagcatacaggattgattgatgatcagcaagagatttgaacaggatatgagatcactcactcattccttcaatactgctgcgtatcacgtttgtgctcaatctgagtcacaaaagtgacttatttcttttatcggtctgccggtccatctgtctgtctgtctgtctacctagatttattgcagtactcaggacaactgtgttcaggaaatatggaacacatcctttgcagtcatgctcatctcctctgtcttgttccagcttgggccacctaagcaagaacttctagaaactgatatttaacttccaggagtctagtgtctagcaaacaaaaaagagagacagtttagtcaaaactcaaagtggcagactttccttcccctccttggctgctggaggactaatgtcatcacggatggctcagttgctgtccaggccgggaagttcatgactaagtaagtgtctactaccaaggaaacaaatggttgtgaatgtccttcatcctgggaaggcaacatgccaaacacattcagacaattcagctaaaggtagtcaaaatgtacacagccacaccagctgttatctttgtatttgcacaatgggcttcgtgattatgtatgagcctaacacagacttgtatgacatggcctttatgagaggcaaaagaccttgagataccaggaagggcagcagaacagaattggggggaagggagaagacctgccaaggccaatggggactggatggtggcaaagggagtgaagactcttccaagactcatcctttggagtggcaccaatgtctgaaaagaggaccagaaactgtaaacctttttttaaaaaaggaaggaggcagtggtggcgcacgcctttaatcccagcacttgggaggcagaggcaggcggatttctgagttcggggacagcctgttctacagagtgagttccagtacagtcagagctacgcagagaaaccctgtctccaaaagacaaaaaacaaacaaaaacaaaagaaagaaagaaagaaagaaagaaagaaagaaagaaagcaagcaaagaaagcaaagaaagcaggaaagaaagaaagaaagaaagaaagaaagaaagaaagaaagaaagaaagaaagaaagaaggaaaggaaaggaaaggaaaggaaaggaaaggaaaggaaaggaaaggaaaggaaaggaaagaaaggagaacaaggaaagagaagtagagaagtgtccatggacactgtagggtctttggagaacataagagagactgtgggttcttctttattgtttgtttgttttgttttagacaggatctcactacatagcactgactgtcctagaactccctatatagaccaggctggcctcaaactcacaaagatctgcctctgcctcctgagtactaagacactggggtttcagctggatcttgtttgtttgtttgtttgtttgttttcttgtagaacatgattttaatattttcagcagttaatattcaacaaacaaaataataatttaaaaatatattttgttgatatgtctcccttttcatttctgattttattaatttggatactgtttctgtgccctctggtaagtctggctagggtttatctatcttgttgattttctcagagaaccagctcctggttttgttgatttttttgtatagttctttttgtttctatttggttgatttcagacctgagtttgattgtttcctgccgtctactcctcttgggtgtatttgcttcattttgttctagagctttcaggtgtgctgtcaagctgctagtgtaagctctctccactttctttttggaggcacttagagctatgagttttcctcttactgctttcattgtgtcccataagttttagtatgatgtgtctttattttcattaaattctaaaaagcctttagtttttttctttatttcttccttagccaagttatcattgagtagagcattgttcggctttcgtgtgtatgtgtgcttccattgtttttgtcagtatttaagaccagtcttagtccatggtgatctgatagggtgcttgggattatttcagtcttcttatatctgttgaggcctgttttgtgaccaattatatggtcagttttggagaaggtaccatgaggtgctgagaagaaggtatattcttttgctttaggatgaaatgttctataaatatctgttagatccatttggtttataacttctgttagcttcactgtgtctctgtttagtttctgtttccatgatctgtccattgctgagagtgctattatggggtgcgatgtgttgagctttagtaaagtttcttttaaaaatgtgggtgccctttcatttagagcatatatattcagaattgagagttcatcttggtagatttttcctttgaccagtatgaagtgtccttccttatcttttttgataacttttggttgaaagttgattttattcgatattagaatggctactccagcttgtttcttgggaccatttgcttggaaaattgttttccagccttttactctgaggtagtgtctgcctttgtcactgaggtgtgtttcctgttggcagcaaaacgctggatcctgtttgttagtctatgttatccagttatccagtctgttagtctatgtcttttattggggaattgagtccattgatgttaagagattaagatgttaaggaaaagtgaccgctagttcctgttatttttgttgttagaggtagaattatgtttgtgtggctatcttcttttgggtttgttgaaagattactttcttgcttttgctagggtgtagtttccctccttgtgttggtgttttccacctattatcctttgaggactggatttatggaaagatatgatgtaaatttggttttgtcatggaatatcttggtttttctgtctatggtaattgagagttttgctgggcatagtagtttgggtcagcatttgtgttctcttagggtctgtatgacatctgcccaggatcttctagctttcatatctctggtgagaagtctggtgtaattcagataggtctacctttatatgttacgtgaccttttcccctactgcttttaatattctttctttgtctggtgcatttggtgttttaattattatgtgacaggaggaatttcttttctggtcccgtctatttgaagttctgtaggcttcttgtatgttcatgggcatctctttcttaggttagggaagttttcttcttttgttgaaggtattaccggctctttacgttgggaatcttcactctcttctatgactattatccttaggtttggtcttctcattgtgtcctggatttcctggatgttttgggttaggagctttttgcatcttgcgttttctttgactgttgtgtcaatgttttctatggaatcttctgcacctgagatgctctcttcttgtattctgttggtgatgcttgaatttatgactcctgatctctttcctaggttttctatctccagggttgtctccctttgtgatttctttattgtttctatttccatttttagatcttggatggttttattcatatccttcgcctgtttggttgtgttttcctgtaattctttaagggatttttgtgtttcctatttaagggcttctaactgtttacctgtgttctcttacatttttttagggagttatttatgtccttcttaaagtcctctatcatcatcatgagaagtgattttagatcccagtcttgcttttctggtgtgatggtgtatccaggacttgctatggtgggagaattgggttctaatgatgccaagtaaccttggtttctgttgcttctgttcttacacttgcctcctgccatctaattatctctagtgccacctgccctcgctatatctgactggagcctgtccttcctatgattctggtggtgtcagaactcttagatttcagctgtctctggatcttttttcttaaaggtcttgtagctcctgagtaggaggaagcggtagattagggatggaggggagggggttgaagcaattccagatgtttgaagagatacatcaatctctgatggcttagacttaaggcacaaagtctccttggtgcataatggtggagtggacaagcaatgtccaaatgtaggaagttcctcacagactgtgtttgaatccttgatctctgctctccacactgttttgggagtctctggaagctttaggtgtgacttaggtagaagtgggttgacatctgcttctgattcctgcccagtctctcaggtctgtccagaaatgagcaaactgcagtgcacgcccagtgtcacacccattgtcacaccccagtgcatacccagtgtcacagacaggaatgacactgtcacaccccagtgcacacagacagaaaccccactgtcacactttcccaccatgactgactgactacattcccctgcatttctgatagccataagcctaacaaatcatcctcccttttgttgctctgcctagtatttggttacattatgggaaaagcaactattagagcaacaggacattctgctgtgaaaatggagaaacataaagatcaagtgtatgagtgtgagaccccgacttagagtgtttctccctggaaggtaaagcccctggacatttcccaagcttgttttccctgatctctaaaaatacagctagaaagaagctctttgttctctatagccagcaaaaagcctttttgtttctatactttacaaccagagatgcctgccttcctgtgccgaggacatggagataaaaattcagaaagaactcactccccactcctgccttgtaaatttcaccaaggacacccggaagagaagaactctcctcccaacttttcccaactcctccctactctcctcccaactctcctcccaactcctcccaattcctcagctagctgttaaaagccccctattatcaccactctgggtcaaactcccctgccctgggagacgcgaggagtttgtcctcagctagctgataataaaacctcttgcagtttgtatcaggtgtggttttctctcgggtcattggggtgctggccagctcatcccaggacttgagtggaggcccagctttggggggtcttacatgtgggggctcatccaggatttgtggcctaccccagttctcagagatcctgcttggaggtaggatcctatctttgtctatgcctttgtctgccagctgtgtttgaattcggtattctcggtttgcagtcgtctgcgctcgtgagagcaacgaactccctgtccggaatggatgggagcgttactgacagacgtgtcaggagtaaccggctgtcaccctgggagacgtcccaggaggtctgagggagctccagggacgcctggagatctccatcagggtgccaagtgagagtgtgctcacttggccatctgtttctgttactgggtgccaagtgagagtgtgctcactcggccgtctgtttgggtcctggtctcagttatcgtagtctttttgtgtgtatatattgtttgtttccctgtatgtgactctgacgatgggacagactattagcactccccttggactgactatcgagcattggactgaaattaagactagggctcacaatctgtctgtggatgtcagaaagagattttggagaactttctgctctgcggaatggccagcttttgatgttggttggccaccagagggcactcttggtttggttgtgatttctgctgttaaagttgttgttttgcagaggagaccagggtttcagccagatcaagtgccctacattctcatctggaaaaatttagcacaggaccccccatcctggctgaagccttgggttcaaaagaacaagctgggctcccgggtcctagctatccgtgactcagattaaaaatgacgggggctgaaccacaaccctcagctcctcccaaggtctatccagagatagaagaacctccaaaatggcgtaacaccccacccccatatccctaaccgatcccctcccagatctctcaacagggtgctgctagagacacagcagagagatcagctgctagaacccaaagccggcgagctcagagcccagagggaccagactcaaccaccgcactgcctttacatacttatggcccccttcagtactggcctttttcctcctctgatcgctataattagaaggcaaatcatggccccttctctgaaaacccctctagccttactaatctaatggaatctctcatgttctctcatcagcccacatgggatgattgtcagcagcttttacaggttcttttcaccacagaggaaaaggagaggattctgctagaggcaagaaagaacgttctggggggccaatgaactaccgacacaacttccaaatgaaatagatgcaggcttccctctgacacgtcctaactgggaccctaacaggcctgaaggtagggagcagttgacaattttctgctgggatctggtagcaggactgagaggagctgacaggtgccccaccaatttggccaagataagagagatcctacaagaggaaaaggagcccccagcagtgtttttagagcgcctcttagaggcatacaggtgttacactccctttgaccatacgtcagagggccagcaggcggcagttgccatggctttcattgggcagtctgcttctgatattaggagaaggttacagcatctagagagtctacaaacattatctttgcaatatctggttgaggaggcagagaaagtgtaccataagagagagactgaagaagaaaaaagaaaaatagaaaacagagaggctgaggaaagaaaaagtagacgagatagaaggcagaaaagaaatttaactaagattttggctacatttgcaggtgataaggaagtttatagaaaaggtggaggaagtaggcagacagggtacctgggcaacacagggccgagaagacctcagagctctggaggaccttcacggccacctctagataaggaccaatgtgcatactgtaaagaaaagggacactgggcaagagactgccccaagaaaaagacagacaccaggccacccaaggtccttaccctggaagataatgactaggggagacggggctcagaccccctccccgagcctagggtaaccctaactgtggaggggacccccacagattttcttgttgatactggagcagagttttcagtcctgaaagagccactggagaaattgaggaacaacaacaacaacaacaaaaaccatagtaattggggctactggtcagaaaccatactcttggaccactgataagaaagttaatttaagaagaagccaagtaactcacaccttcctcatcatccctgaaggccccaccccattgttggggagagacttactatcaaaattcaaagcccaaataagcttctcttcggaaggaacttcaacctcttggcaagtccctatctctataattttagctttaaaattcaaagaaaaatatagattacatgagcctcaagccccatcaagaaaagtaataaaagggacctggttagagagatattctcaagcctggtcagagactgggggtatgagagagacaaagagggtgccctccatcgttgtgacgctgaaaactggtgcgactcctattgggatacgacaataccccatgagcaaagaggcctgagagggaatcagaccttacgttcaaagactcttagaactaggtgttttggtcccttgtcagtcttcctggaatactccattgctaccagttaaaaagccaggctttgccaccctggcatccccactctacccccttactaaagagactgagactttctcatggacccccatacactagaaggcctttaaagagattaaaaaagccttgcttagtgcaccagccctagccctgccggacctgaccaagcctttcactctatgtagacgaaagagcaggaatagcgagaggggtcctgacccaagctctaaggccatgaaaacgacctgtggcctacttgtaaaaaaattagacccagtggccagtggatggccatcttgcttagaagctatcgctgctgtggcactacttctcaaagatgctgacaaactgactctaggtcaacgaactatagtagtagccccctcatgccttagaaagtatcgttagacaaccgtctgattgctagatgactaatgctctcatgacccattatcagagcctcttactgactgagagagtgcagtttgcaccccctgctgtcctgaatcctgccaccttgctgccggaagccgacgactccctaccagtgcaccagtgtatggacatcctggcagaagaaaccggaactaagaaagacctcactgaccagccatggcaaggatgatacaggatgtcccaactggtacacggatgataggagctttttggttgaaggtaagtgaaaagcggagtcaacagtggtcaacggaaaacaaaccacctaggccagcaacttgcctgaagggacgacagcccagagaacagagctaatcgcactcacccaagccttgcagctggcagaagagaagaacatcaatatctacacagacagcaggtatgctttcgctgccattcacatacatggggcaatctatagaccaaagcggctactcacatttgctgggaaagatattaaaaatgaagaagaaatcttgtgtgaggagcgggtgtggcagcagtcccaaaggtgccagggactgcagctaagtcatatgatttgcacctgacttcctcatacacctgagtataagccacaaacatcttgagagctgcgcaggtgtaccaggatactggtgactccattttgatggagatatgcccctgctgccctgattagctgaagctgcgtgcctggtgaggtggtgtggcctgctgtgcgtggatgggaactgagagtataaaagagtgagaggcccgggttagagggaggattattattcgagagaggattgttattattgggagatataaacgagggagagatacaaacaggggagacataaacaagggagatataaacaagaagaaacaggactgaataaacgtgtgcagaaggatcctgttgcagcgtcgttcttcctggccagttgggcacgcgcaagaagtggtgccgaaacccgggacaagaaacatcttcaggcacgagtgaagaccccctgctacagggaggattcagaactgcatcacggggaaggagtggttaataaaggttcccgtaaaacagactgttgagaaggatccggcgtggattcaaaactcttcagctggggaacggtactgatgaagagaaagaagaaagatgaagactgaataaactgttgttagaaggactggtggtcgtgtcgttcttgctggtcgagagcggacgcgacaattggtggcccgtacggggaaccgactcccccaccgagttcagaactttcagcagtcagtggttgcaggcagggtaagttcatggtgagtgaaatttacgaccccaggagtttggaaaggacctcggataaaatagaggcgaatataaagttgccaggaagcaggcacaaagtaaaagtgaaactatggggacaagttaaggttcctggctttgggacaagttaaggttcacggtttcgggatagattaaggaactatgataacctcagtgtagtgatcaatagatcctcactgtgtagttatgcttttttctcccattgaccctttgtgggtaggtgtgatagttttggtcttgtttgttctgatatatggactctgttactgtttgaatcgagaggcagtcaagacaggtcagaaaattcttatggagcaacaagaaagtatgtcggaagaggagaagggcttaaaaagaaaaaggaaaaagaaaggagacacagtgttatcaggtggacagaaaggacaaaataaaagagtagaggtggaggaggaaggcgaattagcttttgcgcctcctccctatgcctcctcagcagccacctataggcggaccttctgtccagagatttggagagaggttagattctccttgctgggatgtcctattttcaccaaccaagcagggcagagatatcatgagcctctagatttcaaagtaatcaggaactttgctgagtctgtgcagacgtacagcttaactgcctcctatactgtggctcaagtggaggccttgaatagacactgcatgacgctgtccgattgggcaggcttagtgaaggcatgcctttcacctgggcagtatatagattggaaagccttccttattgaatttgcaaatgaacaggcagctgctaatgctgttgcaggaaatccagcatgggatagggatatgctgcttggtcaaggtcgatttgcacaacaacagacaggatatccactgcaggtgtttgagcaggtgaatcagattgctataagggtgtggaaatcattgcccaacagaggggaagctagtgaaaacttgactctcgtaatgactccccagatggacacacaggtgattgaggttatcgtctcatcaccacgaggtattgtatccatctccctggggatctaccagatcaggtgttgacgtgggtgagagggtctgtttgtgtgtttccacaggattagacggaacctctttgggtgccggagaggttggtgagacgctgcaagaatgaggctcctgatccaattgcccctgtggatgtggtggatggtcccacaagcacaaacgatggagccgagatgggagatcctttcggtgttccagaagccgataccagctcaacatgacgttcaaattttttccatgccgtttttgatccctgaattccccttaaagagatagtccctctggctatctatcccttgcttcagggaagatgagtggggatgagagccctgggatgtatgcttgttatagtgtgtgtgtgttgtgtgtttggcacatgtgttaggtgcagagtgtgcgggtcctgcactttcgccatggtagcgtaggcttttgctgcagtggaggcaggacaatctcctcagattcggtttgctgctctaaaagaaattatgctgtgttatgccgtgggttgcgaggctaagcactgcacagaggatagcttgctgttggcatcctgtggaaggcatgtctgattgcatgaaggttcagtgtcctagttctcttcccccaggaaaaacgacacgggagctggccaagacctctctgggtgatgagcccaagggatggttttgtgtagggcccctatgcttgcacactggggatcagacctctaccttcacccatgaggcttgcttgcagcaactaagatctggccatagattaatcaacatcctggccttttgatgcacctgccgcaagcaaaacacaatctccccaggtgtggcttggcatgatagagaggtagtcagtgataagactccctgggcatgtcaccaacctaagacagggatcaaaccaatgctgtttgtctcccaggacgggtaaggggcatggctgcggggggctatctacagacattctctctgccaaaaaagaaaaaagggggagatgtgaggagcgggtgtggcggcagtcccaaaggcgctagggactgcagctaagtcatatgatttgcacctgacttcctcatacacctgaatataagccacaaacatcttgagagctgcgcaggtgtaccaggatactggtgactccattttgatggagatatgcccctgctgccctgattagctgaagctgcgtgcctggtgaggtggtgtggcctgctgtgcgtggatgggaactgagagtataaaagagtgagaggcccgggttagaggaggattattattcgagagaggattgttattattgggagatataaacgagggagagatataaaaaggggagacataaacaagggagatataaagaagggagatataaacaagaagaaacaggactgaataaacatgtgcagaaggatcctgttgtagcgtcgttcttcctggccagttgggcgcgctcaagaatcttgagcctattagaagccatacacttgccaaaaaaacaaacaaacaaaaaaaaccccaaaaaactggccatcatacaatgccctagagtcaccataaaggccatgatgtcatagcgaagaaaagtcagatggctgacctggctgccaaacaggcggccaaaggagctatgatcctcatagctagagagaaaaataaagaacttaaggaccactatgaactcaaagacgcaggctttgactacactccagaagatcaagaactaataggcaaaatagctgagatatgtgggtatactccccagagggtggctaaaacccaagatggtcgctcggtcctgcccaccaaagaagggcaacaatatgtagccaatctacaccggctcacacacttgagaactaaaaagctcaaagaaattgttaagaactcaccacaagaacgcccccagaaggcggctaagaggtgaccggccaggggcatactgagaagtaaattttactgaagttaaaccagccaagtatggtaataaatatctattagtttttatagacactttttcagggtgggtcgaagccttcctcactaagaaggagaccgccaatgtcatggcaaagaagatattagaggaaaatttcccaagatttggcatccctaaggtactttccttagacaatggcccctccttcattgcccaggtaagtcaagggttagccagacaattggggatcgattggaagttacattgtgcttatagaccccagagttcaggacaggtagagagagcggatgaatagaacattaaaagaaaccttgactaaattggctttagagaccggtggaaagattggacagctctccttccttttgccttgttccgagtatggaacaacctagggaaatttaaacttacaccctttgaactcctccgtgggggaccgccccccttaacagaagcagggggaatgtttgaccctgatgttcctttttcccagcccctgctagctcgcttgaaggccctagaactggtcagaaaagacgcctgggaattgctgaaaaaataaaaaacgtatgaaccaggaaccaccgcggtgccacataaatttcaaataggagatcctgtcctggtctggcgccaccgttccagcaaccttgaacccagatgaaaaggaccctacctggtgcttctgacaagccctgctgctccccctcctggacctgccgaggcccactggcccagccctgctcacactcaccaggcactgcacaggaacctcctccctccctcctaccactgacgagagactctctagtctcattcaaggggcttctgaggctctcaatgttacaaatcctaaagttgagacctcatgttggctttgtttgacagctgggccagaggtttaattttcttagttctaagattagaactattactagaaggagtggggaatgtgagaccccaacttagagtgtttctccctggaaggtctttaccaggacccagaattgaagacaggcctgcctacaagatctggaggcaggtggctgtgcagcctggtctacagagtgagtttcaggacaaccagagctacacagagaaaccatgtatcagaaaaccaaaagaaataaatctttgaggagggacaaatgaactgggatatcacacagcaggagccagggagatggggagagatgctggggatgggatatcacacagcaggagtcagggggatgggatatcacacaacaggagtgagggggatggggagagatgctagggatgggatatcacacaataggagtcaggggaatggggagagatgttggggatgggatatcacacagcaggagtcagggggatggggagagatgctggggatgggatatcacacagcaggaatcaggagagtggggagagatggggggatggggcataggaggtgtggacacagttcatggaaacagatgtggactcttgccctcaggatccatgtagacccactcaacttatcaaatacacacctggtaaaatgactgaggctagaagacataaagagccttgccaacataataagatgacaacacccctattttaaaagaaaatgtctccaaaggatgtccaatacagatgtcaaaacatacacataccatcattagtcaaaagatacataaggtcacactgacacgccactgcagagtcccaggatggctcccatttaaaacatgaacatgagcagaaactggggagtgggaggggcgtgcatcaactgagccccctgaccctgtcctgggaaaggcagaggcctcctctgctctgggaaagagcttgggcttcttctgaggctaaagtcctacacgatgtcattccacacatctcccactgctccccaaatggtcacccatgcaaagacgtgtgctagaatgtccactgacgcgttacacatgacagccaaggctgggaacaacccagctgctgacagcaaagcttcctgtaaggaaagagtcagatgcatcagactgtcctgtttacagacgtcctggaaaaggcaaatctacaggaggaggaaacagacggagatttcccaggactggagcagcaagggtgactgtcattgaggaggcaatggaggggcctcttggagtgatgggaatagtcttctgttttttgagataaggtttctctttgtagccctggctgtcctggaactcactctgtagaccaggctggcctcgaactcagtaagattcctctgtctttccagttttgggattaaaggcgtgcattaccactgcccagctcaatggcaggagtcttgacgttggtgcttacatttgaccaaattcaccaaagtgtacctaaaaagatggcttttatgttttggttttgagtttttgagttgaggtctcactatggggctgatgctggccttgaacctctgaggcccctgttcccacttcccaagtgttagggttacctgtgggcatcaatcaccacacctggctcacagaagagggtttcatttttgtgatagtgtacatttagaaggaagagcagaggatgatgctagacacaggtacagtgaggtcccctgggaagacttttgggcatctaggaccatggaagctgtcatcccagctctgatactgtgatggaggccaagggatggatgctttggagctggtaagggactctttctagctttcttccaggagcaatccataccttcaaaactgctgccaatttctatcaaatagggatctgatgacagaccatttgacagcacttcacagggattagaagataaatcttgccattcacacaggattttttgtttttatgggaccaaggcgatctgagccctacaagacctctaaacaagagagccaaagtttccttgaactcaggtgggttctactgaatgggagagtaagtttcctgaaaacaatgcccccagcaggagaaagctcctctttgccttcatctgaggtcttagcccaaatatcagatggtgtctgtcactgttggagcccacacattgctctctttgtttagggttatagtctttgaatttcgtgagacagagccagggggcaggatgctgtacctcctgcaggtccagatccccaggcctggcccattgcgagtacccagtgctcagcaatggctctgccatcaggggctgttgcaacctggagatgtgcctgcaactggtttctggtacccagcattgggcacaaacctgtgtggtttgtccttcccgtctgtatctgctgaattgctttctagacctttctgtatctgggagatgtggtgacagaagcctcttcctgtagggatggaatgaagtactgagtggatgcatgttgttgctatgtcaaagaccctagtgtctcagccccagtgtctcattggatcagaaaagccttcactgggaaaggcccagagcaatggcggtattcctctggtccatatgtggatactgatagtttgtgcagaaaatatccactatagcttcccccccgcccggaaatttatcatatgaagactgctcccctcttgagactgctcccctcttgagactgctcccctcttgagactgctcctactcagattagctgaacctgccttcttgttcatctatgtgccgtaactctagctccatgcttaactatatacactgcgctccgatatgctgaggcttctccattcatcatcccagaacaccgatcccagcttttctctatgtccacgtgtgtgtcttttctttagttcctctctaccctggccaggtcaatctctggagccatgaaatggtgagccaccatacatgtttgcttctggggtgcttgatttgtttgtgcctgcaacacttgtggcacatctggcagccatgagcgaaggttcaagagaatcaggaaagccaagctgagcctttctgaggctgaaaaccacgggcctctaggctgttggccgggtaacacgacaaaccttcagatgtgctcagtttaattgggtatctggaacagcacaacacccctaatgggcagagcggcattaacaagtcataggctccagggagatgatgtctaagagaatgaaaacaagatgaagtgggcatcagcggtgaccctgagtgaaccaggagggaagaggtcaggagctctagtgaggcaggaaaggaggcaccctgaaaggagatggaaccccagtgttatgcagaagagggcagacaagtagccttcctggaaaaaggcctaaggggaggcttttgctctgttccttctgcattataaacgctccgaccagacagcggggaggggctcagcagtgagtgctagctctgagttactcttgaccagacagcggggagggggctcagcagtgagtgctagctctgagttactcttgttgagataaaattgccccgacaaaagctgattcatggagaaaggcttatcttggcttgcagtcccaagaggatacagtccttcctggtgggaagacaaggctgggatagtatcgagacagaaactggaggctggctggtcacattgtatccacattcaggaatcagagagtaaacaggaaacaggacaaagcccactccagtgacccacttcacagaagcgccacctcctaaaggttccacaaccttcccaaacagtgccaccactggcgaccaggagttcaaacatagcctagggaggacatttcccataataccacaacaagctcctccctaagcccccaagatctgctcacagaaccccttctcctagcccaagatttgctttctctaccaagctgcccccaagccaagaatttcctagacatccagtcctccagatccatggaagtctgaagtcactctgcccacttccaagaggctgaagttctcccagatggcttaacggagtgggctgtgcctcacctaaatgtgttgaagaagctatctgctctacctgctgactttctccagacaatctcagccaaggtggcctcttagacttcctggatgctcaggatttttgcagccatttaaaagatgttgtagagctgggtggtggtggacacaccttcaatcccagcactcaggaggcagaagcaggtggatctctgagtttgaggccagcctggtctacagagtgagttccaggacagccaaggctatacagagaaacactgactcagaaaaaagaaagtgtgtgtgtgtgtgtgtgtgtgtgtgtgtgtgtgtgtgtgtgtggtgtgtgtgtgtgtgtgtgtggtgtgtggggtgtgtgtttgtgtgtgtggtgtgtgtatgtatgtgtgtgtgtgtgtgtgtgtgtgtgtttgtgtgtgtatgtgtgtgtgtatacatgccacagcatgcctgagactgagaacaactttcaggagtcagttccctccttctatcacataggctttggggatcaaactcaggtcatgagacctgtcagcaaattccattctctactgagccatctcactggctttgccaccttattctttgagacaaggtttctcactgagtctagagtttgcctatttggctaaatcaacttgtcagttagccccaggtatcctcttgtctgcagcttctcagctctgggatctcaggtgtaaggcaccatgctctgcttttatttgggtgccggggttgcagactggaattctcatggtttctcagcaagaactttactaactgagacatccatttagccccctttgcagccagtttaaaaatgtgctgggagctaatttactgatggtaggattactccagtgttaacgtaagagaaagtacagtgcccacccaggaactatcaccaaacgctctctgggtaaagcaggtcactaaatatttacacatgacataaaacattttaaaaatcaccctcctaattacttaacacttgataaggtctataatgggcatgtttgtatgtatgaataatcatctcagccattgtaaatgtttctgtggatacagtggtgtctgctgggcaatggcccctccctaaggctcagggatggccacagctcacagatacactcactcctgagactcactccccagatgtaatcagcgcacccaggacaacttgagggagttgctctttccttaagtgtggcaaagaaaatagagtgcccatgggctacttggggtgcataatgaaccatttgttgtttatatgaaatgcaaacctaactggatgtcctaattttttgtttaccaagtctggaagccctggcctttgcagggccccccagtggctggtgggtataggagtgcaaaaggctgggcctgcctcagagggactcctaaaccacagataccaagtgctcaccccaggttctgcttttatgacccaatgagtcagtaccagagcagtcctggccatctgcctatgatgacgtatttttccttcaactcgaggctccctcactggccatggaagaacactgagaatccatggcacacacaaagagtcaaatgccaagactgctcatgagagcaggccaggtggcaggcagttgactcctgtctccatggattctgcatcagtagatctttctcctgtattcaggagctgtaagactccatacatcctgaaggtatttattttctacttcagagccctcataggacaaacaaccaagggacaatgtgccttcctgctgaaccttcccccatgcaaacttctcagaaaggcagcactggacaggaaggccatggacgtgcatcctgttggcccgcataccaaacacccgcccaggcgagagcaccctcttctcacacacccagtttgagcctcactgggccacacacgggacttttgtatgaatggcaaaagctgtgacctaggacaggtctgagcacaacctgccatgttcctttatccttaattccatcctccacgtgctttactttatatttaaatataagaatttcattaaaactctgtgttgtgatgggtagaggtggagcacacctttagtcccagcactagggaggcagaggcaggtggatttctgagttcaaggccagcctggtcttcagagtgagttccaggacagccagggctacacagagaaaccctgtctcaaaaatccccaaagaaccaaacaaaaacaaaacaaagcaacaacaaaaaccgctgtactccttgcgggggatgcattccaagaccctcggtggatgcttgaagatctgggagacaaaggaccccacttatccaatgtttttcccatatactcatacctatgatgaactttaatttagaaatttggcatagtaagagattaacagtaataataacaaagcagagtaattataacaatattccatgataagagttcttttaaaatatacggctctgctgtgcctcacttctcctgtgaggggaggtgatgagtgcctgtatcatgagatggagctagcaggtgccgctaggcatcatggggcagttaggctactgcacagacgttacttgaacatgaggggtttttttgtttttgtttttttttttggtttttgtttttgttttgttttgttttgtttttggttttttgagacagggtttctctgtgtagccctggctgtcctggaactcactctgtagaccaggctggactcaaactcagaaatcctcctgcctctgcctcccgagtgctgggattaaaggcgtgcgccaccacgcctggctgaacacgaagttttgatattgtcaatcaacctgataatacagacagcttctaaatggctactgggcaggaagtgaatacaccatatactgtgcactactgtccagtaaatagtggatacacttgagaaagtatgacttacaaaagagggatgtgaggtgtttcatcttactacacagaacaacatacaattttaagcttatttggggggctggagagatggctcaacacttaagagtacatattgctcttgcaaaggatcagagttctgttcccagcacccagatcggatggctcacaactgcagctccaggggatccgagtctagactctgccggctaggactcatgtgtgcacattcccagacacagatatacataagtacccaattaaaagtaaaaagtaaatctttgaaccttattattaacttgtttatggagttttctgcataatatctttggactgcagttggccacaggtgaatgagattgtaaaccgacactgcgggagggggcgtggcacagacttggccgtactgttgctgacaagagaatgttctcagatccgggaagctaataatgtgtaagggcaacaggaccacaggtcgagtcagggaagagcttgtggttgaaggaggatcttaaggtgggagacaggacagtataagaggcagggtcatgacctacagatgtcccagccctgggggcctgagaatcggatgtggtaagaaaggcttttcagatgtgacttagctagtgactcgagatggttctggattatctgttcgggccgatgctatcagaagtgggcaggagagacagagattatgtgatggtcaagcatagatgagggaggtgcagaggccatcattgaatataggaggaaggatgcaggtacccaggagtttggctgggcggagaagcttgacaggaaaggaaatggcttcttctacggtacccagaaggggtcagtctgtcaacacctttattttaaccctcagagatccattttagattctagaactgtaacctaagtgtgtgttgttttaagctcttaggtttgtgacagtttgtcctggtagcaacacctctcattacacatgggatgacctataggtctggtgagcttggtgcctgcatttctagcgtgtctatccatctgcccagagaggctatcagcccagcagctgaccattttgacaggcagttctccttcctcctctcagcagctggtggaagtaaacagcactgttctaatcaattagtgatcaatcataggcccaaagaagtcaagcaacaacctccagactcagcctggcctgtctgccctccgaggtccagacatcacctccctcagagacagacatactgggaagtaagagagaagcacagatctggcttgtggctgctcaagactccattgggcaggatcgagctgtagcaaatcagtagcagaggctacagggctataggtttgaatacacgcagcctatggaattaagaacaagagccaggaagctgatggggctggggaggaaatgcgggagttcatttaacccttctgactccagtccttccggcagcttcctgctccgttagcgacttagagtccacctgggcccatcttggccaagccaggggcccctatgtacacactagacagacaaacacacccgtgtgtgtgctttagactctccttagggctcccaaaggagccctgagaaggcagggaatagagagcagcttacaaggagaggtgaccctgcagttctctgaagaggaaaggaagaaataaaataaaataaaacagaaggcatgtataagaaaaggcccatctcccttctagcaggcaaggcccagacatcaagtggaggccatgcctttcttgcagacagtaatccctacctggaagcgagggaacacagatgcaggcactccacactttctttcccagtttgaacaaaccccccttttctgtctccagctaccttgtgctagacaccagcttccttctccccagatggtataaagtggtccttgcttggcccagcttagctgaaccgaagcacccgtagcaggcacatgtgggacttggttaggtcctggcctgtccctgcctgtgtcatgtgggctagctctggctgttttgtctcctaacatcattagctctgtcagaagcaggctagagggtgtttatgctgaccttgccgtttcacacaaagaggagacaagccaggggggaaatgtgcccaaaatgactgaatcctgctcactccagaacgggagagatgagtgtgctcttcgttcatgcttcccagccaatgtcctgtcctcatctctctccttgctcgctgctcagcccagggccagcgctgacatctggaactcagttgttgggaaggagactgccctatgattcttattatggagcagcaaccctcaaggcccctgtgaagtgcttccttccaggagcggggaggagaagggagaggggtgggggaggggaacggggaggggaggagggggaggaggccacctttggcttgctgtagctgttcagtatattctcaaaatcaggcagtaggtttgagccactaatgcttcagtcacccaaatacctcaataggatctctgatccccaccaccatcaccacctcagagtctctccacagattgctacccacacctctgaacagctccactgctagatttcaacaccagtccaggaagtagagatctttctgcccgacaagtgcccccagccacatctttcttaaagataaaagcaaattctgaggcatagacacttataggtggcagccaaccctgtgagtgttggggacatgcaaacagatacttctaaaatgcttcatgaggtagctaccttttccttcttggtggcctccatcctggctctgtcatccagcatctgcccagccgccagcccaggtgagctgggacccctcagtgttccgcagcagctttccaaagcagaagtagcccagacttcccccacagagtcacagccagccccggacctcagagagctctgccgtccacctcaggctggttgaagccacagcttcctctttttcattgttcacttctggacccctccccaccaaggcctcttcaggcccagcggtcttcaggaggagccatgtggttcctcagtgttgactgactttcttccagctctgctgagctgtgaggaactggtggcctctagacggactcagcacaaaaggtctctccctccagtggcttggggatggcttttgagtaatgaggcaacaggtaactctctgtccctcacgcctcagctttcttctctgggctcagtcacagtcggtgcttctgttccaaccaggtgtggagtagatgtctcctgtcagggcctctgtgctcctgggagggcctgtggtttctatggtgaccattgtctcattagagccaccatgcagaaaactgggactgattgccaaaggcctctctactcctgtcaccatggtgaccactctgtcaccctgtcaccacagtgactgccagcttggtagacattaccacctgcttagttcccaggtcagtgccttggtgcctatcacactaaggagcagagccctctatatctgagaaccaaaagaacaggaaaggcatgcttggctgccagcctggaggaagcttcttgttgcttgtctcttcttttccctttctcttggtctgaagcctgaactggaatggcggacctgaaccgcactggctccacactctgtgtgtttctatttctatgcctggaagcctcagaccaggacatatctgttgttgaaattatgggggttttttggttaaagatttatttatttataattataagtacactgtcactttcttcagacataccagaagaaggcatcagatcccattacagatggttgtgagccatcatgtggttgctgggaattgaactcttaaccactgagccatttctctccaatcccaatgttttttttttaagtattcattagcatatgtaaactgtatgcaaaataatgggttttataatggcatgttcatttaagtatatcatctattttggctataaatgtgcgcgcacacacacacacacacaccctctcttcccctaacttgctattcctctggatttcttcttttaaggattatttgttcaataattatattactattgaactgtttcctacctatcagttgtggaaagtatttttatatttcatctaaaatatctagtaatcttttgtttgccaagggtgttgtgtttcccaacaagttacaactcaagttctgctcaagttacaacctgataaatagtgtcttgcatcatacagaagtatctatccacgtcgtggattctagtcttttcttatctgagggattaagtttttgttgaagaaagcttttgccacacccaagttgttaaattaaaaatattcctctacattttattctaatattttattttttattttttttaaaagatttatttatttattatatgtaagtacactgtagctgtcttcagacactccagaagagggcgccagatctcgttacggatggttgtgagccaccatgtggttgctgggatttgaactccagaccttcggaagagcagtcgggtgctcttacccactgagccatctcaccagcccattttttatttttttataaattaaaagataattacatcactttccccttctcacccctccttccaactccttccatacctccatgcccaccttgctccctctctaacatggggccttttcttctttgttatcattacacacacacacacagctacaatctgttcagttgcgctagtattactttgtgcatatgatttcagggctgaccattgagtatttgacaaccagttagggggctcataaaagggagacccaatttctcctgctctccagttcctctgctgtctgtagtctttgtttggggtgagggcctatgagattgctttcttccgtgtaagcaggtctactggtgctgttaatgttcagggcttgttcaggcagccatcttgtcgcattcttgtggatgaatcttgcctatcatttctaagacacacaatctcactgcaggtttccccacaaacttttcaaagcacctatttaacaaacaaaccagtccttctgtgactatgtctggagtatctggtattctgatggcaccccaaatgttctggctactctctccttccccttctccttcttctcctcctcctcctagtcctcctccttctcttcttcttcctcctcctcctcttcttcctcctcctcctcttcctcctccttctcttcttcttcctccccctcttcttcctcctcctcctcttcctcctccttctccttcttcttcttctttttggtaaggaacagtattcttcacatttttatcatggcatcaaaaaatccacaaagtttcgagtccacatcttcaataccaagtttccacacgtcataacgtcaacatttcttgtacaacatctagttagctaaccattcatagcaacaggctcttacattccattttatatccctgtactgactgcatccagtattcattattagcacctacatgatttgctaataccatgggttaagagcattcgtatagaatctaccctacttggcaatatttattaggaggatgaaaaggccattatcataaaggtagcccaaacaccacagtttttttcttccactccttaaaggcagatcggtttgaaaataacatataaccaatgttctcagatgggacccacacgcactaaggctgagggaagtccatgcaggctgtggagcaggaggattgcctgcaggatctcctgcctgcttctctgttttctcggaagcctcccgtctgaactttctgtgaggtgctgacccgaagccatcaagtaccatggatgagataagccagctgcctaaatgaccatgtattcccagttcaagtggctggcatctgtccagtacagcttgtcctcagctgggaaaggctgactctaggaaaaatatggcttcgggaaagccccacgcagggaaggcagtctgaaaatacctgtttcactgattccaaaagctcctacatgttctgacatagccagtggcagacatgaaatctgtggtaggccatgtctatccttcttgttgcttagacagtccagggtaaactggtacaccccagtgaaggggaaacttacttagtatgaccaaggccctagcaccaaagtagatattcacacacctaaagcttgataactggtctcatagaaatctgactacccaggcaatccctttcaataccgtcttgatttcttaggggctctgctgtgtagctgggatgaacacctcttgtgagcatggcaaagcttcagaggcaggtaggtgtttgctgtatctactgggcaaagtcataggacctgggtctttcatcatggacactgttattacaaatatgttttcaaagaagctttttaaaaactaggatctagagagatgccttggtggttaagagcactagctgctcttacagattctatgcttggttcccaacacctacatggcagctaataaccatgtggaactctaattccaggaatctaagtatctgacgccctctactggcctcctcgggtacaacgtagagtaacactcatgaaaaaaaaaacccttaacattttaattataaatatatatatcatctataacattattactgtgtgttagtgtgcatgcatgcatatgaatgagtattcagggggctgacgtgtatgttattgtgtgcatgtgtgcacgtgggacttggatctctccttccaccattggggccagaggatcgaacttaggtcatcaggcacggcagcagatgcctttacccactgagccatctctcctgctctgcaaaagggcttttctttgacatctcaggactcggggaggctggacataagagctccaccatcccacaccagtgatgctatgcttgtcttgtcaatgaattatttttgcaagcttttctctccccatactttcaggtttcttgaacaaggacagaaatttctggacgctctccatctgcatcacttaatcttttttctttttttctttttttccccgcatttgctctgtctttggcatcgtgatgaataaccttgcttttgaacttgaccgcatctggaatcaactgctgggcagtcctgtgagcgctttgcttgagcagattaaaggcagcgggaagacccaccttaactctgggcagcaagcacctcctggtggtaattcatatggaaggatgtggaagaaggaaacttggcttgtcgcttgcttgcttttgccttccctggctaggtcacctaccctgccaccgcagtatttctacacctaaaccaatttagggattcaaatgtaggctgaagaccaatctctctaggaatcaaccagactttcagcacaagattaagtttgctaagacatccagtcttgtggtttgcttaaataccagactctatgcttctccagtgtgagacagccactgttggactacttacacacacagcatcctgaagccaatctaataagtcctctcttaatatatatgtcctatcaattctgttcctttagagaactttaatacatgtataatatgttcatatacaagcatgtatagaaacatatatatgtgttcatagatatatatagatgtagatatacttacatgtaggtatgtatgcatatgacctcttcggagtaagttgtatacatagtgttcatctatttatgttactgtgtgttagtgtgcatgcatgcatgcaccagagacttctcttataaggtcagggcagtcagtgactgaaagctggaaataaagatatagtgctcttatctaatctgtagaccttgctcagattttagcctccctttaaagctctgcttctaacagcctcaagggcaccttcggcctctcatgaggcttgcttcctctttctttctttctttctttctttctttctttctttctttctttctttctgtcatttaacgtaatggtgcaaataaccatcgtcgtcattgttaaacatctgcaatgagcaggacttggaatttgatagtttatcacttttaccaacatgtctacaaaaaaggtattttttgagtccaacagattggggggggggggtaacttttgcggtgcggaagtactgggaccgaattcaggctggataacagctggggaaacgcaggggaaaacaatgtcatttgaaattgattaacaagcttggcttggggagttcgcatatctctagatgagacttcctgggaccaagggaggctgggtaaagtcagagaaaagcaggaagaggtgccaagagtggctgtaagggagtttgataagcattttgctgttcacattggaagcccaaggtctgcttcttgctatcaattttcttaatccacatctctttctgcaaggtcactatcctggtaattttgtacaactttggataaagaggctttcttcagaaatggttctccgtctgccgcctgtggagccatggtgtcagtgcaggtgaatatagctgacacctctggccgcctggcttgtcgaacaagtgtgtccaagctgagtggccatagccagtgacgtttctgatttttattattgcaagagaaaggatgaagggcctttcttttagtcgtctgtacttgggacacccagggaagaggttgggtagcctggtgctgttacacatagaatgcaacaaaagtatagagtggggacagctacgggttgtttttctagcagaatggggaaaaaagagcgatggtacggcacagcactccccaccggcagccagggtccgcgcgacagcccggaagggaacctgcgccaaggcactgccacgcaggcggagaccgagcctcctggcgccgacccgggcggacgcgggcgcgccccgccgcttagctacccgtccgcgcacgcgcgtaccctgccttcgggcctccgaggagcggctggagcaactcgccaccggaaccggaagtgggccttactctaggaggaagaagccggccgggccccgtcaggaggcggccgccgctgttctgagggactgtggccgcgctcctgggagcgggtctggggctcagccggcggcccgaaggtgcggcgccatgaagctgtacagccttagtgtcctttacaaaggcgatccgaaagcggtgctgctcaaggccgcgtacgacgtgtcttcctttagtttcttccagaggtccaggtaagtgggccgggcccgggtggctggacccggagtccagggagtcgagtctctcgaagggcgagcacggctttggcctccctcgggcggcaggctgtacctgaggagtcgttagcaaccctgggaaagggctctgccctacgcggtattgcccagttgtagaaagattggaaggccattgattacagacgcgctgccaactgttctgatctgggatctccggactcagaaataagtatgttgactacgcctcgcaccctgtgatttaaccagtgtttggtgtcttaacctttgtatttcgtcgttgccagtggttctcaccttccttgcgctgcgaccctttagtaccgtttctcatgttgagggaaccctcccacccccaaccataaaattattttcgtggctacttcataactgtaattttgctactgttatgcatatgtatttttggagattgaggtttgccaaaggggttgcagcccacagtttgtgaaagtcgctggtcaaagctctttccagaagttctgtatggaggtgtttcttttatgagtaaaatcgttgattcctcaaggattgggagtcaggggtcaaactcattctttttagtgtttgggccttgattatcaggaagggtccacactggtagctaggcaggaaccactggatttgtattgcttgtaggcatgtaaaggattgtggggtgctttaattgtaagctgcacagatacccagtcttgtgggagtgactcagacacaaaaggaaaagggcccaacagggtaggacctgtggtcatcttgactcaacgtctggggaaatctgcttgttcaggttgtgtctcagcttttgatggttctaatgacttcatataagtgggatatatagtagttggctttttgtgtcccactgattttactaagcagaatgaccccaaggttgacctatgtttctgcagataccaaatttttctcccctttaaaatatatacagtattgagttttatgtaaacactatgttttgtttatgtatccatccgctgatggacatgagttgctgtggattatagttatgtgaatagtgtttgccaaggggttggaaggtagcttgagtggagaaatagttcattcaggagactgcttgctgcatgaggggcctgggtttgatcccaaatacatcaaaaggaaaaacaaacaaaccaaccaaccaacctctgggtgtcctgacacatgcttgtactttcaaagctagggaaacagagacaaggtgatggggctcagggcctgatgactgacccgctggggatcatggcgcctgatgactgacccgctggggatcatggcgcctgatgactgacccgctggggatcatggcgcctgatgactgacctgctggggatcatggcgcctgatgactgacccgctggggatcatggcgcctgatgactgacccgctggggatcatggcgcgatgactggccccctgctcaagcctactctgtgagcgcataaccaacttcatcctaacaaaggtggatggctcctgaggaaagactccctgcgtacacatgcagctgcacacagatggcacgtggatgctcagatacacagagacacagcttacaatttgctgtggtgtgcacccctgaaggtggaattgttgagtcatctctggctccgtttgctcttcctgctcctctcctctgtgtgccctggcccctgctctgtgcttggtgttcttcttctgggatggaacctgtggtgccaacttggctctggatctttccgtttttctctctctctgtttatatggaggattctcagagcttcacaatgctatcatctcattctttgacaccctgatgttatctactgtcagatgactagcagtgaagcagagagacacatgttccagttgagtgagaccccgcagtcttacctttcatgtcactgtgattactaaagtctctcacagttagtgcactagtagtagtcccaatcacacgactgtcatcttgctctagatagctctttttttgttttattgcaaaggctttcttgagaattaaaaaggaaatatttttgactattttcatcatgtcattccctcatgataataatagtagtgtattatgtgccaggtagtgtttcaattgctttgtgtatattaactcactcataactatcgcaccagtcttgattttactatcgaggtcagcacagtaatttgggtgacacctagtaagacttgaaatctcagagctaggtcttcagatattgtagttaagagtactgtagtgctggacacagtagtgcacacctttagtcccagcacttgggaggcagaggcaggtgaatctcagcctggtctatgtgagagttctagaacagccagggccacatagaccccgtctcaaaaaatgatcaaccttgaactgatggccttggctgcccttgatcatgcatctccagttgaaggtttctcacctgtcctctggctggaccataaattcttttattctggtcagatttgtacctctctttgggcccatgataaaccactattgcagcttcatatgagtgactcccacttctaccttgactaggctttctttccatttcctccacagtgtccagggcttcagcagacctgagctagctctcacctagtaggtctgtgacattcccagccaggatctgtcctgtggccatagtactagcaggcatgcttctttctgcctgacagtttttaccactagtgtttttctagagcagtgtattttatttatcctggttcttggaaattcgaacaggaggtgctttctgttttgacactagaacccagacatgttaagatttcaatcacagttttattttctgtgtgcttgtgtgtgggtacgagtgtatcatgagatgcctatggaagtcagagaacaacctgtaggggtcacttctcttcttccaccatgtgggttccagggatcaaactcaggtttcctggcttgacagaaggtgcttttatccaaagagccatctcactggaccccaaatcatgttttgagtgaaatgttaagatagctgtagcctgaagatttctcagacaacctggctggtttgttgtacgcaagtgtgacatgaatggtgttatataccttcgtgttcatttacattgggtttaatactgtttctaaggttaagagggaatgaataaaaccaagagaacctcggaggtcactttccactgtgttggggacagtgtgaccgaaagaaggttgtaaatatgtgttatatttcctagtgtgcaggaattcatgacctttacaagtcaactgattgtggaacgctcggggaaaggcagcagagcttctgtcaaagaacaaggtaagaggactcccgcccctctgagtgctggcctggctgtcacacatgctgcccgtgccgtgtgactgctcccaggcctgtgctcctctgctaccgcatgtcctcgccttgcttctcctatccataaagagcactaaaccaaatgttgaagtccacacttgctgcaccctgatgtgcaactgcacttagacagcttacactcactgctcgttagactctggctctccacctgccccagcctggcaggccgaatagtgataggcgctgattctctggtccagcagcagccatcacatcctgcgttccctcccagagtagagccttcagaagaaggttctagcttgcactgaggtaatactgtgttccttaacatttgttttctttcttccttccttccttccttccttccttccttccttcctttctttctttctctttctctctttctctctctctctctctctctctctctctctctctttctttctttcttccttccttcctttctttctctctttctttttcagcaggatctttcctttatttcataattcaggttttggatatcaggttggagtatttatttcagactgatacacttcacagacaaatttgatcttacatgaatttcttgaagcataaacaaagatgacctgtcctaatcagtggcctcaggatagagttcctgaattgatgatagatcactgatctgtatactggctgtatattctctgtgaagagtttctgtcctgtgactaccatagaagtgaaaaagactcgtgactatcagtgttctctccttcctgctgtctacccttcacagttttatcccataaggaccatttctcaccctggcaagcttcttagtttccatggaaactgactccatgtttggatccttcttatttgggaatgtatatgaaataagatggtaattcccatccctctctgtccttgttgatctctgcttctctcggattccagggacttacactcttttcctcttttgtttttctttctgtttaacattggaatcttctgggtcagctccataaacaagaggttggttttgtaagctctcatccaaggttcttctgttctggggatgcggttagccatgtcatttctgaatcctttcaagggatggaaatcaacagtcctgtggattatgattattttcaggcttttctgcaaaccatcccctctgtaatcataaggcagctttagtgcaataaccccagagacctcatccatggctatctgggctttctctagacagttcctccagccacccaccacaggctagagaaggtcaaactgtgttgtcttattacagggggttgaagccctaggaagtcattttctgctactcagccaccctgtcaagattattttaagaaaggagaagcagcttgtcctgtctggtattccctcaatttaggaacagcacggagccggggagggccataaattgccaagacgtagccagacctggcctgggcagtgatctagacttgctcctagggaaattgtctttggtgtgtttttcatccctggcagctcatttagatcctgctacacacatactatcaggggatctaggatattaaatagtcagagctcctgggtgtggcccatagaactgtggtaaagagccttctcgtagacctcgctcagagcatttaagattcagaatagttcagagtggctctgtttgaactagaaatcaagaaccagcattatgatgcattggcaggttgacaacagtctgaagccctcctcttatgtgagatctcttgtctccgtagagtatctttgccatgtctacgtccggagcgacagtctggcaggtgtggtcattgctgacagcgaatacccttccagagtggccttcaccttgctggagaaggtgagtgttgttggactagattggctgggatgtcaggtgtgagacaaactcaggtgggtgcagagtctgaagcacgaggggtgaatgttccagaagccacggtttccccatcccgtctatccaagccaggagacatttgaaatgctgcctctgtgtatttcctccttggggctgactctggccttcaggtcacctgtgtcctgctgctggattagggccactgctgccagcctctgcctgtgtttctgctgaaggttccgggttctcttcctgttgttcctgcaggcagtcactacagctttctccactgg

SEQ ID NO: 29 - DNA, 62964 bp, Homo sapiens
gtgggatgtgacagggtgacagtgttaccgttgtttctttataagctgctttgacggaacaggtgtcgtcagggagtgtggaaattcctcttcacacatgtgctgtgccggcagctccctgtttctcctgacagagccacctctcctctcattctcacccaggacatgaccggttcattaaagcacctcctctctatttccaggcaaaatccccacctgacctggtgcagggatttgatgctttagcctctaattcccccgcatcttcacagcttcttcaagatggggggctatgaatgcgagggctctgtccctatctccaagatgacaaatccgtgggcgtttctggcactggaaactcagcctcctcagacatgtgagtggggatgtcaacctgtgtctgggggataaggacacccatctgtcatttgtggtttctgtgtggtccttcctgattatgcaaaccctttcctttccattgttcctcttctattgtccccctaaaggacatccggtgtcccttcatgataagaaactgaatgagacaaatagaaaatgctcttccccctcctcctccctctccccctctctctttgcctctctctgtttctatgtgtgtctcctgtgtgagtgtgtgtgtctgcccctctctctctccccaaccctgctccctccagagctgataactagctctttggcttttagctagactacgtcagaagctttgtctattatgtgtcatcccctctcttggggaaagcagtcacttttagtttttttccatgtttatggaattttttagagtagacttgccctttctgcctggtctgctttctctggaagcccacaccagtccttggccaccagcagcccactatggagttccctggtgggccctggatcgtgcattcccctcagggccctcctctgcccatggaacatttggctgtgggacagctggcccagaggttgagcaggtgacttctcatcaggccctgtcccgcccctcatgcccacccatccactctgccctagggctcctgggagggctggcactgatgcctgcaggagggaggagggaggttgtgctcacgcttcatttgctcacatcactcactctgggagccacgccaggcgagagcaggggggccccaccagccccagagggcacctctctcagggccaatctatgatgtttctccattctcttcctcctgtcctggaggagggacgtgctcgctgggggaagcagagggcacatgtgggaaagggccagggggctgccatgcctttttctcatgacatccttctaacagccttggaaaggcaagatggcaccagctttgcataccatagcacatgtccccctaaatgacgtgtgtgagcattgcccttcttctcgaggaatagtctgggtttttctaacactcagagttgcctttgcttccaacatctttttgggaaactctgacttgactgacacataatgggcaggcatctgccacacccagccatgtggagctcagaccactcctcactccattctcatcagggcactattctgtggtgtatatatctctggtcaatttatgtattaatttgccacttggtgcataatatgcagcactgagataaaaacaaataagccattcctatgaggaattgatttcccttccacatctgttcatgaagatataaatctaaagttttggtactttaaaagcctccaaatgcaaatataatctaaaactactaggctttgaaattgggcttctatgtcaaaaaatgtttatagacccgatccctggagtctgactgctcatcttctgcctccacgccctgaaggcattgatcacctcttgaggtcctttccgattcattgcaacaagacagaatggtgctgtgtgcctcttgtgtactgtcagctctgtacgcacccttaggagagctgcaagaaccaccaaggcatggaccctgcccccagacaggcaagacagcagagaacataaactacacatgaacagccatcatgtaaggcagaaagtggtcattgccctaaagatgaagtgacatgggaacgcagaggatagagacttgactttcttttgaaggatcaagtctttggagaaagtagaattcaggtggagccatgaaggatggatgggatttgaccaaaggaaataagggagcagagcattctaggagagacagcaggagctgaggccagaggtgcgcaaaggtgggcagagcttaaaccaggagaaagagttcggtgtggctgcagcacaggacacacatcaccatggaggtgaatgaatgttgtgggcatcaccctgatttccttatatctagatggcattttgcaatttcctatgttcttttatgtgcactatcacatttgattttcacaacaatcgtataagtaggcactagcagggattatcatacagttgagaaaactaagactcggcaagttaaggtgctctgccttaggggacgaaggagaatagcagaagaccaggatgagaactcagattttccaacaccctgaccaggacctttcccctaaaccatgcagtggcagggaggctgcgagagagcctaccccacagttattcccatactgtgtgtttgtgggtttttttgttggcttgctttcaggtttattcattgattgttcctgtgtaaaggcaccatgtggtggccattcctggatgctatggtgtgggtccttgtattcacaatagggagacttggggaacagtctctttccagaagttagctctgtaagtcttggatgtggcatcaaaggcacaaagccggcagcattgtgtcaccatgcagagcactgtgtggggtttgctgaccttgtcccctggtagtcaccctacaccaggatgatggagaggatgttggtcctgcagacagcaatgagtaactccttgggccactcaacacccagactgacgttatcattgcagtcccttatggtgacaatcactttgaacctgatccgccggccagccttgggctgcttttgcacaaacatgagcttcagaaccttgtccttgaggggcacccccaggaggaagtcagtgacctcaaactccttgatggacagagagaagagatagaccttcagggatttgatcttcatgtccttgacctggcaaggtgacttggtgatggagcaccactccttgtcttagatttgtgtccacaagatctggagtctcagtcttgatgctgaccatagccaagaacccagccacagctgagctgccagagcctccccattccagggccctaaggttctctggcatcatcagaaaactgtttgtgcatttttgtatcacaaaactgccatgcttggaattaattctgtgagcccacttcccttaggaaccccccctgagagtgcctgaaagatgggggattagacatctgagctattaggtactgggtaggctcatcagctttgtttgctatcccgtttggcaaatgagccagaaaccagagcatcactgagtgcattggaggtgagagctttcagaacggagaaggaagtgactcgaggtggctttgcaattgggtccttgaaaaatggcacctgctgggcaaagccgcacattcacttgaggccaggtctagaggtcagaccagaacaacagagggaaattccgagcttccctcaaccataggccggttttaaattctgacgcgttgccacatcacaagtcagatgggactgagggaaatgacctgagacgagaatgaaatcttctgggctgtcagcctgtggaggggtaggagacacctgcaggctcagtcctagatggctgcacctccagctagatcccaggtgtgactcgtaaggtccaaggtggctggagatgaccactgagcccatacccagagaacaaaggcatggtggtgctgactgttaagaggagttggcccagaaacattcagattttccattttctgtttgttttcttttatttaggagaggggaatgagtgagttatcaaattccctttatgtggaaccaggggagctaattttgtctaacctgagtgtggtaagtgaaagggagacccagaaggctcagagacaagggtcagcctgttgccttgggatcctgcctgccctagaactcctccttccttacctgggggggactctgaggcagctttactcagtgctggtgctaatccttgtccctgaaagccagcagcagcttccccactcctggctccagggccattcttttcagagaaaattcgggtgcttggctggcctcttctcctccccatgaaggtctgaggggcaatgaggggaacagttgggacagtttctgggaagcaggctccttgggccagtcaacatgttagtctgaggaaacctcttatttcagacaagggttaaagttggtttcatttctcattttggtctcagtaggtttctcagtcatgccggaggtgctgaaaggtgacagtgagaaggcctcgtgtgacacttctttttcatttgatttccaaatgtgtgaaatttggtacttttcctctttacccacaagagctttaattctgtgaaggggcagtgtgggctctgtcataacacctcttccccagctccccacctttcctccagagaaaaaggcagacaagtggggaaagctggggctagatggacaaaaacaaatgaatctactctcctggcccagaagccacggccgcacagatccagaatcgtttttctgaccctgtgatccattgagtaaggtgaagggagtaggaaaggaggagatgggcccagagtgaggaacctcatttacttaattgcccttacatagaggaaaccttcagcagcccctctgcctggactaactggccctgcccccagataagctcagggacatatgccactgggcttgtctgggtgggctgactgcaatgacaaacagccccaaatcttgatggcctaacatactacaatctaacatgggttggcaggaggctctgctccacacagtcattcatggacccaggccccttctgtcttgaggttccatcatcccttggggctttggcattctccactgaccatgtgtgtccaacatggtagatggaggaagagagggtgtgaaaggtcttatgggcccatcctggaggtggcctgtgttacttttctccacattaccttggccaccctaaacatcaagggaacctgggaatgtagtcttgatgtcttataggttgagttgtcactcaccagcaaaagatatcttgaaatcctaatttccagtacctcagaatgtgaccttatttggaaatatggtctttacagaataatcgagttaaaatgagatcgttaggtgggctctaatctgactgacatttttatacaaaagagaaatgtgggtgcagagggaagaccatgtgaagacaggcagaaggccacccacaagtccagggatgtctgaggctaccagaagctgggacagaggcaggcagagtctccctcatggttctcagatggaaccaactttgccaacactttgattccagacttctggcctccagaacgatgagacaacaaatttctgttgcttaagccacccagtttgtggaactttgttatggctgccccaggaaactaaaatacactatatgctcagatttgaggagcatccagccagctgtgctgtgcaatctccttgtctgaaagaaagagaataggtggctcttagcgcaatagctaccatcttcgctgataggtactttctggttctatgattcttgccaagcctctccacccatgactccctccctcccctgggttttctctcaccttctccccacttctgacactaatccctcctgggagagagcaagggagcccagtcatttctggctagagtccccatgtggagaagagagaggaactttgccgttctcatctcattttttttctcttctttggtccagagttgtacaaacccttccggcaccttcctaaatgaccttgagcaaaacccctgactcttgtgagacttagtttccctcccagtaaagtgggtgtgatcccactgagttctttctcaacagaaaaaccagttataaaaatgatgctataacacttcagaaaaacagcgtgctgcatccgcccacgagagcagtaatcactgtagctcaagaggttgtaaattctccacagctgactgttgggagctggacaggacccagcacctggtaaccttggctggcttggtaaatggggggcagtgatggtctaccacagaggaagggaccctttgccctggcagacctcctccccatctagacttgggggatctgactgtagccacctgagccaggaagtgatgttctgcaccagagcccctgggcattagcagctgtacttgctgcctggatgagacctggcacagctggtgcacccgcagcagggaagatagagggctgtggggaataacagtggtgttaacattgccatttactaggacttatttgtgccaggttctgggcaagtgctgcttctgatagtcagactatcctgcaaggtgataaatgtgggatggggagttagtgtgtgggtctgtgggggtttgcatccaggctctcctgggctgtctcaatacctaagtgcactggggatcagcatcctcatttgtaaaattggggtaaaaaatgggccgggcgcggtggctcacacctgtaattccaggtgtgggaggccaaggcaggcagatcatgaggtcaggagttcgagaccagctcagccaacatgatgaaaccccatctctactaaaaatacaaaaattagttgggcgtggtgacgggagcctgtaatcccagctacttgggaggctgaggcaggagaatcacttgaacctgggaggcggaggttgcagtgagccaagatcatgccattgtactttagcctgggtgacaagagcaagactccatctaaaaaaaaaaaaaatcccactctacaactcagggttgctcccagggcagggtctgagaagagaagcaggaggtggaggggtagagcccttacctaaagaggcatcctctcgtgatacccccctttgcccccaggacttgctggcagccaggttctcctggcagaaagtggattcctggcccactgctgaggtctctgccttctctcagcagcagatcttcagactgtctggcaagggccagcctgagggcgatggtgagcattagatgaaataacacatatacagctcctaaaacagtgcctggctcaaggcaaatgctcggtaaatattggttcttattactggacccattttataccaaggtttagtgctattaaggatacagagtaagtgactgagatggatttgactgtcagactctaaaaatctgtgtttaggtatgtgtatgcatgtgtgtttatatcaggttgaaaaaaatgctggctctttccttatttcatcactcagaagatgaatgtggtcttgaactttgggaagtaaatgagtttcttagggacatggagcttggaaagaaacctgaactatgcgtgcaagagatacctgtcctggccgggctcagtgactcatgcctgtaatcccagtactttgggaggctgaggtgggtggatcacttgaggcgaggagtttgagatcagcctggccaacatggtgaaaccctgtctctactaaaaatacaaacattagctgggcatggtggcataagcttgtaatcctagctgcttgggaagctgaggcacgagaatcacttgaacccgggaggcggacgttgcaaggagctgaaattgcgccactgcactccagactgggtgacagaccgagactctgtctcaaaaaaaaaattaaaaaaaagaagagacacctgtcttttctagcaattccctttccttccctctcctcctctccactctacaacctccctctcttttcctgcctctctctccctcctgcctcctctcaagtgaaagatctgtcctgggccgggcgcggtggctcacgcctgtaatcccagcactttgggaggctgaggcgggaggatcacaaggtcaggagttcgagaccagccaggccaacatggcaaaatcccatctctactaaaaatacaaaaattagctgggcgtggtggcaggtgcctgtaatcccagctactggggaggctgaggcaggagaatcacttgaacccaggaggcgaggttgcagtgtcgccactgcactccagccctggtgacaatatgagactctgtctcaaaaaaaaaaaaaaaaaatctgtcctgtccactgacctggtcttcctgctagggacaaggttttcctgttgaagacaaaagagggccgggtggcctgctctcaggtctgcctccttggcgaatgggccttacagcaccttttcctcaggagcacacatcagttgctcccattcctatttctgaagacaatctcaataccacattttcttagtggaagctgagggcaccccacgctagggtcactggagaagccttgggcctaagggtaaggagcaggacccggagctctgggctgtagagcgaggtgctcccggacaggctggctgagctgcagcctgcatcctctgtgctgccacaaattcagctgcctattgggggtgtcggcaccagctctcagggcaggtggacctgggatgaatgccctgtttgcttttatgggcaactcacttttcatacctgagcctcggtctcctcatccataaaattggcacaataacacttgtgcataatactggatgagatcagggtacaccaagcattcagcagctcctggcccaataagtagtagctattgtctttgttttcaagggtttttgcttgtttgtttgtttgagatggagtcttgctctgtcacccaggctggagagcagtggcatgatctctgctccctgcaacctccgtctcctgggttcaagcgattctcctgtctcagcctcccgagtagctgggattacaggtgttaacagtttaccaaacagtatgccatccattcaaatctctgctcttagggagctcatcctttcctctgctctaaggagcctgagtgagaggccctggtaacagcaaggggaaagaaggaaactgtattcccgagtccatactctgtcctagcatcacagcaaactcagaggtttttggacccccagatgttaagaggagggacaggccctgagcttcctaaataccctcatatgcccactgtcttcagctgggctctcccagaagcagatcctgagataaggatttaaggacaaattatttatttatttttcatttattttattttttgagacggagtttcactcttgttgcccaggctggagtgcaatggcatgatcttggctcactgcaacctccacctcccaggttcaagcgattctcctgcctcagcctcccgagtagctgggattacaggcatggaccaccacgcccggctaattttgtatttttagtagagatggggtttctccatgttggtcaggctggtctcgaactcccaacttcaggtgatccgcccaccttggcctcccaaagtgctgagattacagacggtgagccaccatgcccagccaaattgtttatgtgaggtgtgaccccggaagcactggtaccctactgtgggaaagtgggacaagtgaggaaatgaagccaacacagggtgcattactgagcaggtaactgctgtgggaagctgggctccatcgcacaggggacctctgggagactgtggtacacacctctggatggggtatttatccatccactcctgtccatccatggttgacagctgctcttaggggtacctaccctgcactggctgaatgcaaaaatgttctccaagtcagagaaagccccctggcagagaaaacatggccttataagtactgggggcatttgcttaccataatagtgcttacacaattataaatgactccaataattatttaatgtttccctcctgtattagaatataatctctctgaagatagggacagcatcaccaattgtatccccaggacctagaatggtgtctggcacatggtaggttttcgatagatacttgctgaatcaatgtaatctggaggctgacaaattcatgataaagaccccagttctgtctgaatagcttctctatctcttcctttctcctctctccaccctaaacttgatatagcagtgcctaaaactcacttccagtatcttttttaaaatttgccttcttctagagtataaaagcccagtatttaaccttgcccatggttgcctggaatagagggtgcttttcccaccctcctttgcagctagcagtgcctatgtgactaagttctgagcaagaggtgtggaattgatggctgccactttcaagatgtgtctttatgggtggaggtgcacccatctccttcccattcctccttcctgctggttggaatttggatatcgtggctggagcagccaccttggatcatgaggtggaaatcttggaccaaaggatggtggaagctagaagacccaggcaccctgatgatcagggagcagccactccaaccttgggctgaacctctggccttgctttacatgagagagcccttggttatgccattgttgtttggggtgggattttctgtcactcccaggtgaacaacctaatcctaagtgatacctagaaggtccctgctagactgacctcttgggaggggagggaataaacgagtctcaggtggtggaaccagagcttgctggagaggagagtctctcctggtgaatggaagccaggggcccctcccactggctgtctccttccctgggctcaggcaggtccagccttcctcaggactttgagaagttcagttctctccccaggagtagctactttcacaaacttcctgtccctttagtcgacatgccccacggcaggtccgaggctgggctctgccacaactcatctttcctaagagtggcatcaaggttctttggtgggggatcctcttttcccatccccacttctcaagagcattagggaagatacagtcagtgccctcttagcattctctttccacttgttgggtgtaagaagggaacctgagggccctgcagtgtttaggggtgggagtggaaacagacaggaaagatccagagtccccaagaagcgaagcagggagagagataaagaaggcaggaacaaccatggacacacattatcacacatacacaggttacaagagcaggaggctggagctgcaagaggtggcagggaagcttccagaaaggcagaccccagcctcatccctccctgccctgcaatgctgaagtttccaggtagaggggaacctctagacccttgcgactgtcagagttctgtggatccatttgtcagtctccccacccccaaccttgactatcctgggcctgccttcaggacagaacatgggaatgagaagaggacctgggaaggggtaatcctgggaaaaaaaagttcttattagtcacccctggctctgaggatactttccaggagtggcctgccaagccgtgtgaccttggacaagtcccgtccattcctcaggcctcagtttcctttgagggaccctgaatgggcgggggttgctgtagctttcctcagctgggagacccgggaggaggtccggggtgccagggtgggaggagggcctggcttgtcgctgaaagccggccaggcgcactgtcggcgctcagagctggtggccgcctcctgcgcttcctgattcccagccgcgctcgctcggagagcagtgcccgctatctcctggcccgggaccggcagaggggtgcggcggggcgggcccaggggtctctggcggccggaagaaccgggaccctgccaggcccctcccgcgggcagggcggcccctcgccggctcctcccccaccgcccgccaccagcccgggatcagtctccgcacgcggttccgcaggtggcagcgatggcccagtcctgaactccccgccatggccggcgcccccggcccgctgcgccttgcgctgctgctgctcgggatggtgggcagggccggcccccgcccccaggtgagatccagggaccccgacgacaccgggggaggcgggtggctctgcgggctgcaggcgcagtgtcctggtggagggccccgggacttgaacgaaactccgagaccgctggcgggggcatccgaaagcctcggggggagtagggactggagacttggtgcccctgggctggaaggcccaggtgagggcttggactacagaggattccccccaaccccagcgaggcgccctcttcctcgccacccgggtccctctgcccgggcacccgctgccccgcggccgccctgcgctgacttctgctccgcttctcctttgtccccagcactttcccaactccttctaaaccgtgtcagcggccctggcacagcccggcatcctcccggactccctctgccccacagtctgacccagacccctctcccgcagtgcctccccagacaatccacctgctcaaagaccctgagaagaccctgggaggagctgagagggccagggtgcggagacccggctcctctccctttctcatcagcccccagcacagcctttgattcatggctcctggggccctgcggtggcagcttgtccttcccagtgacctcccagatggaacctaccccccgtcccctaccagcctctgtagcaaacaggcagaaggctcagtgcccccctggaagcagccaggcgcccccactcacccactctgctgacctcccattctcatcctgcactgacagcaggccccaagagaaggcatactgggacacgcaagaacacctgggctccttggtgccaccagagagcaggccacaggtggaccaccgcagcccctctctcttgcccttgttgcttttcctgccctgggatcctgggctagggacagtggtcagctgcttttgaagaggggagctgtccaaagatgctgggacttgcttgagcagagaggagacatagacttgggtggcctgtcctgggtcaggaaacaggttcttcctatcacctcccactgctacccccagacctaaagaactgagatctgtggggagtggacctgaacgaaccttgaagtttgtcccagaaccattgccttggtgagggcagactccacctcggcggaaaccccagatgtggacagacatacctctcagctaagatgccagcacatttttcagcccccagattattttccagacgcatcctctccctgcccctgttccccagcccagctgctgtcctgagccccaggagacaacctcccccttccaagacaccttcctcacagcgcccccagccaggccttggttttcctggtgcggctgggatctttcaggggccagggctgcagacccaagatgtggttcttgcccatcgttccctcctcttacggactgggttgggataggggtggaggctctgcttcctggttccatcctcctccaggccaggtttacaggtctggtttgaatgaagggaagaaagcaaagggaagaggaaagtttctgtgagctgtcttcccagaggccttattcccagaagtgtcaggctcctgaacccacactttcctctgatccgattttactccttagccccaggcctaaggcaaaagctgggcatcctgggggcataacaggattggggtggtagagaaggataggaggggacaggtcctagcagggaggggagctttgagggggtgctcttgtcatgggaaactgagctgccacagagatctgagtcacaggaggtgttaaggatagattgcaacaattatgacacaacatcatgcgtgcttataagactaaaaaatagtgtattttgcattttgttttctgtctatgaagtcaaaagggttagagttactcccctcatgttgctgatgggggaatgaaagctcagaaaaagagggtcccctgtataaagtagcccagcagttcaggagcagggaagagaaaggggtgaagggctgggctcttgacctaacacctcctactcagacgggactgaagggagacctctgagagtgagctgctcactgtcaggtctcgtgaggctggaaacagcatccctgcaggtagggggatggctgagttgacttctgaagaaggtgccctaggctactctttcattgctgctgggaaggctcattcccctaccctggtccttacctctccaataccctggtgagggagcgggcctactgaggagacaggcaagcctttgacactcaaagttaaaatcagacacaactggattcaaatatagggtctgctattagctggtgatctggagttggacacttggttatccccaatacatgtccttatctgtaaataaggatcataagctctatcacatagggttatggaggggattgagacactggcccctgaaatggcaactttagtcactttagtcaaatggcagaactgacccatttgtccttggggatccagaagtgttttccagggctgcaggatagtatgagagaggggctgttggagaccctgggtctctgtactctagtgaatggcaggtggagtccagggctgagccttgatcagtgcggacattgttctaagctgggtttcctcctggacaggacccaggctgggggctggggcaggagcaaccaagaaaccacatcctgccctcgaatgccttgcaccaaggcaaaacaggcttcctcagctgcagcctgcccctaggaaaattcctatgtgtgtgtggtggtggtggtggttggaggaggggacagagatacagacaggtagtctgagacagaccagggggagaagggagtaggctatatgaacccccagttcccaggtatgtgtgagtgaccctgtgtgtaacagtctgtgtgggaatgagtccctgtgtgtgcaacatctcagcatgcaactgtacatctgacagtgtctatgtttttgtgaccctgcatatgatactgtgtctgtgggagggtctgtgtgtgtgtgtgggggggggggcatcttggtgtgtgaatgggtgtcaactagtgtgtgtctatatgtgcaggagagatagtgtgcatgtgagagtgtctgtgtgttcctctgtgtgtgtgtgttggggacagtgtctcagcatgcgactgtgtacctggcagtctgtgagtgattgtgtgtggtgggagagagtctgtgtcagtgtctcagtattgggaatgtgcttgggggcgtgtgtgatgatgcgtgtgaccgtgtgtccacgtgggggtttttgtgactgtaagaacatgtgtgtagtattccttttcctgtcctttcgttcagatatctaaagcccttagggaaaaaaaatggattgtaagctctgagcttttgaaaaaaaagaaagaaagaaagaaaaacaaggggcggtcaaagagacaggggtctgttgatggaaggggtgatttgacttctgggaggtgacacagaggaaggaggttggggtcctgggaggagatgccagggaacctgaagggctggacttagttgggggactccagaaatttgagttggaatccctccttcctccttctgagaggccttcctgcatgtctcccacctctgtgccacctccttcccgtcaccaaaatggtccccagagaaagaaagaatctgatacacttattcgcactgagaaataggagtgcctttcagattggcagccagtgtttggagagggagccccttcctggggtgttggaaagcccaccaccccgggggcttccactccacctgcttccttctctgctgtccttccttccaacgctgcctgcttgtacagggcttgagaagtcacaaagattttcacctgctttatcttgttggatctgtgcagtttgagaagaatgatatgcccattttatggacggcagaactggcaactgatgaggaaactgaggtcctaaaagataaatcgtgtcccacagtcctgcattaacagagctgggatttagaccaagaacttataaatcgctgtccagtgctccttcctgtagaccacaccactccctcctggtgtcctctttcctgtctcctgcttcctccaaaaactcctgaatctgagggatgccccttccttcttgtaacctccaacccaggtgtcgtctccacgtgccttcatccacctcagagagatcccatgaagcctgtcaagtcttgattctagaaactgccatcctgcccttcccatggccctttagaccccctctgaccgctgctttgctctcctggtcagctctgctgccttgtgagggacagggacatctggattgcatccttcccgctacccagaacccacagccccaccttgtcaggcttgcagcagggacttatgttgtgggaggatgaaatggaggagtgggggacactggtgggcagggccttgcccctcctcacagggcatggggtccaaagcttcctccctgcttcactttgccattggctgtggttactgctggaagatctcacaaattaagcagaatgattggtcattggacatgaacatatattcatttcctctttctgggaatatgttgatcctagaagtgaggaaggggtggggccccagtccccaggaagcctggtcactccctcccactctgccctttccactaaacagtagaaatcatggggattgctgccattgactgagccttctccatgtgcccaccatcctaagcattaactcagtccccacagccatcccatgggggaggggctgctgttcccttttgcacaagtgtaagctgagcctaaaacatacaactcttgcactcggttgcaaacctaatatctgggtgacccaggtccaggcccagatctgagcccaaggccagggttgttcagcctccactatgttacctgggcacccaggccctatggcactgggtggccctagcctcatttactcagtctttccccagaccagaacctcccatctgtcccagggcccaccaccactctctccctgccccaaaaaatcctcctgataacagtccacagctctcctctgctctccggagcactgatgtccccacctttgtaccttttccctgctgtgccctcctgctgaagtgcccgccctcctccttgctagcccagtctgcctccaacccccttcaccccagccccacctcacagtccccaatccctcaggcctcttgagtctgcactgaaccctgccccaaccactccctgaacactttcacccactgccttccctgttatgtcacttgtcctgtaaagcattgacccccgagtagcctgaagactctctcaggcagggctcctgcagtcacctttatactccctgcattcccctccacccacgaccacccagaacctggcacagttatggtttctgtaaatacgaggcgtgggagaggccagaagtctgggtagtttgcactgtgtgtgcctgcaggggtgggatgaaggctcgaaggtatttagaagccctgatctggtgtagggaggggacaagatactcttactgtcaggaatccctcacctaagggggagccacagccccatcctcaggaagctccagtctgaggggagacacagccccgtcctcagggagccccagtctgaatatagttttatgtccacagctctgctcagagtaggtgacagcgctgccctggggtgcaggaggccagattggccttcatggcgctgtcgttaacccctccccccgcctctgggaagaactggcttccatacctctctgcctgccccagacacaccttctgccccagttcccagcagtgaccttgtgtgtggtctgctttcattctagaaacagaaaccaagggggatttctccgtctctctgccctccacccccagcagctgctgcatttaggggcagcatggaagagccctttacccggagaagagggaagaagtgagaagggaaacggggcggtgggggttgatccaccaggacttgctctgatgaaaactgtgccacctcctcagctgtggctaatatcatggacaacacctttgcagctgttatgtttgatttcttgttctttttttccccaagcaaatacagttgacctttgccctcagaagagctctgtccttcagggtagcccctgccgccttggcacacttatgccaaggatgctgctggggcttaaagtgagctgggcccttccatggggcctccgaggcagcaaggggtgagcaaggcaacccaagtctctcagggaggtgtgtgataagccagctagaacccgagactggatccagcatgtgcccagcacgctacaaggcaagggggcaagcttctaaaaagaagctattttaatttcagcacacgtggacatttttgtgatttcaaaaagcaaaatgttgttttaaattatgtatgggtcctacattttatacatggggctcttgggtcatttcagcatctgcagcctctgaaggacgaatatttataatttttaaggctgttcaggaaaaaactaaaaagaacgacaaccccaagacatagctgaaggaagtgcacaaaaacactcagaaggaatggtggattctcagtgggatgggtctgtttgggtctgtgtgctgaaaagccatttcggtgacctcactggaagtggaggctcagctctccctactcacaggtgagagggatccctcccattgcacgtgtgacttcagtgttctggaacctccctgaccccttcacctcatgtcctcaggactcttcctttgggtggatagaagctgggttgaatattagatttggttgctgtgtcagaggggagcacggggagggggtggggggtgctgtgttgagtgcatctgtaagtgagtgcgttttggaggaggaatgctaatggcagacatcccagctctttgtagccctgaacgccactactctccccggcccccgcacaccttgcgatattctaccatggtcactgatctgaaggactccagattctagccttaactctgcttcctgggggggctgtgcacccttgattcagttcctctcccactctggcctgtgtgtcttcttctagaatggttgaaagtgcaagaagccctcaggcaggctgactaggcgccagaaggagcttagagtcctgggccctcagaaagtctctctcctaagtgagatcagagatcacaaatgagacacacacgctcctttcctccttcacccacccacctccccaaaagcatcaatttagcagacatttgctgggtgctcgtgacacatcaagctatgcaccctgggaggaatgaagatgtcaaaccatccacctggggcccctgggtggcagtgacttattctcactctctttcagaggtggctgatgcctggcagaatttggggctttgaggtttcatggagattgagaaaccaagtgtgttagggggtgagggggcaggagaggggctggctgaacccacaggcctcccatatatgccctccccccagggtgccactgtgtccctctgggagacggtgcagaaatggcgagaataccgacgccagtgccagcgctccctgactgaggatccacctcctgccacaggtgagtccatgtaggctccccacctttagtgctccccacccaaccaacttctggaggactttgatgaactcaatgtccatggctgggagccatttgcctctataggatgccacccctgccctctgccttcatctcattgtccaagctactccttcacctggataccttcctttctgccgaccaaaatcttccttttcttcaaagtccgcggaagcactgcctcctccagaaaatcttccccaggacttctgccatcatttggcccttactcgtttgctgtagtctgctttggggttgctgtcttatttctgtcttagctgtcttatctgtgtgtccttccctgcaccgccggccagccccccagctagagcctctcagagcaggcacccggcctttccatttttgtcctcagcacctcccagcctgtgcatggactgagggctccacaaacatatttataggaataaatgtttcagggagttcacaaggtggtttaaagagcacgggattggagcccgctgggcctaggttgaaatcctgactgtaattataacacgtgacctaaagaaggttatcttaagtgagatcagaaggaaggtaagctaacatttccctctaatctgtgaagtgcaatttaagaataggcccatagggatttttcattgagcacgtactatgttccattatctatgtagcatatagtcttgatcccacaaaaccctatggggctggaaatactcctgttttacagatcaggaaacagacattaagttacttgctcaaggtcctgccactgataagtggcaagtgcccctgcttggctcttgctgggtggggaaagtgcttggcatacagtaagcattcagcagaggttagtggcatgcagcctccgaggaggggaggggtcttggggaagggagggaaagggccatggccagtcacaagcagggactcagagactgttctttctgctcccagacttgttctgcaaccggaccttcgatgaatacgcctgctggccagatggggagccaggctcgttcgtgaatgtcagctgcccctggtacctgccctgggccagcagtggtgagccccctccccgacctggtacctgccctgggccagcagtggtgaaccccctccccgacctggtatctgccctgggccagcagtggtgagccccctccccgacctgatacctgccctgggccagcagtggtgagccccctccctgacctggtacctgccctgggccagcagtggtgagccccctccctaacctggtacctgccgtgggtcagcagtggtgagccccctccctaacctggtacctgccgtgggtcagcagtggtgagccccctccctgacctggtacctgccctgggtcagcagtggtgagctccctcccccaccgtcccctgtatcgaggaggctgaggtcaaggcgctgcttcctttcctctgagacacagccctccccacccagaatgtctttaggcctcctagtgagtggtccgcctgcctttcctggggtgaggggagcagtcagtagtgataagtttcatgatggcctgaggtaccacctgggtctgggcgtgaggccagtgctggccagtgtgtggggaagggaaagtaagtgtctgaagagaaatgcgaccccttccaattcagtagtcaggaaaagagctgggtggggacagactcttgcggggagggaagctacccagggtgtctgctgtgtgtatacatgtatgtatgatatgtgtatgcaggtggcccatacctggcagtgacatttagctacttcctcactctttagaggttcactgggagaagtgatcagggcattggtggggtgacgaaccccaccagactcagccctcctcagctcactcctgcctgcaagggggaccttgtactggggaagatgtgactgggtaggtgggaaggtcatttcattgggggtacagagatttgcagaggctgcaagaggatccctgactggagggttagttaatgtgccccgctatctatcccagcctcccttgctgagcccagtttcacccaggcaccgtggaggataacaggagacaagcaccctcatggcaaggagctcccagtctccataaggggagaaaagatatttccctatcatcatcatcatcatcatcatcatcaccatcaccatcatcatcgtcatcatagccagcatttattgagtacctactgtgtgccaagtcctgccctaaaagcagggctttataactaccctgtggttatacctgctgtacagatgaggaaactgaagcacaaaaagtttaagtcacttgttccaaatgatgtggtcaatggcagagccaggatttgaatccaattcgtgctcctatcatcacaccttgaaggggctggagcccaagcagcaactggcccagaaacaagtgcgggcatgaggttatgctctggggaagccaggtgtcttcctggaggaggtggcctggtggggcccaatgtaagcttcaccttggcacgtgggactgaagtcagatgaggcccaggctggtctcctaaaagtactgtctccttgtccacactcacagtacactcacctctccccaaggagcagggagagcctgggcctagaaggaggcaggagcctgggcccatcagtggcctgccttctccaatactgcctgttggaagcactttccgtgctacactcttttcatcctcacaaccctctgaggcaagtactctgattaccctcccattttcagatggggaaactaaggcacagaggtgctcagtgacttttgcaagctcacacagccattagtgggcgacccagaagcttggtttagagtcagtgtggctaattgctacaccaaagtcttccttgggggtgtgtgtgtgtgcccttgcatgtggctctggcctggagacaggtgagtgatctggatgccctctgctgtctgggcacacctctagggacaggggtgagctgtctgccctctcctatgaactctgcaatctggtggttctgctgactagccgtgtaagcaggagcaagttgccagacctctctgtgccttggttgactcatctgggagatggtatagagccaagtgacatgggtgtcgggaggaccacagggccttgagaaatggtagctgttaatttttcccacctccctacatacctccctgacttcctgcaatacacacactttctctgcctcccatagatttgagactggcagcttggccagcgtctgctgggcctctagaccccagggagccaggcgtaggacagggcccatcactcagcactaagccacccccagctctgcctgccgcttgcagctccatccatcacctttaattttatttgagcaggaaataggtcctggtggtgcccgtttatgagcaaacatggttttattgctttctccatgaagataacggccactgcacaggccccctgccagcctttccccaaccccgtccccctgccactcaccaggctaatttactcccttttttgacacttggaatcaccgactctgctgccctctcctcactccctgagttacggatgctcagagacaactaccacaggctcaagctgcgtaattgctgcctctggcctgtcctggagctttccttggcaaaggttggcagcggaggcttccctgacccccacccaggtgtgtgggagcagttctgaagaaggggacagttctggagctttcttgggctgatcaagcgagtagcctgtggagaaacgtcacagtgtgccctggtgtcaaggagaaggaagggagttatctcaggcagggtcctggcagaaaacatgctcagttggcaatttggagagaatttaatgttggggaggggtcattttcagaggctggcaaggtaaagggaccaatgaggcatataaagcaccagggactacaacaatggaaagcttgagcacccctagacctgagaaggaagggacaagaatggggctggggggtccccatgacagctgggctacaatggagaagccacccagcagggctgtggccacagaggggacaaagtcacaggcagacttcaaatcaaggcagggagggagcaggggagaacacccagcctctctctccctctgcccttccatcttctgccaatgcctcccactggcccaacccaacagaggccagggaagccgaggggtgctgtcccatggctcaggcttctagagttcagaatggagcagaggagtggtgatctgagaaacagcaaaagtcaaaacaatcaccagacccctgagctgggttgtgttaggagctagggatgccactgagaccttagaggtgtgtgagtgtgtgcattggggagaaggggtaacccccctccatggagctgaaggtcggctcagcagcccaggcagtggtactgagggaggccagagccaccccttctgccaggagtgtggcggcattaggaaggcttccagggacaggtgacactggggccagacgtgaaagaacaggcagatgcagaagggaaaaggaagctcctccaaggaatgagggttccaggcagcaccctggacatggggccaggccacgggcctcggaactacgcagtgtcctggagaagccagccaagcccttgaattctgacccctctaattgagaacttgggtctcaggattgtgcagagagagcaggagcagatgagtcaaagacagaagatattcaaaggaaatggctggtacaaacgagactgggaggagaaggctgaagtggcttcagagagcctgttggccgcccgagggcccttcagcagcctcgtttacccacaaacagctgatctgcttgttacaaatcattccagcctcattagctacacctcctcctgatccctacctgtttgttagcttagttctaattatatgagagtcataaaatgctttaaaaataacctataactcacagttcttggaaactctggcgggtgcctcccctgagtaatgtggagcctgggggtttttacgacagcctggggttgccaaggggaaactgaggcccaagcttgtccccagaggagttctggctgaagtggtgtcacaagctccatctccagcctcagtgaaggagtgccccttcaagaaaccggcatgggggaggatgtttcaaaggtctactatgtaccgggcacttcacatgctttatcttctgggaagtcattatgcttcccattttacagataaggaaactgaggcctgaggatgtgaagggacatgctcaacatcccacagctggttgaaggcagaaccaggatttgaacttgagtctgtgttgttcagaacctgagctccttctcctaagccctgatgctctacagtacccttcaccctggccttgagctgatgccttcatttcgagcctggcctttgaccctcacctcactcccttggggaggccctgtgcctggcctctctgagtctcagcttctgcatctgtaaaatgggggcccagtagtccttgctggccacctcgttgccagggtgcaggagctaatggattcatgagcagctctccacagccctgagtgccagcatccacgtggaagggcggctgttagcttgattacaggcgccgcagcagcttccgggaggggaagtgtttaattgggggttttatttccagcagcagggtctggcttaatgaaatatccctgggcctcctggcatgtggctgccctgctgcctccctgtgttgacaagccttgagccaaatccctggctgtgatttaccagctcctcccaagtcagataaagctgggttgataagtagggctatgccctgacccaccccacctccagccaaggtgggcatctggggatcatgggcccagccaggaaccagcctggcttttaatatttgatgttaatgaagggtaattgacagatgcacttgcacaggctcactgagcgagggacacagtgatcctttgactctgtgctagtaatgcacacatctgtgcacacaccacctccccaccctcccaactggctctgaacagagggagcaggaatggtgcagcggccgggggtccacactggcaagggggcctgctgggaggagactgaatgttgagaaatctgagcccagaggaagggcagaggagaatggcacatgccacattctttcctattaacagcaagtttggctgctaacttgggacctccggaggcaaagagctggcggattttagtcttgactctgctactttctagttgatgatcttaggcaagttgtttggcttctcagaggctcagtttcttcatatgtacaatgggactaactgttcctaccttgaaaggtggttctaatgtccaaaggtgtcaggtgtacagtaggtgttcaaaaactgattctgtgaaggcacagcctatggaaagagcaagtaaggagcatgttgtgaaggaatctgcaacaaggcagtgcctactgtatgccaggccctgtgccagctgtgggaagtgcatcttactagcatcacacggttgcaggctgagtcctgggtatgcgggtctttagatggtttgtgtgcctgtggttccatggctgtgtcttcttttctctggtccctcaaccttcttcctttctccccatttcctcccatcaaagcaggctgctagtgcaggctctgacaccatctcattccgcatggagtcagctcaggtccccatcactgcttttgggggtatctacaggaaaacactgattttgcctcacgtcagaagacttggccccagtgaagaatctcaggcatccatgcagcagataagagaggcatttgtgggcttgagaggggcccttcgcgttgctaaaatcagaccacgtgcctccccttctctgccgttgggggtacacctgattttgttcataaatgcgttcgaagggtattggaacaccatcgttcccactgctgtcagtttcaccattagattttcaggtttttgtttttctcccaggtgaagtatcttttaaaatgcaggttcttccagaaggagtcatgctgcaagctgacttgccccactgtgttaccagataatttctgtgtcttgaagggggacctggttcagggtttgtttgggaaaggagctgggaaggaggagaagaaagagcagggaggctgtcctggtgtctgggatcagggttaggggagggcaaggtccattggcaggccttgctgacagtgctggaagaggctgtcaccagactctgcagtaaagttgtccctgccacattttttgctagggtgaaaaatagaactcccagactagatggttgcccctgtcctgcacccctgagggtcaggccctggggctgccacagtccccatcgtgtacacacacacacacacacacagacacataacacacacacacacacacacacacacacacacacaccccacattaatgaagcctcttctcaggagactcagttctttttttttttttttttttgaggcagagtctcactctgtcgcctaggctggagtagttagtggcttgatcttaactcactacaacctcctcctcccaagttcaagtgattttcgtgcctcagcttcctgagtagctgggactacaggcgcacgccaccatgcctggctaattttttgtatttttagtagagatggggtttcaccatgttgcccaggctggtctcgaactcttgagctcaggcaatccacctgcctcggcctcccagagtgctaggattacaggcatgagccaccacacccagccgagacccagttctgactgctgtctctccacatgaacactgagcagccactgcccccagtgggcctctggtgccttctccattctctggccttcactccctccttcctcccacagctgggaaaactggtctttaaaatcttctagtcttttagaatgttgaactcttttaaagtttgtcctggctgcagcttctctccttggtccccctgttcttcctacaggtcaatatccccccaccctctcattgtgcccttttgtcccaagttcattggccctggtgtcaaacttaagttcccctacagagaggccaggaatgaaccatttcctcctggacacaagtaagcagtggcctctatcagcctcacatcaaacctgaggccacaggccagccatctccctggtaggtggacatggggcatggtgggggacagcctctgctgggatgtgaatgggcacaggcaatgccccgccttgcctctgcagggcctgtgtttgatctctgttagtttccatctatgctcttcctttctcaggtcttttttgttttttctgtgtgagtcttgattctctgaagacagggacggtgccaccatcctcagacaggggagctccctgaggacgggggctggatccctttcctctctccaagggctatctccatttccaacctataattagagtctatgtgaaggtaggagctgggtattccctttttctatgggggatctccaaaggccaaggctgcatacgaccaagaggccgtgtactccttttagaccagggggtccttgcaggtaggtctgtgtctcctccatcagattagaacttcttatgggcagggctgtgtctctctctctctcagatcagtgctctgtcttccttcccttctcttgggaactcagtgccaaccttgttcccagggtctgctctccccaaggagtgtgggagggaggtgggcactgagtcctaaaaatcagaaatagcgagtgactgcggggcaggcacggctgctgctggtcggtgccagaccttgtcagtagtgtgatttgaggctggaggcagggacatggaactgagctaaactcctgtcatctcaaaggcatgaattcattaaactgtgtcctagggttgccgagaggcagggctgagggtggagctgaggagcccctgccttggtggccccctgtcttgtccctggaccaacagcgtatatgtcaggggaggaaggtccaggtgtgtgtgtgtgtgtttgtgtgtaaagaagggaaaaggatgtcactaactcagagtagtccattctgggggagcagggatagccctcagaatggggaggaaggggagcatctagcactgggcaggctgccctattctgggctgaggctcagggccaggtctccccaccccagtgccgcagggccacgtgtaccggttctgcacagctgaaggcctctggctgcagaaggacaactccagcctgccctggagggacttgtcggagtgcgaggagtccaagcgaggggaaagagtgagttgaggcggggttctgagccagggagcggggagccatgtcttggagcacttcactggagcaaagacccttggctttgatgggggcatctgtggtcatttcatccatctccttgcctctgggggctttgcacaccatgctttctggacaaaggtggtgtgtattcacctctctggccttggaacagggcccaagatatccaagaaccatcgccgtaggttacggttattctctttcttggtcttggtatccccggtgagtcctgacttggggccccagctctgtctctgtgccatgggaaggaagattgtgggaagagggccatgggctgcccatgtacacgtatgtcccccgtgtgccacagagctccccggaggagcagctcctgttcctctacatcatctacacggtgggctacgcactctccttctctgctctggttatcgcctctgcgatcctcctcggcttcaggtaaggtggcccggaccctgggagggggctgcttcatcctaactcccccagatagaggaatgaagcagcccaacaccaaatcaaagcaacagtgcagcacattcgtccttctctcaagagctctctacagagccctgaccgtagaatatgaggttgaaaacacaggatgtgatactgtgttcttggtctagtctccacggtgtaaaagtgtgcgtatgtactgcaaaaaagaacaaaaataccacgcaagcaccaccaacctcaaaaccttaaccgtcggtgatgggattacggaaaatcccaggagatcttctccaatgaacatgtgtaactttaataatcaagaattcagtatgattttagaaaagatcttggggattagagatcttcctccctttggagcttttcagccccagtggaaaagttcctccttagatctaacctagatgagacgttccttccaaactaggagctgggaacagagtaccaggttcttcccactcctctgcacttggagaaggggggccagggggactgggttcaaagagggaagggattctgagagaatgagacctcaggacaccaggcagcaagagcaggagaggtggcattccctctcctaccttcaaagcacctggcacagtcctgggcacacggtgctcaataaatgcattcactcaatgaatattctcctcttttattatgaattattccagtgattcaaaaatgcaatgactgatactatgatcactcatgcacacaccatccagcctaagaaataacatgtcccatagttacacttctctgggtaaccctctctgatcccatccctctccctgccctacacccatcagaggtaagccctgaatgtgcctcttttaattccgacacatttccttgtacttttaccacatttgtgagtagctatagaaatatatagcaaggttctgtgtatttttaatagtgtattgaacatatttgtcttagtcttttcctgctgctatagcaaaataccttagactgggtaatttctaaataacagaaatatattcctcacaattctgaaggctgtgaagtccaagatcaaggcaccagcagattccatgtctagtaagttcttgtcctctctttccaagatggcaccttctcactgtgtcctcacatggcagaggggcaaatgggtgaaaagctctcacaaacaccctcaggtctcttataaggtactaatcccattcgtgagggcagagccttcatcaaccttatcacctaaaggcttcaccttttcatactattgccttggggactaagtttcaacatgaattttggagtgacacaacattcaaaccatagcattctgcccctggcccccccaaattcctgtcctcctcacatacaaaatacattcatttaatcccaatggctccaaagtcttaattcatcccagcattaactttaaagtctaagtccaaagtctcatctaaatattatttaaatcaggtatgtgtgagactcaagggatgattcctcctgaaggaaatttctctctagctgtgaacttatgaaatcactgaagttatgtgcttccaaaatgaaatgttgtggcaggcattctcatttcataggacagacattcccatttcaaaagggagcaataggtctgcatgtggtggctcatgcctataatcctagctaattgagaggcgaaagtgggaagcctgcttgaggccagagattggagaccagcctgaccgatgtaagagaccattaaataaatacaattgtttatttttttatctggaaaaaaataaagaattaaaattcaaataaaaaaagagagaaataggaaggaagaaaggggtaactggtcccaagtaaatccagacttaatgggacaaacaacattaaatcttaaagcttgagaataatcttctttgactcagtgtcctgccttcctgatatggaggtgggagttgggtccccaagtctccccgaagccccactcgcacagctttgctgggttcagctcatgtggcagctctcacaggctggagttgtgtgctggtggctctaccagtctggggtcttggaggagaatcttgccccccatgactctgctagtcattgccctagtcaggactctctgtagcggccccacacctgtgccttaactactatagatttattagaaacctccactctgcctgggccctgaggctctccaggatatcctttgaaatctaggtcttcctggatttcaaagaagtaactatgttccctacagctcgtgcactctgtgtgtctgtagagttagcaccacgtgaacactgccgaggtttactgctacgtcctccagagggacggcctgagttatacctgggcccacttgagccgcagctagggtagccaaggagcactgcacccaagtgtagggagcagagacaggaggtggccctgggcagtgacttccaatgcctcacagtgtcctgggctcctcccccagaactgttctgctctcaagaccctgacatctggacctgaaagatctctgaagtgcattcagggtcattcttccattttctacccatactaattttattaaatgttcacttggccacacccttggtattgtctcctgaacatgcttttgcattctttacaatatggtcagactgaaaattttccaaatctttaagttctccttctcttttgattataaatttcatctttcatttctctcttctcatattttgctataagcagtcaagggcagccatgctgtaccctcaatactttgcttagagatttcttccaccaaatattctatttcattgctcataagtctttgctcccatgaaacacttggacatagacacaattcagccaagttatttgccactttgtaacaaaaagatggcatttcctctggtctccaatgccatgctcctcatttctatctcagacctcatcagaatggcctttactgttcatatttctaccattattatgttcacaaccacttagataatctctgtgaagattgaaatttttggccgggcgcagtggctcacgcctgtaatcccagcactttgggaggccgaggcaggtggatcatgcggtcaggagatcgagaccatcctggctagcatggtgaaaccccgtctctactaaaaatacaaaaaattagctgggtgcggtggcgggcgcctgtagtcccagctactcgggaggctgaggcaggagaatggcgtgaacctgggaggcggagtgagcagagcagtgagcagagatcgtgccactgcactccagcctgggcgacagagtgagactctgtctcaaaaaaaaaaaaaaagactgaaattttctacatagctctcatcttcttctgagctctcaccagaatcaccttgtatggcccatttgtggaaatatagacttttttctatcccaccacccagttcccaagctactgctacatttttaggtatttgttacatgactccccactctcggtaccaatttctatcttagtctgtgcctgctgttataacaaaataccttagactgggtaatttttgaaaaatagaaatttatttctcataatttagagggtgggaagcccaagatcaaggcaccagtgggtttgatgtctagtaagggcttgctctctgcttctgagatggtgtcttctcactgtgtcctcacatgatggggaaggagtgaacactatgccctcacatcacagaaggcaaaagggcaaaaagggctcacaaactcacttaggcctcttttataaggacgctaatcccattcttgagagcagagccctcatgatctaatcatcttctggaggcttcacctcttaatactatcattgcattaaggattaagttttatcatgaattttggaggaacacaacattcaaatcatagaaatatttttctgtaattttttggtccaacattatgtttgtgtgagattcattcacattgacacgagcagtcctgttttgtggatttttaaccaccattccatattccgttgtataatacagcacagtttatctgtcaaccttttaatggacatttgagttgttctctttttttctttctgaattacaaatgttgggtgcaatgtacattcttacttgtgcatttctctggggcatataactaggagtagaattgccaggtctgactaccacctgctttcgcaattttactatgttaagttgttcttcacagtggtcacaccagtttaccctctcatcagtaataaaagagagcttcctttgtctagccttctcaccaatatttagtgtcttcagacttaattgttgctaacctgaagtatgtgaaattgccttatgattttaatttgcatattccagattcccaaagagatcaagcattttttttcatgattttttctgtgagttgctttttcatatcctttgcttactttttcattggcttatttgggtttttcttttctattttacatattcattatatattctggatacttatccaggatttaccctctctttagtctgtggcttattttttcactcattttatggttttttatgcacagaagttcttcattttaatggaataaagtttatcaatttagtattgataaataaaatttatcaataaagattaagcagttgataacagttaattttattgattgctttaaaattattcattttttccaaagaacaaattctggacagtcttattaagaaatctttccttggctgggtgcggtggctcacgccagtaatcccagcactttgggaggctgaggtgggtggatcacaaggtcaggagatcgagaccatcctggctaacacagtggaaccccatctctactaaaaatacaaaaaattaggtgagcatggtggcacccgcctgtaatcccagctactcaggaggctgaggcgggagaatcacttgaacccaggaggtggaggctgcagtgagccgagatcacgtcactgcactccagcttgggcgacagagcaagattccatctcaaaaaaaaaaaaaaaaaaaaaagaaagaaagaaagaaaaagaaatctttccttaccctagtgtcataaagatggccgtctatattttctgtaagtttcagagttttgctcttccttgtggttctttgatctgcttggaattcatattgcgtatgatataaataaaggatttcatttttttttctgtatgtggaattagctgcctgagtaccatttattgatagcctttccttcccccttggtttgcaatgactgccattccatgcagcaaggctccacgtatgtatgggttggtttcagtcacctacagtttttttctgtttatctttccctgtccggataccatggtgccttagctactgtagatttactagaaatcatatagcaaaatctcctcctctgtgattctttaggagtgtctggaatattcttagccctggctcttctttataagtttttaaagttctactttaaaaataaggtagaatttttatgaatacggagagacttgactcctttaaggtagcgagtctttctatctgtgaatgtgatgtatctatctcccactagtttaagtcttcgctaatgattttaagcaagatttataaaattctccatcgagatcttacctatcttctgttagactcatttcaagctagttaattaaaaatattgcaaaagaattatttctaaacatttacttttaaatttttttaacgcaggcatatacaaacatacttatcagcaaccttgctaaactgtcttattagttctaataatttgtccatagatttcttgaattttctatgaagataatctaccatctacaaataataactattttgtttacttctgattcttgtacatttttcccttgccttattatagtgggcaggatctgtagttacaatgttgactagaagcagtgataacagacatccttattttgttcctgatttcaaaggaaatgctcccacagtttctcagttaagattgatatttgcccctggttaggtaaatagccttcattaggttaagaaatgcccctgtactttcaatttgctacacattttcacatgaaaggatattaaaactctatccaatagtttctgaattcctaccaagtgcctagtcctgctctgcctctgtgaggcatttaggatgtgggccctgtcaacaagaagcagtgttcccactggggaaactgatcctcatgcataaatctctttggttatgcaagactttgtgtcaaagaagatgctgcagagagaaggatagaatgtggatgggaggagggggcagtgactacatagcggaagccttcatggagaggcaggatttgagttggacagaaggattttcacgatgatgaggaagaagggtattcatagaagaagacacacgcacagtcccagggctggaaacatgcctaatgtgtgtgttagcttgagagcctggggttgtagagcagaactgttggctgccttgccagggaaaggccctgctttctccctcagacacctgcactgcaccaggaactacatccacctgaacctgtttgcatccttcatcctgcgagcattgtccgtcttcatcaaggacgcagccctgaagtggatgtatagcacagccgcccagcagcaccagtgggatgggctcctctcctaccaggtgtgtggtgcatccaggaccgcctcaggagggatgggcggttggaggaggcctgcctctgccaccctagacaggcctgggacaggagaagacaagagccgaacagtcctggcccttcgggagcccccagtctgatgggagaggcagttcgccttgggaccctccagtctgctgagagaggcagtctaccttagggagctcccaatctaagggaggagacactgccctagggaattctcagtctgacacaaaagagtagtctttggagacacacttgagtttgaatgtcagctctgtcacttactatctgtacacttttaggcaagtcacttacttctctgaggctgagaaataggtgagaagtcacttacttctcacctgcagggggatacattactttcttccaatcaggatagtgaggattcaatgagctaaagcagataaagtccttagcactagccctagccagagatgtgagctctctcctcctgcattaaccatggcaggatagtggctggagcaggacggggagtggtatcaagagaggcagagggcagagctgttgtccccatgacacccttcctctacccccaggactctctgagctgccgcctggtgtttctgctcatgcagtactgtgtggcggccaattactactggctcttggtggagggcgtgtacctgtacacactgctggccttctcggtcttatctgagcaatggatcttcaggctctacgtgagcataggctggggtaagaaccgccatcacccaccctggacctgtggcacgggggtgggagaccttgacccctcttctaacatggtacttggaacgcactgctgagcaaggggcaaggcccactgggtaaccctcttcctgggcacaggaccttctgccccggtgctgttaagatgccgtagggggttatggtcctcccctcctctgcataactctcctcccttaatggaagcctccaccgcatgtggccaaacaccaccctctaccactatcatgcacaccactggaggtcatggcactgttctcttaagaccacatggggacataagttcacacccagtcccgggcagcccgagggcctgagggaaatggtgagtcctgggcctcaaggtggggaggggatcaagagggtagggggctggctggggggagcctgctggtgctctgtcacatgacgatgaagaggagggctcagaggagagccaagtacagtggggcaggggggccagaggccagccaaggaaagggtggacggcggatgtgcctggagcccagctggaaatgttctagccaaaaaagtttgccaagaaccattgtgtctttttttttgctggaacatttctggttgtgcttctgcctctcaccacgtgggattgtaatgaggggcagcattggggttgggaagggggctgggatccccttcacccctgggaaaacatgcaacaggcctttctggagggacccacggtacccagagaataggccctgccctctgtcctccctaatctgccattgaatccatgagttttcctgttccacaccatcccccgccctgcttgccactccttcattcactcctccttccttcatgcgcccacctcacgctgctctgaccacggctgcccctgccacggacctccggggactttccagctcagtcacatccagactcctcttccctgacaatggtcctgtccctgagcctttgcaaggctgttctccatgcaggaatgttcagggagcatccttcccacaccagggtgtccgctgcctcttcaggaagctgcctcaggccaccagtcctcgtggttctgtgctctctgccctctcaagctctccatcccctgtccttgcacttcatttatttttactggtgttcctcagccatttttctctatacagctccccccaccccccaggagaagagtagcctgagagattttaatgtgaccagtgtcttgaggacaccaaggcccagagctggcagggccttacaggcagagcaggccctggaacccaggcctcctgactcccaggctctgggcctgcggccatcatgccctgttctcttgcctgggctgcatcccttcagtcccctgcagcacccctgagcaggctcaggcctctgcacaggtgggcaggtaggcctggctcctgctcacagatccctgctcctcacctgcctcctccactcccagaacccagtcccttccttggccttttctccccgaggcttcttcctcctgctagagcaggaggagggaggccatcgagggcagctcagggaaggctgtcttcagggtgggggacggtgtctgtccattctaggaaatagcatcagcgctgttagtgcctgtcaccatggcgacccgagggcaggaacaatcaagggacgtgtgtgatgtgtgcagaggagcgggggtggctggagtttggtggggacacactgccctagaggtctctgagtgggagatgggggagggagtgccaagtccttttcctaccacctcacaccctagctcagggctcggggtctgtgggagcacaagggcaagacccggaggacaccctgctctaatcagaacacctttttcttgaggattggggtgggggagacggagagagattcacaggttgctaggagctcagacgtgatgccaggaggccttgcccaagctgggatacttgggaaacaactttcagcttcatgtgcaagtggaagaattaaaattaggactctgacacagttggagaggtcccccaaagggcatggcagcttctgctgcagtccccaggcagttgggggcctgtagaaacccacatggaggctgtgcaagagggaggcaaatgatggttgagggaatcattacttcctggagccagttgtgtgtgtcttaatttgagcttttttctccaacctgtcttgctcgttttctaaatgggagaaagatgaagccagcagggagtgcgtaatgtttgcatgcagcagggctttcgtgactgtgttttttgaaaaggccttgttaaggaaatgctgacgatgagtgaaacttgccaggtctggctgataacatgggtgagtgccctgatcctggaaggaggtctcagagagaagggacagcagggggcgagggatacccagaaggaagcttctgcatgtgtacgtggttcaggaaatcggcatgctcttgcccagacaatgttccttcccttattggtgtgttgactcacccatcattcgttccattctcactgggcatcttctatgtggcagggcctgtaccatgtgctggggcctttggagaccatcccattccttgtccagtctcataaaggcctgttactaaagcaccgtagatgctgagaggtccgatttgtgtagaaatcaatgggccaggagagagagagctgatgaagaatgctggtccgctgggggctcctttgcctcctccatctctccctgcatcatcaggcacagtagatctgggcacacaacctgcttagtagctgctgttgagtggacactgatgtgctaaagacatagacaatggtgacaggaaaggctatgaagtggttctgtcctggaaatgtgctccaggcagagattcccaaagtcatacgtgcacactcatggtccacccaccacaccctcacacacacatgtctacataccttaatatgcacatgcttacctatctcagacacatctccaacactgagggaggggccaacggagacgagcatggagacagccagtgcagaaggccattgagggcggtgggagtgggtatgggattgcagccctgaattcgagccccacctgtgcccttctgagtccctgatccatctcctcatatgtcatgtgaggaaggaaaatccaattttaaatcaaccaacacagaccctgagctctcagggtgatctgggcattgaggctctgaaggtgagtgaggcccaggctctaccctcaaggaactgggaaccagttgtattaattctctattgctgcagaacgattaaccctgaaacttagctacttaaaacaacgaaccattgttatctcacagttcctgtggcctgcaatctcggttcaacttagctgggtaccttgtggctcaggatctcacagagaaaactctttaggcaagagcatgtggatttcctgaatcacatacacatatagaaacttccttcttgggcatcccccaccccctgctgtcccttctctctgagacctccttctaggatcagggcactctcagagaagcagccagctgtcaccagggttgctgtcatctcaaggcttaactggggatggagaatctacttccaagctcattcaagaggcagttggcaggaagccgcagttgctggccaaaggctggaggcctccatttcttgctgcagagacctccatctaggccttctgagttctctcagcacatggcaactggtttcccccagagcaagtgatcagagaaagagaaagagaatgcaaaacaagccacagtgtcttttataacaatcagaagtgacatgccatcacttctgccagaggttcctgggtcacatgaaacaatgctgatacaacgtggactaactacccaagggtatgagcacaggaggtggggatccctaggggccatcttagaggctgtctactacacaagtcaagtctcagccgagtggaaagtagtattgttgtagctgttgttattgtaggccactgcggacagttagttggtcagctggcatcaaggactgggctcctgtctccattccaggattctgccgagccctcttgaaggtgcacagtggtagggaagagatgactgaaaggacatccagtgcctttaggagttgactggcaacgtgggctgaagcaagagagaaaatgggcatcagagggttcgcctgctccttgcctcatccgtcatgctgtccccaccgcatggcccagtcccgctgctgtttgtgtgtctgtggcctggtaacttagccgggactctgagggcaagtcctgacagtgtgcctggcacacaggaggtgggggactgatgactgatgaggacctctctgtaaggaagagtctgggggtccgcatggggctcctgctgcctctgttctcccaggtgcccagaaaaaaactagaaaacatagttggaggccaggcaaggagaggggctggaagtgtgaggggcttggggcagggagaggcctcggcatgtagactgtggctctggcctgccagcccctctccccttctgtctttccctctctcttaggtgttcccctgctgtttgttgtcccctggggcattgtcaagtacctctatgaggacgaggggtgagtgtcctgctccaagggggcgggtgtgcccaggtccccatcctcaaggtccatgggattccttggtacctggggcacccatctgttgagaggataaaggggggtaccaggagcttagaaggtgaatttagttctctaatctcccctccctgcccctgcccctgcccctgcccctgtcccaggattgtttgatgactaacggaactgggtctgtggggtacatggtgccctcctgcaggtttttctgtaatatctgcaagtgaaatgtttgtgtcattttgtatatgatgctgggtacacacatgactgtgttggtaggtccttgaaagcttgtttgggggctgtgtgcatctctgtgtatgactgtgtatttggactatgcgtgtgtgttgtgtggctgtgcactggcagggctctgtgggtccatgggactggtttttgggtggctcctgggagctgtgtgtgtggcactcaacatggccatgtgcattggcggcctctgtgcctgcacctgagctgggggtcctgtgagtcctgctggatgcatgtgtgcatctctctccctccccagctgctggaccaggaactccaacatgaactactggctcattatccggctgcccattctctttgccattggggtgagtgatggtgtcagggatgggagtggcagctatgatagggctgggctggtgccccctgccaatccccggccccaccccgcaggtgaacttcctcatctttgttcgggtcatctgcatcgtggtatccaaactgaaggccaatctcatgtgcaagacagacatcaaatgcaggtgatgtaactgagctggctttactgaggaccctcagcaagtgcccctttccttctagcagagagagagagagagatcctgggatgcttagcttagagccctacactaccctctccttccacccaggcctggccttggaccccaaacccttgcttttgccctgtctctgggcagcccctggacttgttggggtcttgacctctattctttccctccaggcagcctgtcccagggtatttggggtgggagaacatccatgacccagatatcaggacttggtaggaagtggggagggtagagaaagggaagaagagtccatgggagaggtccagaatgactcgagatctctgccctgcccctcagacttgccaagtccacgctgacactcatccccctgctggggactcatgaggtcatctttgcctttgtgatggacgagcacgcccgggggaccctgcgcttcatcaagctgtttacagagctctccttcacctccttccaggtgacttcatgcttggggacacttgcttgtaaagtcctagagtgggggtgggacagacaccagcctgcatcatgcagatggaaaaggtgggaagactgggacctggaggggtgatccctgcccaaagtcacctagttggagcagagccagaactagtatccccaggtgtcccaatacctgggccagtcttctctgtaagcacatgggacaagaagccttcctggatgtagctctgggtaccagcctggcattgcagctgccatctacttggtggcgagcaccctgccaggtgctttacatgcattgtgcatttactcctcacagaacccaggagatgtgcagggttagcctcactttacagaggagactcagaggtgttaaaaccagagttacggtgtcacagtttcaaagaaaagaactgatcctctccactagcattagatgatgctaagggggtgtaaaaatacaaaaaaactggtccctgcctgcccctcaagagtgtcatgagatgcctgcacacatgtgggctcatgtgtgtgtatttacatacatgtgcagacatacagaacacaattctggagccctgggtctccttcatgaacagatggggctggagtggggaatattctccatgatcagagtcattgtacttcactggatcaggcctcctcaaggagaggttggatgtaggatctctacagcttctgggcagcttctgagcagggtctcctggaccccatggcacatgcctgggagacccatggggagaggctagctggggcctgtagccaggcctagtcgcagaggtgcaaccctggtgttccttcagaaaggaaatgagagggaagccactgccccattcctggatctgcctgggccgctggatttggggagggggttgttgaggatggagtcccaaagtgcttccgaccagggccagtctgcagggcacctccctcctgcttcctccctcttgatgtgactcttgtttccaggggctgatggtggccatattatactgctttgtcaacaatgaggtaagctctgaggagggacggtggggaccctggtgggtgggtaccatcagcccgtctggagtagtacaatggggactcccatcaatcttgccagctgaaaccccctactcacctcactgaggcactagggttgagaagccatcttgtccacagatttggttttctgtgcatggtctctctcacacatgaacacacacacacaagtacatgtacaggtataccctaatggcatgtgaccctaaggaagacccagactcatgttaaggggatcctgaatgaccctctttgcttggtggtagtgactgtcacttacaaagtgattcaacacacacatacccaagccacatgcttggggctttaataatcactatctcatttaattatgacccccacatccctcaaaaaaaaaccctgctaaaattcttatttcatattcccattttttatatatacatgaaaacactgaagatcagaaagagtcaggaacctgccctaggtttggaaatagtggcacacatcgcttcttagccttttggctaaggtgaagtgtggaaatagtggcatggcagagccaggattcaaattaattctgcattaaagcagaaagtaccccattcttcatacacacaggcaagagccctggctcactgtggggaagggggtggctttctggtgctaggatgggagaagggggttctcgctggccccacacactctcctgaaaatgtctgcaggacagcaggcctccctcccatccctgagatggtcagctcctgggaggagggcatggctgtgttcatgggcacctggaaaaggccccttccaccaaggtactcagctttggaatcccagagctcagggatgttggagtcagcacattaataggcttgtctttttctatgggtgtgggggatgcagaaaggacagtgggtggggacctgggtgtttcaaggagctatgagatggctcaaagaagcaatgtgatgtagcagaaaagatgcaaggatgcaggctttggcatcttatttggtctgatctgggccccatcacttaatgagctgtgtgactttgcctaagttacctgcccactctgaaacttagtttgctcatttacaaagtggggataatcctgtgaggattaagaaagtctgaaaaaggtgcgaaaggggaacagagaacaagtccttccttcaaggtgggatgctgaaggcccatcctagctcctcacaggtgctgcttggcatggagaaacacacaccattatctccagatgctcagtaagcaatcactattagatcagtattcagtgattcccagagacaggggcctaaggaatttcagaggatgccgtgcagagaaaatgaggctgggtgaaagggaagggaggggaatgttcccttgtccctgaggcctccccctgcttctgctgaactggctacctgtgggaagtgtggccctcagatctctaaatgggagggaaaccaaggtctcttaagggtttactgcatataaggtgctcagagtgtctcattacatccaatgctgtgcagcagatggtatccccaattcacagctaagaacgttaagcctcagcaaaatgaaatgagtagcctaattcaatagacagaagatggtagagctagtgggctgtggcgggggcaagatcccacttaatgcctcagggaagcaggtgctggggaggtgaaggcagcgccaggcaaagagtggcccataaatgggattctggctgctcctgggacaggtcttagaggacccagcggctccgtttggagggtagggcagggaacaggctcgtgacccacaggaggcagtcctggtcctcctccactgccatatcctcaaaatgagtttctttaaaactgatgcaaacgaggaagtgcaaaaacctaagctctgtgggtggcctcccctccaggaatgctctcagccagctgggtgatgcgctacccagccctgagctctgctgctttccattccagcccagtggtgatgggggcaagacagggtggcatgtatcctgtgtggggatgaggagcagaggcctgtagggagagactgaggctccctgctgccaccttgtcatcttgacccccccacgtccccgtttctcacttctctatcctctgacactgtcactgcagccctactagcagacacgtgtgcttggcttcccccccgccattgtgaacagtctcccctgacccctggctcagctgcctctccagattccatccttccaagcctagtcatctcatcacctccctcctcatgcaccacctatggctggcccacctttgtaaggggatagtacttctttgcccttggaaaaaaacttgatcctgaatcaccagggttgcacctctctgaccaggcctggctacagaccccagctagcatctccccgtggatcttccaggctagtgccacggggtccaggagaccctgctcagagaacgggagaacctgtctcccttcagagcaccagccagttcctttaaacccaccctgagactcctcatgccctggctgctccaggcacaaggacagatacatcattgtcactgggccacaaaagacacatgtggctctggggctaaggcctctgtccacaagagctgttctgcagacccagggttgccatggcaatgccaggtacttgtgacctgaggagaaaagatggcttgaatattggttctgtgtggctgccaaggcctgcaccagctgctggtgggcgtgagtggggacagggagggggaggcctgaaggtggttttgctgtagcttgtgcctgagagccacagtgaggtgactcagagccctgagtgcttgtcccagccctgccactgccgagctgtgtgacctggggcaagtcattttgcctcccttgcctctgtctccccagccgtaaatgaaggtgaatgagcttcccaattcaccccgaatcctgaggctggcatggtgcctgctggagagggaggtcaggaggggtgtgctgcactgcagaggtcgagggcagggatgaggataaaaatccgatggtggaggaggaagtgtggtggcctaagtcccagcccaggtgctcagaatctgtggtgttgtctttgtgggttcattttcatagctgaggaacagaaggaacctgatgtgagatgctcatgcatttatgtgttcattcatttggttcatttaaaacacatgtactgagcacctgctgtatgctgggcactgtgctaggttcagggatgctgagatgaagaagatgtggtcccagccctcgaggtgctcccaggtgagaggtaggagatggaccagggacaagcaggactgcaagagccacgcaggcaggaggccaggggttaggagccgggcattggaatcaggccagatctaggttcaaatcctggctgagcgacctgaggaaataaacactctgcacctcagtttcctcatctttaaatgtggagctactttgcagggttgatgtgaaagtcagctaagataattaatggaaaattctgtgcatacagtaagtgcccaataaatatggtgattttcaaggacaatcgtgattacaggggtcacagcagaggttcaggaaaagtgctgaaggagatgggggcagaaggagacactgtgtgtcagcaccctgagaagtcccataggtgtccctgaaacctctctttggtctctggtttcccggaggtgtgcctcagtttaccatctttccccccctctccagcggaagggctatgaaacaagcctggcctcctggcagctgcacaagtgggggccaccactggactcagggcccccatcccagctgtcagcatgcgctcccttcacaaagactcagccgggcagggagctggcatacaacagggtggctgtaggtggtgtctgctcagcctccttccctcccccactcaagcttgggttcatgacgctgcatgggacactggcgtcatcctggcaggcagcctctgggccatctcaactctactcagtgcagaaaatgttcttttaagggatggcatgcagccataccaggcgtcttgctgggcatagctggatggacgacaaaggaggagaggagggttgtttgcacaggggctggtggggagattggccccttatccacagccgctggcatctggctgtcttggtgacttggcctaaagggaagggcccagaccccagacactctggtgtgggaagggtggggacttcaaagaagctctggaaagcaaatgtatgggaacatcacccagaagagcagtccagaccccccaggactagcttggcaggttccagctaggcctctccagggaccagaatcactggccaccaccgggagccacagcattgccacaaaccctcaagggatgggggctccacagtgttacttggatttgtctctttctgccccaacaatctggcccccaagcatcagccctcctgagaggcttttcctgatggggaggccagagcccagcacaacagggatcctggctgactgagctcccctgggctgcacccccatggtcactgcagtgtctctctagatggcatcagttgagaagccctcactggctgccccttcctccctgctgtttcccgtctcagccacattccttccttccctccctcctcccctgtgaggtgctggggcctggagagaagccctcagggagtttagaagggtctgctgtagacaccaggaaggctgggggttgccgtcccccttctcaagcatccaagctgaaactggactgtgcgctgtaaagacagagtctctcttctctctcccatctcctgtctccctgtgtttcaccctccctctcattctcttccgttaaataatactgtgatggattgtaaaaggtacttagctgaatcacagagtttagagatggaaaagaccaattaggtcatcaagctgatctctctcctgaggagctgcagaaaataggagacaacaataaacaattttattgggatattaatttaggagcccgaaggccttgacttgtgtctcttaatataatgcagtggatttcttcccttccccactaatgtaatagtggggccattttgttagccattggtttgcatgatggctttcgtttccctccttttcccatggaaggtccagctggaatttcggaagagctgggagcgctggcggcttgagcacttgcacatccagagggacagcagcatgaagcccctcaagtgtcccaccagcagcctgagcagtggagccacggcgggcagcagcatgtacacagccacttgccaggcctcctgcagctgagactccagcgcctgccctccctggggtccttgctgcaggccgggtggccaatccaggtgggagagacactcccagggacaagggaaggaagggacacacacacacacacacacacacacacacacacacacatacatcctgctttccctccccaaacccatcagacaggtaaatgggcagtgcctcctgggaccatggacacattttctcctaggagaagcagcctcctaatttgatcacagtggcgagaggagaggaaaaacgatcgctgtgaaaatgaggaggattgcttcttgtgaaaccacaggcccttggggttcccccagacagagccgcaaatcaaccccagactcaaactcaaggtcaacggcttattagtgaaactggggcttgcaagaggaggtggttctgaaagtggctcttctaacctcagccaaacacagagcgggagtgacgggagcctcctctgcttgcatcacttggggtcaccaccctcccctgtcttctctcaaagggaagctgtttgtgtgtctgggttgcttatttccctcatcttgccccctcatctcactgcccagtttctttttgaggggctttgtttgggccactgccagcagctgtttctggaaatggctgtaggtggtgttgagaaagaatgagcattgagacggtgctcgcttctcctccaggtatttgagttgttttggtgcctgcctctgccatgcccagagaatcagggcaggcttgccaccggggaacccagccctggggtatgagctgccaagtctattttaaagacgctcaagaatcctctggggttcatctagggacacgttaggaatgtccagactgtgggtgtagattacctgccacttccaggagcccagagggccaagagagacattgcctccacctctccttggaaatactttatctgtgaccacacgctgtctcttgagaatttggatacactctctagctttaggggaccatgaagagactctcttagggaaaccaatagtccccatcagcaccatggaggcaggctccccctgcctttgaaattcccccacttgggagcttgtatatacttcactcacttttctttattgctgtgaatagtctgtgtgcacaatgggcaattctgacttctcccatctagtggaaatgagcgaaatcatggttgtagtgatgttgtttgggagagtgcagtagtaattgatttgacccactcacacttggagctaattaaggtttgccctgcctgcagcctcccccacaaataatgaacagcagaaagactggacggggaaacctatcaatcctgcccccagccatggtgaggaagccccaagccatggtgacacacagcagcactgcagatagccagacacatggctatcctagagaggctggcaaggagttcgtggctgcaaaagaagtttctggagcaagagagagctcgctcttgggagtcaggacctccggggagagcagagggttccgacggattcctttatgagtcagtctctctctcccttttaaatggtgggaaccctccccaaaacctttccccagacacattctcctgtgcccctcagagaggcatgtgatgtgcaaggaaaataataggatataaaacacatcaagtagaaaatttcttatacttcagcttcagtgaagtgttgtctatgttaataggcaagttgaacctcgggctaaagaaaggaattgtgtggatggctgccttgactgagacaatatgggcaggggggcgttcctgcttccccagaacaagggcaggcttcccaaaggcaccccttatttgctgtctcttcgtaagcgtgggcaccagtgggttgatgtgggaaacagtgctggtgcaagtgtttaagttttggataaactgaggattttgagaatcattattacattacatagcaacaaagaaacagattgatataatctgtgtgaaataaattgctgaggagagggattgtagggaagaagttgcttagttaggcacctgggaagctcaaatcatttagtttaaactgtaagtagagttgtcttcccaacgagaactggtgattcctgatttcagaaggctcatcagacccctacacccaagtcttttaacacggaggaagtttttccttcatgaatacatacaagataccgaactgaagaaatcttttctttgctccaacccccgctcccccggccccccgaagctattaatagtcattcaaatggcactgcactctttccaagctttcctaagctaaatatggctccaacaggtctgggaactattgaatgcaatgtactctgaaattccagcagctgtttacatgcctgatgcctaatgccatacgcctggaacttgctgagaactctcggctgcctctgtcctggggtactattgctgaccagcagggtgtaggcgctgcttttgtttgagctttgtagccacaaggtctgatgtctgttgtgaacagcagctgacttcagcactctggccagcttcctcaaacttgttagtggcttgcattttgtcaatttttctttgccatttcagtctttcaagcagctgaatcgcagaactgaaacaaaacacttatattgcaaagttccttccctttaaaatgagcttctggattgcagagatgattttttatggtcttagcgtgcctcatgctgtagaccacatcgttggagctctgggagagctctgagcagagaaagaccttggtgatcccccctggcccgatctataggattgaggaatgaggcttgtagaggtggcttgcccaaggtcacaacactagagggtggttgagctgggccaggacccagacaagcccttttctctcagtctagtgaggcctctgggaaggataggtgaaaactataaatagctgttcaagatactctgagtaaaagtcagtggtgttatctggaatttctactgaagaggaaatacagcagcaaaggtagactcatcagatggtgaaagtgtcatctcctttgtaatttatactggtgagaggaggggaaggatgtgctttcctatttttacactggtacttcattcatccttgtcttaaacttaagaaatgaaatgcatcagggcacacatatacatagaaacagcacataagccattttggatggcaattccagcactcttttaatggattggcttaatttttttttctgatgcctctctatgtgtttgaaaagttgtattgatagtcacacagagtgtactaaaataacctaaaaggtcttgaacctcccctttacctctttagaacctctgaatttggagacagctagcaaacggcaactgtagcctagcaaagatggcacagcaccacaaagggcaaatggagtcaactcccttccatgctctgaaggtcttggccactctcatcagggttggctgtgtactatccagcagctcacagtcaggagacctcccctcctcagtccctcccatttctttcttccgcaaggaaagaacattgcatgtgggcgtgtgtgtgtgtatgtgtgtgcatgtgtgtgtgcatgtttcttctgtgcatagcagcataaagttaggagatgatgactccagaatcatcacacccgctgtgcaggtcataggaccgcacacccgaggctgggagtctaagtggtagatgcttcctctccatgcgcagacagggctcccattatttgctaatgcctgcgacgtgctcagggaaggcaaaatctattccaaaggtttattttccctctgttgaattgattctaatctacagtgcttaccctgcttttggctcctacgaggcaaactataaaaattctcaaataaaatacagaggcttactctgcaaagacacctgtgtgaatgacgtgctaaacattcagcagaaaccaaattaggatcaactcttaacattttttccctcttttgtggctggaatgagttcccctgggaaagaaaatcgcccaagtgagaaacttatgccaaccacattcccatgcccctacagttacctgctggcccagatcagctctctgggtctgcagagggccgagacaggaagcattattaagcagtataatttcaaacactttacttagtgccacagtgtgtctgcagtatctataagtacttccgctctgtcaaggaatacagactggcaggaagcagataagcataattgttttccaataactccccaagtctcttggaatatatatgtatctgaatctctcagaggagagagttttctctcttctttggccattttagcctattttccaggaccttgtctagcagtggctccatttttccccgatgcatccaacttccctccctgcactcctcctccccgacagctgcctcaggaataggtgaccctgctggccatactgtgaatgctgttctttcagctgtgaccaatttgggggtgcagctgagagtgaggtgctgtcagggctgaaaaggacgcacctcattctacatttggatgtgatgaggagcagggcagccaccagcttggatcctaacttacattgggtggtgcaacctttctgacggggcctgccaaactatcagtaattagccagcctagacaatgtagcatgactaattattgctgtgtcaaagcaattcaggacaagaaaaacatatctaaatgagaatgtttagatgtggtgagaaaagagctctcaccacaatttgaaacatataaaaagttgagttctttgcaggggagccaacgggggcattgagggaagggcaaaattcaccccagacagccagtgcttgatcttgccaaacagtttacactttacctccaaacctgcagttctaagctactccactaaaataatcatcccatcctcaaagcagaccaactccagcatcccatcggttctggagggatttgatgcaaacctttaaatgcaccaacagagaggtaagccaagctctcaggagggacaaagatagatttctatcttcagtgctcttgggggatgtttgctcctcatgagtgtttaaacaagatcatttccaggtgatttcttaacatataaattcctgcaaaataggaccagcttctataggtagcgaatgtgtaggtcatataattccttgtacagatgtgaatggatgcagactctttcctaatttgccttgtaagccaaataaaagtctgtctctactgtctctcttgctcttcctttgcgaaaggaggctttctgcaatgtcaatccaggtgactcacagtgcagtgggaaaacacaaaagatgccgtttccagccaaggaaaaaaaccttgctcattactcacaccgtgattttcatcttcaaagcactcaccaagtactaatttatccatcgcagcctttatgcagggactgcaatgtcatttaattagagaagttgggtggtcgagtggcttaaacaataactgatggccaaatggatgtgtattttaattccgctcattcattcgatctctcctgtctaaatgaactcagtccattaaatccattaaaaaaaaagtcataaaagcataagctttgtttgcaaagcagccacagaatttgaatggaactgctgtttagaaattcatcttcagaaaaaatgaacttttctccaatttaaataatcactcactctccagatttgcaactcactcttatagaagggcagaggaattgcagattctcctaattcccccatcatttcagctacacctatttgaaggtcggtgtacttacctgaaagtatctttaaacatccgctttttagacaagctgtggtaattgtccctttcaaacataagaataattcttaccctgagagcaagttatacctacagccaactcctgatagcagcaggtggaacatctgcatttgtttctctgcaccaatcttgcttttgagttaattccctcccctatggatattcttacctttctgtgcccttccccttccacttaacaggaccaaaatagaggtttttatcccctccctaccttccaggaaaacatccacccaaaccaattaatgaccaccacatttctaggtagctattacaaataatagaaatcaggtagaagtgcaccttctttctctgaggttgcactgtggcttaataagggcttgacctcagcctaaagaaagggggttggggagctgccctgctgttccgaggcctagccactggggagacaaatgagaattcttggcttccagactcattcatcctcacatgcaatataaagccatattctagtgactgctgcccccagatggggaagactgtgttccacatagagtttgtgaaggatctcactcacatgccatgcatatcagcattttcaaggtttgagaactcctgtccccttcccttattatcctctcaaaaccctgtgccatgaacatatggcagttcagtctctttcaatctctgtctctgtctcttcctctgtccttcctttttccctccttccctacccaccctcccaacacatacacacaaagagaaagactggaaacagtgaggttttccccatcagaagtagagaaatagttggtggggcagagagggagggctgggaactagcagcacaagctggactacatgacaaatgcagccagatggttggagaagatgggaacagagatccaatattgtgtgactacaaggaaggagtcgaactgagtgtccccaaggtgggaagggtaggtgaggaagagaagatgaagaggccagaacataagtagataaagaaaaaagaaaaatagcagactgtttaactgtgaaaaagggctgtagtgaaagaggggaggaaattgcagaggaggaaaaaagaatgagaattacaagtggcatgcgacaaggaactaggttaggaaccctatctccagtcagtgttattaactccatcttccataaatctgagctctttccctgtagcgttctctaatcctaagcggtgatagaatattttcttttgtacaaaagctcattttaactaacacaatgattttggaaagagaaaaagacccgcggcccagagtgaatccaacaagacttttatttttttcacactgacactgggcaccaatgtgagaatgaattactatggctccccctcatgtaggacaaatagaccttagaatttatttgtggtacaacctccaactacaaacaaaatcaatagctgagaattacaaacactggggagtcccatgctgagggatggattgccttagagctaatgcaggctggtaacacccagaggcgattagcaggcttttttttttttttaactttccaaatctttagggtgaaagagcaaggacttgaggcagtaaatgatatttacacaaaacttttttaatgccgatgacctaaggttgcattagaaacacacttggcaactacacaaactaaatagtgacaacaaaaaggccatggttactttaccctttagctccagtctttgacaatctgtaaccattatgtacatttctggctgaaaaaaaagcagtgttttaccatatttttgccctccagaacccttctgaaccttcaaaattcctaggaaattgaatttacagctttaataaaaccctctgctacccatcgattagatgctacttgacaataaaaccaccctcaagctctttcatctttcaaatcctggtgttaaaagtagagactagagaagccaaaccagagacacacaccaaagcaaagacatttccccctagttaagttaaatcaatgtccttccaatggcatcctttggaaaggtacagttaaaaatacagatgaagtctgggcgcagtggctcattcctgtaatcccagcactttgggaggccgaggcaggtggatcatgaggtcaagagatcgagaccatcctggccaacatagtgaaaaccaatctctgctaaaaatacaaaaattagctgggtgtggtggcgtgcacctgtagtcccagctacttgggaggctgaggcaggagaatcacttgaacccggaggcagaggttgcagtgagctgagattgcgccactgcactccagcctggagacacagtgagactccgtctcaaaaaaaaaaaaaaaaaaatacagatgaaaagatttctcatgtacactcattatatgaaagaaccatgttacattaagaattatactgtgttgaaatattctcagctgtcaagaaaaacatctataacatcccagctacataaagcatttacaaaaacaccttctagaaattggtaaagattgtgaagcctgccaaacaaggcatggtggtgccacaagtccagaaagaatgccacccgtggggtctcagaatcagctgtaacggcagtgctctcactcactctcctagccttgaacaacatctgcttctcaaatacagaccttccttctggcaggaaggggcccttacctctcaggctccatgactgagttagtcttgctgtcacttgttacatgagaaatgcaatagctcttgagacattctgtatccatggtgcatatctcctgggagcatgccaagccacccaaatcccagtaatacccccaagttagagtcatctccataatgaagtgtggggctcatgcaccctctgcattggccacccacatgaagaacagctttcttcagccgcactaaaaatgatgcatagatgtagatttccaaaggctatagcagcaagatcacagaaaccttacatgaacttcagaatctgacttctctctcttccttggggctggatcctccaaagcgatcagattctaacatgaatttccaaaatgatcatgtttcttcaggaaatgtctcttacagggcccctactcaccctgcattgcccagccttttattaggccatgaggattctgggaaaaatgcaaattgtctaggaaatgctcctctttgcagaaatagttttttgaaaattatatatgggacagaacctgataataatctatgagaagagccagaatagccaaagacatttttttttattgatgaggatctagaacaaggcgattgtttcataccaatctggtgccatttcacaatatgtttggcactgccaaacttagtctaaatctcagaggaaaagtcattagaagaaaaatgattaaaacaagctctgcaaaacaaagctatttctgtccctagagatggtccactgtaaatgaactgccatgtatataaagaatactctgcctgtcagcacatatgcttttctctaagagttattaaaataagatcaatattattagtgaagcaatcaatgaaatatttaccgagagagaaaggcagtaaaggacatggagatatgggggtagggtgctattttaggctggatggtcagggaaggcctctctgatgaagtgacatctgagagaccccagtggagtaagggagcaagacctaggatcatctaggggagtgagttcccagaaaaggcaacagtgaaaaccctaaagcagaaagaagcatatttagtttgttagatcagtaaactatggttcaccacctgattttatcaataaagttttattggctcattcatttacttatatattgtctatggatgcttttgctctacaatggcaaagttgagtaattgcaacagagacagtttggtcaacaaagcctatttaccaactggccctttacagaaagtctgccaaaccaaggaggtgaatgtaacctggaaagagaggcaggggccagatcactttgggcctggtaggataaaaccacctaaacaaccacctacctactgaacaacatccccaagagattaagagtgcagatattatttacaaattgaggtccaaaggtttcttttcactgcctcattctaaggtacccgtctgacctctgctttatttctggtctcagcctttttttccatgtgacagggatgtacacatctgagagggttccagggacatatccacaataagcccaaacaaatgagatttaagaaaattgtaaaatgaatgttcacaaataataattatatgctacaagttattatgatacaaatgtgatattttaaactgtatcataagacacagtgaaactactgctatagactatgttttccagcattttgtttattcaagtagaattccctagaaatgaaatgtattcaaagaccttgctatgcaaagtgtggtccaaagaccagtggcatcagcatcacctacgaggtggttagaaatgcagaatctcaggccttgacccagacctatttaatcagaatccacattttcacgagatcaccaggggatttggtgattaaagtgtgagatccggttttaatagggattggcttctaattactcttttctaagagatggaaatatagaattttaaatttcaaagaggttagcctggtttgtactattcatgctagtgacaactgaatacaactgaaatgtttaataataggggattggctaaataaaggctggcacatttatccatacagaaatattatgcagctgtcaaaatcaatactataggacaataacatgagaatatattcagagttaatcactaagtgaaaaaaatcaattgtagataggactaagactaaaacaaatgtagagataggactaaagaacagaatataaatgttataaaccttaacaatagggtataactaataaaatgagggaaggaagagaggaggcataaaaggtagtggtggtatgttgatttcattatctatcaggtcaaaatatatcatttaaggctgataactcaagtagtaggttgtaattatatttaaagatacaaagtcaatcaattagtcaataaatcagtagagctgggggttggaagatggagaaaagtaggaagaaggtggaaatataaatttattacacttattttttacagatgttaataaacattgcctaaaaatatcaatttttaagtaatcaatataaagttaaaaatataaacttgaaacagaaatgtaaactttctagattattgaaagaaacacacatacacagaaacaaaacaagcaaacacaaaaaacccagagaccatatggtaaaagaagctacctaaacagaataatataaaatgtgatgagataagcaagactttcataaacataaataagttaaactcacctattaaaagaaaatattctcacaatagattataaaagaaagcccaactagtctttatatacgagcagcatacctaataaaaataattcaagctgaaaacaaaactatgggcagaggcacatgaggcaaatgcaaacaaaaagtaagcagggcttccagccttaatatcagataagaataaattcagggcaaaatgcaataaagaaaacaaagagggctttgcataatgataaagggagcaatctataatgaagaccttaaaaatatgctttttatacatttcaaaatctaaagtgctaaaaaatactacaatctcatgaaaatcactgataaaaaccataaataaaactattaacaaacagaatctatcagcacatcaaaaaatagtacatcacaatcaagggtggtttattccaggaataaaaggatggttcaatatataaatctgtaatattaattgattatattaattgatcaaaaagaaaaaccataagattaatttccactacattgaaaggagattttgtgaaattctacatccattcttaatttaagaaaaacttttaaataacgtaagtacagatgagtaatttcttttttgtttgttttttttttttgagacagagtcttgttctgtcgctcaggctggagtgtagtggcacgatctcggctcactgcaacctccacctcccaggttcaagtgattcccatgcctcagcctcccaatagctgggattacaggcacccaccaccacacctggctaatttttgtatttttagtagagatggggtttctccatgttcgccaggctggtctcaaactactggccttcagtgatctgcctgccttggcctcccaaagtgctgagattacaggcgtgagccactgcatctggcccagatgagtaatttcttaagatatctgtttgtctgtctatctattcactaccccaaagccaggatcatgcttagtgggaaatactggcacatgctcattaaagtcaagagcaaaacaaagatatcattgattactattctgatttaatatttttctgggtgctttagccaacgtaatggacaaacagaaaaaaataagaggcataaaaattgggaaaagaggccgggcacagtggctcatacctgtaatctcagcactttgggatgccaagaggggaggatcacttgaggccacgagttcaagactagcctggccaacaaggcaaagccccgtctttactaaaaatacaaaaaattagccaggcatagcggcgcacacttgtagtcccagctactcgggaggctgaggtgagagagttgcttgaacccaggaggcagaggttgcagtgagccaagattgctccactgcactccagcctgggtgacaagattaagaccctgtctcaaaaaacaaaacaaacaaaacaaaacaaaacaaaaccccacaggtaaaataagaactaaattttacattatttgaaaaggaaataattacctatgtggcaaatccaggcaaatcaactgaaaaatcattataattagtaagagaatttggtaaaggactggtacaaaattaatataccaaaatcaatagttttcatacacacatacacaacaacaagttggaggaaataatagaagaaaagatctactgaacttaatagcaaaagataaaataaccaggaataacagggaatagtaagatcaatataaagcaaacttgaaaatgcaactgagggacagtaaaagaggcttaaacaaatggtagcataccgtattcttgaacagtaaaacaataacttataggtgcttcttctccttaagttatctgtaaatttaatgtgaaactaatgaaaatatcaagagaaattttggggacctggtcaagttaattctaaagaactcagggagaaaataaacatgttaagtgtaagttttaaaaaagaaagcaaaaataagagtaataaagaggtgtctagcccattcagattttaaaacacactaaagagctacaataataaaaagtgaaaaagctgtcagatcaaaagaacagaccagaaagcccaaaatagatacaaatacacaagaaatgtggtatatgatacagaagggttttaaattagcaggaaagagatgggttatttaataaataaacctgagggaactagatacctgaacaaatagatgcctgaataaataaagctggatccctatctgtaaccccactccaaactaaatactatagataaaaaacttaaatatagaaaatgaaagcaatgggtaaacatggaaatttttttgccgtatgacaaaaacccaggtcataaaatacataaatttgacaacaaaaaatttccacacagaaacaaaaacggcaacaagtttgaacaaattgagcaaaaatatttgaaatgcataattcaaagagccaattttcttcatttatgaagagttcctaaatgaaatttta

SEQ ID NO: 30 - DNA, 62964 bp, Homo sapiens
taaaatttcatttaggaactcttcataaatgaagaaaattggctctttgaattatgcatttcaaatatttttgctcaatttgttcaaacttgttgccgtttttgtttctgtgtggaaattttttgttgtcaaatttatgtattttatgacctgggtttttgtcatacggcaaaaaaatttccatgtttacccattgctttcattttctatatttaagttttttatctatagtatttagtttggagtggggttacagatagggatccagctttatttattcaggcatctatttgttcaggtatctagttccctcaggtttatttattaaataacccatctctttcctgctaatttaaaacccttctgtatcatataccacatttcttgtgtatttgtatctattttgggctttctggtctgttcttttgatctgacagctttttcactttttattattgtagctctttagtgtgttttaaaatctgaatgggctagacacctctttattactcttatttttgctttcttttttaaaacttacacttaacatgtttattttctccctgagttctttagaattaacttgaccaggtccccaaaatttctcttgatattttcattagtttcacattaaatttacagataacttaaggagaagaagcacctataagttattgttttactgttcaagaatacggtatgctaccatttgtttaagcctcttttactgtccctcagttgcattttcaagtttgctttatattgatcttactattccctgttattcctggttattttatcttttgctattaagttcagtagatcttttcttctattatttcctccaacttgttgttgtgtatgtgtgtatgaaaactattgattttggtatattaattttgtaccagtcctttaccaaattctcttactaattataatgatttttcagttgatttgcctggatttgccacataggtaattatttccttttcaaataatgtaaaatttagttcttattttacctgtggggttttgttttgttttgttttgtttgttttgttttttgagacagggtcttaatcttgtcacccaggctggagtgcagtggagcaatcttggctcactgcaacctctgcctcctgggttcaagcaactctctcacctcagcctcccgagtagctgggactacaagtgtgcgccgctatgcctggctaattttttgtatttttagtaaagacggggctttgccttgttggccaggctagtcttgaactcgtggcctcaagtgatcctcccctcttggcatcccaaagtgctgagattacaggtatgagccactgtgcccggcctcttttcccaatttttatgcctcttatttttttctgtttgtccattacgttggctaaagcacccagaaaaatattaaatcagaatagtaatcaatgatatctttgttttgctcttgactttaatgagcatgtgccagtatttcccactaagcatgatcctggctttggggtagtgaatagatagacagacaaacagatatcttaagaaattactcatctgggccagatgcagtggctcacgcctgtaatctcagcactttgggaggccaaggcaggcagatcactgaaggccagtagtttgagaccagcctggcgaacatggagaaaccccatctctactaaaaatacaaaaattagccaggtgtggtggtgggtgcctgtaatcccagctattgggaggctgaggcatgggaatcacttgaacctgggaggtggaggttgcagtgagccgagatcgtgccactacactccagcctgagcgacagaacaagactctgtctcaaaaaaaaaaaacaaacaaaaaagaaattactcatctgtacttacgttatttaaaagtttttcttaaattaagaatggatgtagaatttcacaaaatctcctttcaatgtagtggaaattaatcttatggtttttctttttgatcaattaatataatcaattaatattacagatttatatattgaaccatccttttattcctggaataaaccacccttgattgtgatgtactattttttgatgtgctgatagattctgtttgttaatagttttatttatggtttttatcagtgattttcatgagattgtagtattttttagcactttagattttgaaatgtataaaaagcatatttttaaggtcttcattatagattgctccctttatcattatgcaaagccctctttgttttctttattgcattttgccctgaatttattcttatctgatattaaggctggaagccctgcttactttttgtttgcatttgcctcatgtgcctctgcccatagttttgttttcagcttgaattatttttattaggtatgctgctcgtatataaagactagttgggctttcttttataatctattgtgagaatattttcttttaataggtgagtttaacttatttatgtttatgaaagtcttgcttatctcatcacattttatattattctgtttaggtagcttcttttaccatatggtctctgggttttttgtgtttgcttgttttgtttctgtgtatgtgtgtttctttcaataatctagaaagtttacatttctgtttcaagtttatatttttaactttatattgattacttaaaaattgatatttttaggcaatgtttattaacatctgtaaaaaataagtgtaataaatttatatttccaccttcttcctacttttctccatcttccaacccccagctctactgatttattgactaattgattgactttgtatctttaaatataattacaacctactacttgagttatcagccttaaatgatatattttgacctgatagataatgaaatcaacataccaccactaccttttatgcctcctctcttccttccctcattttattagttataccctattgttaaggtttataacatttatattctgttctttagtcctatctctacatttgttttagtcttagtcctatctacaattgatttttttcacttagtgattaactctgaatatattctcatgttattgtcctatagtattgattttgacagctgcataatatttctgtatggataaatgtgccagcctttatttagccaatcccctattattaaacatttcagttgtattcagttgtcactagcatgaatagtacaaaccaggctaacctctttgaaatttaaaattctatatttccatctcttagaaaagagtaattagaagccaatccctattaaaaccggatctcacactttaatcaccaaatcccctggtgatctcgtgaaaatgtggattctgattaaataggtctgggtcaaggcctgagattctgcatttctaaccacctcgtaggtgatgctgatgccactggtctttggaccacactttgcatagcaaggtctttgaatacatttcatttctagggaattctacttgaataaacaaaatgctggaaaacatagtctatagcagtagtttcactgtgtcttatgatacagtttaaaatatcacatttgtatcataataacttgtagcatataattattatttgtgaacattcattttacaattttcttaaatctcatttgtttgggcttattgtggatatgtccctggaaccctctcagatgtgtacatccctgtcacatggaaaaaaaggctgagaccagaaataaagcagaggtcagacgggtaccttagaatgaggcagtgaaaagaaacctttggacctcaatttgtaaataatatctgcactcttaatctcttggggatgttgttcagtaggtaggtggttgtttaggtggttttatcctaccaggcccaaagtgatctggcccctgcctctctttccaggttacattcacctccttggtttggcagactttctgtaaagggccagttggtaaataggctttgttgaccaaactgtctctgttgcaattactcaactttgccattgtagagcaaaagcatccatagacaatatataagtaaatgaatgagccaataaaactttattgataaaatcaggtggtgaaccatagtttactgatctaacaaactaaatatgcttctttctgctttagggttttcactgttgccttttctgggaactcactcccctagatgatcctaggtcttgctcccttactccactggggtctctcagatgtcacttcatcagagaggccttccctgaccatccagcctaaaatagcaccctacccccatatctccatgtcctttactgcctttctctctcggtaaatatttcattgattgcttcactaataatattgatcttattttaataactcttagagaaaagcatatgtgctgacaggcagagtattctttatatacatggcagttcatttacagtggaccatctctagggacagaaatagctttgttttgcagagcttgttttaatcatttttcttctaatgacttttcctctgagatttagactaagtttggcagtgccaaacatattgtgaaatggcaccagattggtatgaaacaatcgccttgttctagatcctcatcaataaaaaaaaatgtctttggctattctggctcttctcatagattattatcaggttctgtcccatatataattttcaaaaaactatttctgcaaagaggagcatttcctagacaatttgcatttttcccagaatcctcatggcctaataaaaggctgggcaatgcagggtgagtaggggccctgtaagagacatttcctgaagaaacatgatcattttggaaattcatgttagaatctgatcgctttggaggatccagccccaaggaagagagagaagtcagattctgaagttcatgtaaggtttctgtgatcttgctgctatagcctttggaaatctacatctatgcatcatttttagtgcggctgaagaaagctgttcttcatgtgggtggccaatgcagagggtgcatgagccccacacttcattatggagatgactctaacttgggggtattactgggatttgggtggcttggcatgctcccaggagatatgcaccatggatacagaatgtctcaagagctattgcatttctcatgtaacaagtgacagcaagactaactcagtcatggagcctgagaggtaagggccccttcctgccagaaggaaggtctgtatttgagaagcagatgttgttcaaggctaggagagtgagtgagagcactgccgttacagctgattctgagaccccacgggtggcattctttctggacttgtggcaccaccatgccttgtttggcaggcttcacaatctttaccaatttctagaaggtgtttttgtaaatgctttatgtagctgggatgttatagatgtttttcttgacagctgagaatatttcaacacagtataattcttaatgtaacatggttctttcatataatgagtgtacatgagaaatcttttcatctgtatttttttttttttttttttgagacggagtctcactgtgtctccaggctggagtgcagtggcgcaatctcagctcactgcaacctctgcctccgggttcaagtgattctcctgcctcagcctcccaagtagctgggactacaggtgcacgccaccacacccagctaatttttgtatttttagcagagattggttttcactatgttggccaggatggtctcgatctcttgacctcatgatccacctgcctcggcctcccaaagtgctgggattacaggaatgagccactgcgcccagacttcatctgtatttttaactgtacctttccaaaggatgccattggaaggacattgatttaacttaactagggggaaatgtctttgctttggtgtgtgtctctggtttggcttctctagtctctacttttaacaccaggatttgaaagatgaaagagcttgagggtggttttattgtcaagtagcatctaatcgatgggtagcagagggttttattaaagctgtaaattcaatttcctaggaattttgaaggttcagaagggttctggagggcaaaaatatggtaaaacactgcttttttttcagccagaaatgtacataatggttacagattgtcaaagactggagctaaagggtaaagtaaccatggcctttttgttgtcactatttagtttgtgtagttgccaagtgtgtttctaatgcaaccttaggtcatcggcattaaaaaagttttgtgtaaatatcatttactgcctcaagtccttgctctttcaccctaaagatttggaaagttaaaaaaaaaaaaaagcctgctaatcgcctctgggtgttaccagcctgcattagctctaaggcaatccatccctcagcatgggactccccagtgtttgtaattctcagctattgattttgtttgtagttggaggttgtaccacaaataaattctaaggtctatttgtcctacatgagggggagccatagtaattcattctcacattggtgcccagtgtcagtgtgaaaaaaataaaagtcttgttggattcactctgggccgcgggtctttttctctttccaaaatcattgtgttagttaaaatgagcttttgtacaaaagaaaatattctatcaccgcttaggattagagaacgctacagggaaagagctcagatttatggaagatggagttaataacactgactggagatagggttcctaacctagttccttgtcgcatgccacttgtaattctcattcttttttcctcctctgcaatttcctcccctctttcactacagccctttttcacagttaaacagtctgctatttttcttttttctttatctacttatgttctggcctcttcatcttctcttcctcacctacccttcccaccttggggacactcagttcgactccttccttgtagtcacacaatattggatctctgttcccatcttctccaaccatctggctgcatttgtcatgtagtccagcttgtgctgctagttcccagccctccctctctgccccaccaactatttctctacttctgatggggaaaacctcactgtttccagtctttctctttgtgtgtatgtgttgggagggtgggtagggaaggagggaaaaaggaaggacagaggaagagacagagacagagattgaaagagactgaactgccatatgttcatggcacagggttttgagaggataataagggaaggggacaggagttctcaaaccttgaaaatgctgatatgcatggcatgtgagtgagatccttcacaaactctatgtggaacacagtcttccccatctgggggcagcagtcactagaatatggctttatattgcatgtgaggatgaatgagtctggaagccaagaattctcatttgtctccccagtggctaggcctcggaacagcagggcagctccccaaccccctttctttaggctgaggtcaagcccttattaagccacagtgcaacctcagagaaagaaggtgcacttctacctgatttctattatttgtaatagctacctagaaatgtggtggtcattaattggtttgggtggatgttttcctggaaggtagggaggggataaaaacctctattttggtcctgttaagtggaaggggaagggcacagaaaggtaagaatatccataggggagggaattaactcaaaagcaagattggtgcagagaaacaaatgcagatgttccacctgctgctatcaggagttggctgtaggtataacttgctctcagggtaagaattattcttatgtttgaaagggacaattaccacagcttgtctaaaaagcggatgtttaaagatactttcaggtaagtacaccgaccttcaaataggtgtagctgaaatgatgggggaattaggagaatctgcaattcctctgcccttctataagagtgagttgcaaatctggagagtgagtgattatttaaattggagaaaagttcattttttctgaagatgaatttctaaacagcagttccattcaaattctgtggctgctttgcaaacaaagcttatgcttttatgactttttttttaatggatttaatggactgagttcatttagacaggagagatcgaatgaatgagcggaattaaaatacacatccatttggccatcagttattgtttaagccactcgaccacccaacttctctaattaaatgacattgcagtccctgcataaaggctgcgatggataaattagtacttggtgagtgctttgaagatgaaaatcacggtgtgagtaatgagcaaggtttttttccttggctggaaacggcatcttttgtgttttcccactgcactgtgagtcacctggattgacattgcagaaagcctcctttcgcaaaggaagagcaagagagacagtagagacagacttttatttggcttacaaggcaaattaggaaagagtctgcatccattcacatctgtacaaggaattatatgacctacacattcgctacctatagaagctggtcctattttgcaggaatttatatgttaagaaatcacctggaaatgatcttgtttaaacactcatgaggagcaaacatcccccaagagcactgaagatagaaatctatctttgtccctcctgagagcttggcttacctctctgttggtgcatttaaaggtttgcatcaaatccctccagaaccgatgggatgctggagttggtctgctttgaggatgggatgattattttagtggagtagcttagaactgcaggtttggaggtaaagtgtaaactgtttggcaagatcaagcactggctgtctggggtgaattttgcccttccctcaatgcccccgttggctcccctgcaaagaactcaactttttatatgtttcaaattgtggtgagagctcttttctcaccacatctaaacattctcatttagatatgtttttcttgtcctgaattgctttgacacagcaataattagtcatgctacattgtctaggctggctaattactgatagtttggcaggccccgtcagaaaggttgcaccacccaatgtaagttaggatccaagctggtggctgccctgctcctcatcacatccaaatgtagaatgaggtgcgtccttttcagccctgacagcacctcactctcagctgcacccccaaattggtcacagctgaaagaacagcattcacagtatggccagcagggtcacctattcctgaggcagctgtcggggaggaggagtgcagggagggaagttggatgcatcggggaaaaatggagccactgctagacaaggtcctggaaaataggctaaaatggccaaagaagagagaaaactctctcctctgagagattcagatacatatatattccaagagacttggggagttattggaaaacaattatgcttatctgcttcctgccagtctgtattccttgacagagcggaagtacttatagatactgcagacacactgtggcactaagtaaagtgtttgaaattatactgcttaataatgcttcctgtctcggccctctgcagacccagagagctgatctgggccagcaggtaactgtaggggcatgggaatgtggttggcataagtttctcacttgggcgattttctttcccaggggaactcattccagccacaaaagagggaaaaaatgttaagagttgatcctaatttggtttctgctgaatgtttagcacgtcattcacacaggtgtctttgcagagtaagcctctgtattttatttgagaatttttatagtttgcctcgtaggagccaaaagcagggtaagcactgtagattagaatcaattcaacagagggaaaataaacctttggaatagattttgccttccctgagcacgtcgcaggcattagcaaataatgggagccctgtctgcgcatggagaggaagcatctaccacttagactcccagcctcgggtgtgcggtcctatgacctgcacagcgggtgtgatgattctggagtcatcatctcctaactttatgctgctatgcacagaagaaacatgcacacacacatgcacacacatacacacacacacgcccacatgcaatgttctttccttgcggaagaaagaaatgggagggactgaggaggggaggtctcctgactgtgagctgctggatagtacacagccaaccctgatgagagtggccaagaccttcagagcatggaagggagttgactccatttgccctttgtggtgctgtgccatctttgctaggctacagttgccgtttgctagctgtctccaaattcagaggttctaaagaggtaaaggggaggttcaagaccttttaggttattttagtacactctgtgtgactatcaatacaacttttcaaacacatagagaggcatcagaaaaaaaaattaagccaatccattaaaagagtgctggaattgccatccaaaatggcttatgtgctgtttctatgtatatgtgtgccctgatgcatttcatttcttaagtttaagacaaggatgaatgaagtaccagtgtaaaaataggaaagcacatccttcccctcctctcaccagtataaattacaaaggagatgacactttcaccatctgatgagtctacctttgctgctgtatttcctcttcagtagaaattccagataacaccactgacttttactcagagtatcttgaacagctatttatagttttcacctatccttcccagaggcctcactagactgagagaaaagggcttgtctgggtcctggcccagctcaaccaccctctagtgttgtgaccttgggcaagccacctctacaagcctcattcctcaatcctatagatcgggccaggggggatcaccaaggtctttctctgctcagagctctcccagagctccaacgatgtggtctacagcatgaggcacgctaagaccataaaaaatcatctctgcaatccagaagctcattttaaagggaaggaactttgcaatataagtgttttgtttcagttctgcgattcagctgcttgaaagactgaaatggcaaagaaaaattgacaaaatgcaagccactaacaagtttgaggaagctggccagagtgctgaagtcagctgctgttcacaacagacatcagaccttgtggctacaaagctcaaacaaaagcagcgcctacaccctgctggtcagcaatagtaccccaggacagaggcagccgagagttctcagcaagttccaggcgtatggcattaggcatcaggcatgtaaacagctgctggaatttcagagtacattgcattcaatagttcccagacctgttggagccatatttagcttaggaaagcttggaaagagtgcagtgccatttgaatgactattaatagcttcggggggccgggggagcgggggttggagcaaagaaaagatttcttcagttcggtatcttgtatgtattcatgaaggaaaaacttcctccgtgttaaaagacttgggtgtaggggtctgatgagccttctgaaatcaggaatcaccagttctcgttgggaagacaactctacttacagtttaaactaaatgatttgagcttcccaggtgcctaactaagcaacttcttccctacaatccctctcctcagcaatttatttcacacagattatatcaatctgtttctttgttgctatgtaatgtaataatgattctcaaaatcctcagtttatccaaaacttaaacacttgcaccagcactgtttcccacatcaacccactggtgcccacgcttacgaagagacagcaaataaggggtgcctttgggaagcctgcccttgttctggggaagcaggaacgcccccctgcccatattgtctcagtcaaggcagccatccacacaattcctttctttagcccgaggttcaacttgcctattaacatagacaacacttcactgaagctgaagtataagaaattttctacttgatgtgttttatatcctattattttccttgcacatcacatgcctctctgaggggcacaggagaatgtgtctggggaaaggttttggggagggttcccaccatttaaaagggagagagagactgactcataaaggaatccgtcggaaccctctgctctccccggaggtcctgactcccaagagcgagctctctcttgctccagaaacttcttttgcagccacgaactccttgccagcctctctaggatagccatgtgtctggctatctgcagtgctgctgtgtgtcaccatggcttggggcttcctcaccatggctgggggcaggattgataggtttccccgtccagtctttctgctgttcattatttgtgggggaggctgcaggcagggcaaaccttaattagctccaagtgtgagtgggtcaaatcaattactactgcactctcccaaacaacatcactacaaccatgatttcgctcatttccactagatgggagaagtcagaattgcccattgtgcacacagactattcacagcaataaagaaaagtgagtgaagtatatacaagctcccaagtgggggaatttcaaaggcagggggagcctgcctccatggtgctgatggggactattggtttccctaagagagtctcttcatggtcccctaaagctagagagtgtatccaaattctcaagagacagcgtgtggtcacagataaagtatttccaaggagaggtggaggcaatgtctctcttggccctctgggctcctggaagtggcaggtaatctacacccacagtctggacattcctaacgtgtccctagatgaaccccagaggattcttgagcgtctttaaaatagacttggcagctcataccccagggctgggttccccggtggcaagcctgccctgattctctgggcatggcagaggcaggcaccaaaacaactcaaatacctggaggagaagcgagcaccgtctcaatgctcattctttctcaacaccacctacagccatttccagaaacagctgctggcagtggcccaaacaaagcccctcaaaaagaaactgggcagtgagatgagggggcaagatgagggaaataagcaacccagacacacaaacagcttccctttgagagaagacaggggagggtggtgaccccaagtgatgcaagcagaggaggctcccgtcactcccgctctgtgtttggctgaggttagaagagccactttcagaaccacctcctcttgcaagccccagtttcactaataagccgttgaccttgagtttgagtctggggttgatttgcggctctgtctgggggaaccccaagggcctgtggtttcacaagaagcaatcctcctcattttcacagcgatcgtttttcctctcctctcgccactgtgatcaaattaggaggctgcttctcctaggagaaaatgtgtccatggtcccaggaggcactgcccatttacctgtctgatgggtttggggagggaaagcaggatgtatgtgtgtgtgtgtgtgtgtgtgtgtgtgtgtgtgtgtgtcccttccttcccttgtccctgggagtgtctctcccacctggattggccacccggcctgcagcaaggaccccagggagggcaggcgctggagtctcagctgcaggaggcctggcaagtggctgtgtacatgctgctgcccgccgtggctccactgctcaggctgctggtgggacacttgaggggcttcatgctgctgtccctctggatgtgcaagtgctcaagccgccagcgctcccagctcttccgaaattccagctggaccttccatgggaaaaggagggaaacgaaagccatcatgcaaaccaatggctaacaaaatggccccactattacattagtggggaagggaagaaatccactgcattatattaagagacacaagtcaaggccttcgggctcctaaattaatatcccaataaaattgtttattgttgtctcctattttctgcagctcctcaggagagagatcagcttgatgacctaattggtcttttccatctctaaactctgtgattcagctaagtaccttttacaatccatcacagtattatttaacggaagagaatgagagggagggtgaaacacagggagacaggagatgggagagagaagagagactctgtctttacagcgcacagtccagtttcagcttggatgcttgagaagggggacggcaacccccagccttcctggtgtctacagcagacccttctaaactccctgagggcttctctccaggccccagcacctcacaggggaggagggagggaaggaaggaatgtggctgagacgggaaacagcagggaggaaggggcagccagtgagggcttctcaactgatgccatctagagagacactgcagtgaccatgggggtgcagcccaggggagctcagtcagccaggatccctgttgtgctgggctctggcctccccatcaggaaaagcctctcaggagggctgatgcttgggggccagattgttggggcagaaagagacaaatccaagtaacactgtggagcccccatcccttgagggtttgtggcaatgctgtggctcccggtggtggccagtgattctggtccctggagaggcctagctggaacctgccaagctagtcctggggggtctggactgctcttctgggtgatgttcccatacatttgctttccagagcttctttgaagtccccacccttcccacaccagagtgtctggggtctgggcccttccctttaggccaagtcaccaagacagccagatgccagcggctgtggataaggggccaatctccccaccagcccctgtgcaaacaaccctcctctcctcctttgtcgtccatccagctatgcccagcaagacgcctggtatggctgcatgccatcccttaaaagaacattttctgcactgagtagagttgagatggcccagaggctgcctgccaggatgacgccagtgtcccatgcagcgtcatgaacccaagcttgagtgggggagggaaggaggctgagcagacaccacctacagccaccctgttgtatgccagctccctgcccggctgagtctttgtgaagggagcgcatgctgacagctgggatgggggccctgagtccagtggtggcccccacttgtgcagctgccaggaggccaggcttgtttcatagcccttccgctggagagggggggaaagatggtaaactgaggcacacctccgggaaaccagagaccaaagagaggtttcagggacacctatgggacttctcagggtgctgacacacagtgtctccttctgcccccatctccttcagcacttttcctgaacctctgctgtgacccctgtaatcacgattgtccttgaaaatcaccatatttattgggcacttactgtatgcacagaattttccattaattatcttagctgactttcacatcaaccctgcaaagtagctccacatttaaagatgaggaaactgaggtgcagagtgtttatttcctcaggtcgctcagccaggatttgaacctagatctggcctgattccaatgcccggctcctaacccctggcctcctgcctgcgtggctcttgcagtcctgcttgtccctggtccatctcctacctctcacctgggagcacctcgagggctgggaccacatcttcttcatctcagcatccctgaacctagcacagtgcccagcatacagcaggtgctcagtacatgtgttttaaatgaaccaaatgaatgaacacataaatgcatgagcatctcacatcaggttccttctgttcctcagctatgaaaatgaacccacaaagacaacaccacagattctgagcacctgggctgggacttaggccaccacacttcctcctccaccatcggatttttatcctcatccctgccctcgacctctgcagtgcagcacacccctcctgacctccctctccagcaggcaccatgccagcctcaggattcggggtgaattgggaagctcattcaccttcatttacggctggggagacagaggcaagggaggcaaaatgacttgccccaggtcacacagctcggcagtggcagggctgggacaagcactcagggctctgagtcacctcactgtggctctcaggcacaagctacagcaaaaccaccttcaggcctccccctccctgtccccactcacgcccaccagcagctggtgcaggccttggcagccacacagaaccaatattcaagccatcttttctcctcaggtcacaagtacctggcattgccatggcaaccctgggtctgcagaacagctcttgtggacagaggccttagccccagagccacatgtgtcttttgtggcccagtgacaatgatgtatctgtccttgtgcctggagcagccagggcatgaggagtctcagggtgggtttaaaggaactggctggtgctctgaagggagacaggttctcccgttctctgagcagggtctcctggaccccgtggcactagcctggaagatccacggggagatgctagctggggtctgtagccaggcctggtcagagaggtgcaaccctggtgattcaggatcaagtttttttccaagggcaaagaagtactatccccttacaaaggtgggccagccataggtggtgcatgaggagggaggtgatgagatgactaggcttggaaggatggaatctggagaggcagctgagccaggggtcaggggagactgttcacaatggcgggggggaagccaagcacacgtgtctgctagtagggctgcagtgacagtgtcagaggatagagaagtgagaaacggggacgtgggggggtcaagatgacaaggtggcagcagggagcctcagtctctccctacaggcctctgctcctcatccccacacaggatacatgccaccctgtcttgcccccatcaccactgggctggaatggaaagcagcagagctcagggctgggtagcgcatcacccagctggctgagagcattcctggaggggaggccacccacagagcttaggtttttgcacttcctcgtttgcatcagttttaaagaaactcattttgaggatatggcagtggaggaggaccaggactgcctcctgtgggtcacgagcctgttccctgccctaccctccaaacggagccgctgggtcctctaagacctgtcccaggagcagccagaatcccatttatgggccactctttgcctggcgctgccttcacctccccagcacctgcttccctgaggcattaagtgggatcttgcccccgccacagcccactagctctaccatcttctgtctattgaattaggctactcatttcattttgctgaggcttaacgttcttagctgtgaattggggataccatctgctgcacagcattggatgtaatgagacactctgagcaccttatatgcagtaaacccttaagagaccttggtttccctcccatttagagatctgagggccacacttcccacaggtagccagttcagcagaagcagggggaggcctcagggacaagggaacattcccctcccttccctttcacccagcctcattttctctgcacggcatcctctgaaattccttaggcccctgtctctgggaatcactgaatactgatctaatagtgattgcttactgagcatctggagataatggtgtgtgtttctccatgccaagcagcacctgtgaggagctaggatgggccttcagcatcccaccttgaaggaaggacttgttctctgttcccctttcgcacctttttcagactttcttaatcctcacaggattatccccactttgtaaatgagcaaactaagtttcagagtgggcaggtaacttaggcaaagtcacacagctcattaagtgatggggcccagatcagaccaaataagatgccaaagcctgcatccttgcatcttttctgctacatcacattgcttctttgagccatctcatagctccttgaaacacccaggtccccacccactgtcctttctgcatcccccacacccatagaaaaagacaagcctattaatgtgctgactccaacatccctgagctctgggattccaaagctgagtaccttggtggaaggggccttttccaggtgcccatgaacacagccatgccctcctcccaggagctgaccatctcagggatgggagggaggcctgctgtcctgcagacattttcaggagagtgtgtggggccagcgagaacccccttctcccatcctagcaccagaaagccacccccttccccacagtgagccagggctcttgcctgtgtgtatgaagaatggggtactttctgctttaatgcagaattaatttgaatcctggctctgccatgccactatttccacacttcaccttagccaaaaggctaagaagcgatgtgtgccactatttccaaacctagggcaggttcctgactctttctgatcttcagtgttttcatgtatatataaaaaatgggaatatgaaataagaattttagcagggtttttttttgagggatgtgggggtcataattaaatgagatagtgattattaaagccccaagcatgtggcttgggtatgtgtgtgttgaatcactttgtaagtgacagtcactaccaccaagcaaagagggtcattcaggatccccttaacatgagtctgggtcttccttagggtcacatgccattagggtatacctgtacatgtacttgtgtgtgtgtgttcatgtgtgagagagaccatgcacagaaaaccaaatctgtggacaagatggcttctcaaccctagtgcctcagtgaggtgagtagggggtttcagctggcaagattgatgggagtccccattgtactactccagacgggctgatggtacccacccaccagggtccccaccgtccctcctcagagcttacctcattgttgacaaagcagtataatatggccaccatcagcccctggaaacaagagtcacatcaagagggaggaagcaggagggaggtgccctgcagactggccctggtcggaagcactttgggactccatcctcaacaaccccctccccaaatccagcggcccaggcagatccaggaatggggcagtggcttccctctcatttcctttctgaaggaacaccagggttgcacctctgcgactaggcctggctacaggccccagctagcctctccccatgggtctcccaggcatgtgccatggggtccaggagaccctgctcagaagctgcccagaagctgtagagatcctacatccaacctctccttgaggaggcctgatccagtgaagtacaatgactctgatcatggagaatattccccactccagccccatctgttcatgaaggagacccagggctccagaattgtgttctgtatgtctgcacatgtatgtaaatacacacacatgagcccacatgtgtgcaggcatctcatgacactcttgaggggcaggcagggaccagtttttttgtatttttacacccccttagcatcatctaatgctagtggagaggatcagttcttttctttgaaactgtgacaccgtaactctggttttaacacctctgagtctcctctgtaaagtgaggctaaccctgcacatctcctgggttctgtgaggagtaaatgcacaatgcatgtaaagcacctggcagggtgctcgccaccaagtagatggcagctgcaatgccaggctggtacccagagctacatccaggaaggcttcttgtcccatgtgcttacagagaagactggcccaggtattgggacacctggggatactagttctggctctgctccaactaggtgactttgggcagggatcacccctccaggtcccagtcttcccaccttttccatctgcatgatgcaggctggtgtctgtcccacccccactctaggactttacaagcaagtgtccccaagcatgaagtcacctggaaggaggtgaaggagagctctgtaaacagcttgatgaagcgcagggtcccccgggcgtgctcgtccatcacaaaggcaaagatgacctcatgagtccccagcagggggatgagtgtcagcgtggacttggcaagtctgaggggcagggcagagatctcgagtcattctggacctctcccatggactcttcttccctttctctaccctccccacttcctaccaagtcctgatatctgggtcatggatgttctcccaccccaaataccctgggacaggctgcctggagggaaagaatagaggtcaagaccccaacaagtccaggggctgcccagagacagggcaaaagcaagggtttggggtccaaggccaggcctgggtggaaggagagggtagtgtagggctctaagctaagcatcccaggatctctctctctctctctgctagaaggaaaggggcacttgctgagggtcctcagtaaagccagctcagttacatcacctgcatttgatgtctgtcttgcacatgagattggccttcagtttggataccacgatgcagatgacccgaacaaagatgaggaagttcacctgcggggtggggccggggattggcagggggcaccagcccagccctatcatagctgccactcccatccctgacaccatcactcaccccaatggcaaagagaatgggcagccggataatgagccagtagttcatgttggagttcctggtccagcagctggggagggagagagatgcacacatgcatccagcaggactcacaggacccccagctcaggtgcaggcacagaggccgccaatgcacatggccatgttgagtgccacacacacagctcccaggagccacccaaaaaccagtcccatggacccacagagccctgccagtgcacagccacacaacacacacgcatagtccaaatacacagtcatacacagagatgcacacagcccccaaacaagctttcaaggacctaccaacacagtcatgtgtgtacccagcatcatatacaaaatgacacaaacatttcacttgcagatattacagaaaaacctgcaggagggcaccatgtaccccacagacccagttccgttagtcatcaaacaatcctgggacaggggcaggggcaggggcaggggcagggaggggagattagagaactaaattcaccttctaagctcctggtacccccctttatcctctcaacagatgggtgccccaggtaccaaggaatcccatggaccttgaggatggggacctgggcacacccgcccccttggagcaggacactcacccctcgtcctcatagaggtacttgacaatgccccaggggacaacaaacagcaggggaacacctaagagagagggaaagacagaaggggagaggggctggcaggccagagccacagtctacatgccgaggcctctccctgccccaagcccctcacacttccagcccctctccttgcctggcctccaactatgttttctagtttttttctgggcacctgggagaacagaggcagcaggagccccatgcggacccccagactcttccttacagagaggtcctcatcagtcatcagtcccccacctcctgtgtgccaggcacactgtcaggacttgccctcagagtcccggctaagttaccaggccacagacacacaaacagcagcgggactgggccatgcggtggggacagcatgacggatgaggcaaggagcaggcgaaccctctgatgcccattttctctcttgcttcagcccacgttgccagtcaactcctaaaggcactggatgtcctttcagtcatctcttccctaccactgtgcaccttcaagagggctcggcagaatcctggaatggagacaggagcccagtccttgatgccagctgaccaactaactgtccgcagtggcctacaataacaacagctacaacaatactactttccactcggctgagacttgacttgtgtagtagacagcctctaagatggcccctagggatccccacctcctgtgctcatacccttgggtagttagtccacgttgtatcagcattgtttcatgtgacccaggaacctctggcagaagtgatggcatgtcacttctgattgttataaaagacactgtggcttgttttgcattctctttctctttctctgatcacttgctctgggggaaaccagttgccatgtgctgagagaactcagaaggcctagatggaggtctctgcagcaagaaatggaggcctccagcctttggccagcaactgcggcttcctgccaactgcctcttgaatgagcttggaagtagattctccatccccagttaagccttgagatgacagcaaccctggtgacagctggctgcttctctgagagtgccctgatcctagaaggaggtctcagagagaagggacagcagggggtgggggatgcccaagaaggaagtttctatatgtgtatgtgattcaggaaatccacatgctcttgcctaaagagttttctctgtgagatcctgagccacaaggtacccagctaagttgaaccgagattgcaggccacaggaactgtgagataacaatggttcgttgttttaagtagctaagtttcagggttaatcgttctgcagcaatagagaattaatacaactggttcccagttccttgagggtagagcctgggcctcactcaccttcagagcctcaatgcccagatcaccctgagagctcagggtctgtgttggttgatttaaaattggattttccttcctcacatgacatatgaggagatggatcagggactcagaagggcacaggtggggctcgaattcagggctgcaatcccatacccactcccaccgccctcaatggccttctgcactggctgtctccatgctcgtctccgttggcccctccctcagtgttggagatgtgtctgagataggtaagcatgtgcatattaaggtatgtagacatgtgtgtgtgagggtgtggtgggtggaccatgagtgtgcacgtatgactttgggaatctctgcctggagcacatttccaggacagaaccacttcatagcctttcctgtcaccattgtctatgtctttagcacatcagtgtccactcaacagcagctactaagcaggttgtgtgcccagatctactgtgcctgatgatgcagggagagatggaggaggcaaaggagcccccagcggaccagcattcttcatcagctctctctctcctggcccattgatttctacacaaatcggacctctcagcatctacggtgctttagtaacaggcctttatgagactggacaaggaatgggatggtctccaaaggccccagcacatggtacaggccctgccacatagaagatgcccagtgagaatggaacgaatgatgggtgagtcaacacaccaataagggaaggaacattgtctgggcaagagcatgccgatttcctgaaccacgtacacatgcagaagcttccttctgggtatccctcgccccctgctgtcccttctctctgagacctccttccaggatcagggcactcacccatgttatcagccagacctggcaagtttcactcatcgtcagcatttccttaacaaggccttttcaaaaaacacagtcacgaaagccctgctgcatgcaaacattacgcactccctgctggcttcatctttctcccatttagaaaacgagcaagacaggttggagaaaaaagctcaaattaagacacacacaactggctccaggaagtaatgattccctcaaccatcatttgcctccctcttgcacagcctccatgtgggtttctacaggcccccaactgcctggggactgcagcagaagctgccatgccctttgggggacctctccaactgtgtcagagtcctaattttaattcttccacttgcacatgaagctgaaagttgtttcccaagtatcccagcttgggcaaggcctcctggcatcacgtctgagctcctagcaacctgtgaatctctctccgtctcccccaccccaatcctcaagaaaaaggtgttctgattagagcagggtgtcctccgggtcttgcccttgtgctcccacagaccccgagccctgagctagggtgtgaggtggtaggaaaaggacttggcactccctcccccatctcccactcagagacctctagggcagtgtgtccccaccaaactccagccacccccgctcctctgcacacatcacacacgtcccttgattgttcctgccctcgggtcgccatggtgacaggcactaacagcgctgatgctatttcctagaatggacagacaccgtcccccaccctgaagacagccttccctgagctgccctcgatggcctccctcctcctgctctagcaggaggaagaagcctcggggagaaaaggccaaggaagggactgggttctgggagtggaggaggcaggtgaggagcagggatctgtgagcaggagccaggcctacctgcccacctgtgcagaggcctgagcctgctcaggggtgctgcaggggactgaagggatgcagcccaggcaagagaacagggcatgatggccgcaggcccagagcctgggagtcaggaggcctgggttccagggcctgctctgcctgtaaggccctgccagctctgggccttggtgtcctcaagacactggtcacattaaaatctctcaggctactcttctcctggggggtggggggagctgtatagagaaaaatggctgaggaacaccagtaaaaataaatgaagtgcaaggacaggggatggagagcttgagagggcagagagcacagaaccacgaggactggtggcctgaggcagcttcctgaagaggcagcggacaccctggtgtgggaaggatgctccctgaacattcctgcatggagaacagccttgcaaaggctcagggacaggaccattgtcagggaagaggagtctggatgtgactgagctggaaagtccccggaggtccgtggcaggggcagccgtggtcagagcagcgtgaggtgggcgcatgaaggaaggaggagtgaatgaaggagtggcaagcagggcgggggatggtgtggaacaggaaaactcatggattcaatggcagattagggaggacagagggcagggcctattctctgggtaccgtgggtccctccagaaaggcctgttgcatgttttcccaggggtgaaggggatcccagcccccttcccaaccccaatgctgcccctcattacaatcccacgtggtgagaggcagaagcacaaccagaaatgttccagcaaaaaaaaagacacaatggttcttggcaaacttttttggctagaacatttccagctgggctccaggcacatccgccgtccaccctttccttggctggcctctggcccccctgccccactgtacttggctctcctctgagccctcctcttcatcgtcatgtgacagagcaccagcaggctccccccagccagccccctaccctcttgatcccctccccaccttgaggcccaggactcaccatttccctcaggccctcgggctgcccgggactgggtgtgaacttatgtccccatgtggtcttaagagaacagtgccatgacctccagtggtgtgcatgatagtggtagagggtggtgtttggccacatgcggtggaggcttccattaagggaggagagttatgcagaggaggggaggaccataaccccctacggcatcttaacagcaccggggcagaaggtcctgtgcccaggaagagggttacccagtgggccttgccccttgctcagcagtgcgttccaagtaccatgttagaagaggggtcaaggtctcccacccccgtgccacaggtccagggtgggtgatggcggttcttaccccagcctatgctcacgtagagcctgaagatccattgctcagataagaccgagaaggccagcagtgtgtacaggtacacgccctccaccaagagccagtagtaattggccgccacacagtactgcatgagcagaaacaccaggcggcagctcagagagtcctgggggtagaggaagggtgtcatggggacaacagctctgccctctgcctctcttgataccactccccgtcctgctccagccactatcctgccatggttaatgcaggaggagagagctcacatctctggctagggctagtgctaaggactttatctgctttagctcattgaatcctcactatcctgattggaagaaagtaatgtatccccctgcaggtgagaagtaagtgacttctcacctatttctcagcctcagagaagtaagtgacttgcctaaaagtgtacagatagtaagtgacagagctgacattcaaactcaagtgtgtctccaaagactactcttttgtgtcagactgagaattccctagggcagtgtctcctcccttagattgggagctccctaaggtagactgcctctctcagcagactggagggtcccaaggcgaactgcctctcccatcagactgggggctcccgaagggccaggactgttcggctcttgtcttctcctgtcccaggcctgtctagggtggcagaggcaggcctcctccaaccgcccatccctcctgaggcggtcctggatgcaccacacacctggtaggagaggagcccatcccactggtgctgctgggcggctgtgctatacatccacttcagggctgcgtccttgatgaagacggacaatgctcgcaggatgaaggatgcaaacaggttcaggtggatgtagttcctggtgcagtgcaggtgtctgagggagaaagcagggcctttccctggcaaggcagccaacagttctgctctacaaccccaggctctcaagctaacacacacattaggcatgtttccagccctgggactgtgcgtgtgtcttcttctatgaatacccttcttcctcatcatcgtgaaaatccttctgtccaactcaaatcctgcctctccatgaaggcttccgctatgtagtcactgccccctcctcccatccacattctatccttctctctgcagcatcttctttgacacaaagtcttgcataaccaaagagatttatgcatgaggatcagtttccccagtgggaacactgcttcttgttgacagggcccacatcctaaatgcctcacagaggcagagcaggactaggcacttggtaggaattcagaaactattggatagagttttaatatcctttcatgtgaaaatgtgtagcaaattgaaagtacaggggcatttcttaacctaatgaaggctatttacctaaccaggggcaaatatcaatcttaactgagaaactgtgggagcatttcctttgaaatcaggaacaaaataaggatgtctgttatcactgcttctagtcaacattgtaactacagatcctgcccactataataaggcaagggaaaaatgtacaagaatcagaagtaaacaaaatagttattatttgtagatggtagattatcttcatagaaaattcaagaaatctatggacaaattattagaactaataagacagtttagcaaggttgctgataagtatgtttgtatatgcctgcgttaaaaaaatttaaaagtaaatgtttagaaataattcttttgcaatatttttaattaactagcttgaaatgagtctaacagaagataggtaagatctcgatggagaattttataaatcttgcttaaaatcattagcgaagacttaaactagtgggagatagatacatcacattcacagatagaaagactcgctaccttaaaggagtcaagtctctccgtattcataaaaattctaccttatttttaaagtagaactttaaaaacttataaagaagagccagggctaagaatattccagacactcctaaagaatcacagaggaggagattttgctatatgatttctagtaaatctacagtagctaaggcaccatggtatccggacagggaaagataaacagaaaaaaactgtaggtgactgaaaccaacccatacatacgtggagccttgctgcatggaatggcagtcattgcaaaccaagggggaaggaaaggctatcaataaatggtactcaggcagctaattccacatacagaaaaaaaaatgaaatcctttatttatatcatacgcaatatgaattccaagcagatcaaagaaccacaaggaagagcaaaactctgaaacttacagaaaatatagacggccatctttatgacactagggtaaggaaagatttctttttctttctttctttcttttttttttttttttttttttgagatggaatcttgctctgtcgcccaagctggagtgcagtgacgtgatctcggctcactgcagcctccacctcctgggttcaagtgattctcccgcctcagcctcctgagtagctgggattacaggcgggtgccaccatgctcacctaattttttgtatttttagtagagatggggttccactgtgttagccaggatggtctcgatctcctgaccttgtgatccacccacctcagcctcccaaagtgctgggattactggcgtgagccaccgcacccagccaaggaaagatttcttaataagactgtccagaatttgttctttggaaaaaatgaataattttaaagcaatcaataaaattaactgttatcaactgcttaatctttattgataaattttatttatcaatactaaattgataaactttattccattaaaatgaagaacttctgtgcataaaaaaccataaaatgagtgaaaaaataagccacagactaaagagagggtaaatcctggataagtatccagaatatataatgaatatgtaaaatagaaaagaaaaacccaaataagccaatgaaaaagtaagcaaaggatatgaaaaagcaactcacagaaaaaatcatgaaaaaaaatgcttgatctctttgggaatctggaatatgcaaattaaaatcataaggcaatttcacatacttcaggttagcaacaattaagtctgaagacactaaatattggtgagaaggctagacaaaggaagctctcttttattactgatgagagggtaaactggtgtgaccactgtgaagaacaacttaacatagtaaaattgcgaaagcaggtggtagtcagacctggcaattctactcctagttatatgccccagagaaatgcacaagtaagaatgtacattgcacccaacatttgtaattcagaaagaaaaaaagagaacaactcaaatgtccattaaaaggttgacagataaactgtgctgtattatacaacggaatatggaatggtggttaaaaatccacaaaacaggactgctcgtgtcaatgtgaatgaatctcacacaaacataatgttggaccaaaaaattacagaaaaatatttctatgatttgaatgttgtgttcctccaaaattcatgataaaacttaatccttaatgcaatgatagtattaagaggtgaagcctccagaagatgattagatcatgagggctctgctctcaagaatgggattagcgtccttataaaagaggcctaagtgagtttgtgagccctttttgcccttttgccttctgtgatgtgagggcatagtgttcactccttccccatcatgtgaggacacagtgagaagacaccatctcagaagcagagagcaagcccttactagacatcaaacccactggtgccttgatcttgggcttcccaccctctaaattatgagaaataaatttctatttttcaaaaattacccagtctaaggtattttgttataacagcaggcacagactaagatagaaattggtaccgagagtggggagtcatgtaacaaatacctaaaaatgtagcagtagcttgggaactgggtggtgggatagaaaaaagtctatatttccacaaatgggccatacaaggtgattctggtgagagctcagaagaagatgagagctatgtagaaaatttcagtctttttttttttttttgagacagagtctcactctgtcgcccaggctggagtgcagtggcacgatctctgctcactgctctgctcactccgcctcccaggttcacgccattctcctgcctcagcctcccgagtagctgggactacaggcgcccgccaccgcacccagctaattttttgtatttttagtagagacggggtttcaccatgctagccaggatggtctcgatctcctgaccgcatgatccacctgcctcggcctcccaaagtgctgggattacaggcgtgagccactgcgcccggccaaaaatttcaatcttcacagagattatctaagtggttgtgaacataataatggtagaaatatgaacagtaaaggccattctgatgaggtctgagatagaaatgaggagcatggcattggagaccagaggaaatgccatctttttgttacaaagtggcaaataacttggctgaattgtgtctatgtccaagtgtttcatgggagcaaagacttatgagcaatgaaatagaatatttggtggaagaaatctctaagcaaagtattgagggtacagcatggctgcccttgactgcttatagcaaaatatgagaagagagaaatgaaagatgaaatttataatcaaaagagaaggagaacttaaagatttggaaaattttcagtctgaccatattgtaaagaatgcaaaagcatgttcaggagacaataccaagggtgtggccaagtgaacatttaataaaattagtatgggtagaaaatggaagaatgaccctgaatgcacttcagagatctttcaggtccagatgtcagggtcttgagagcagaacagttctgggggaggagcccaggacactgtgaggcattggaagtcactgcccagggccacctcctgtctctgctccctacacttgggtgcagtgctccttggctaccctagctgcggctcaagtgggcccaggtataactcaggccgtccctctggaggacgtagcagtaaacctcggcagtgttcacgtggtgctaactctacagacacacagagtgcacgagctgtagggaacatagttacttctttgaaatccaggaagacctagatttcaaaggatatcctggagagcctcagggcccaggcagagtggaggtttctaataaatctatagtagttaaggcacaggtgtggggccgctacagagagtcctgactagggcaatgactagcagagtcatggggggcaagattctcctccaagaccccagactggtagagccaccagcacacaactccagcctgtgagagctgccacatgagctgaacccagcaaagctgtgcgagtggggcttcggggagacttggggacccaactcccacctccatatcaggaaggcaggacactgagtcaaagaagattattctcaagctttaagatttaatgttgtttgtcccattaagtctggatttacttgggaccagttacccctttcttccttcctatttctctctttttttatttgaattttaattctttatttttttccagataaaaaaataaacaattgtatttatttaatggtctcttacatcggtcaggctggtctccaatctctggcctcaagcaggcttcccactttcgcctctcaattagctaggattataggcatgagccaccacatgcagacctattgctcccttttgaaatgggaatgtctgtcctatgaaatgagaatgcctgccacaacatttcattttggaagcacataacttcagtgatttcataagttcacagctagagagaaatttccttcaggaggaatcatcccttgagtctcacacatacctgatttaaataatatttagatgagactttggacttagactttaaagttaatgctgggatgaattaagactttggagccattgggattaaatgaatgtattttgtatgtgaggaggacaggaatttgggggggccaggggcagaatgctatggtttgaatgttgtgtcactccaaaattcatgttgaaacttagtccccaaggcaatagtatgaaaaggtgaagcctttaggtgataaggttgatgaaggctctgccctcacgaatgggattagtaccttataagagacctgagggtgtttgtgagagcttttcacccatttgcccctctgccatgtgaggacacagtgagaaggtgccatcttggaaagagaggacaagaacttactagacatggaatctgctggtgccttgatcttggacttcacagccttcagaattgtgaggaatatatttctgttatttagaaattacccagtctaaggtattttgctatagcagcaggaaaagactaagacaaatatgttcaatacactattaaaaatacacagaaccttgctatatatttctatagctactcacaaatgtggtaaaagtacaaggaaatgtgtcggaattaaaagaggcacattcagggcttacctctgatgggtgtagggcagggagagggatgggatcagagagggttacccagagaagtgtaactatgggacatgttatttcttaggctggatggtgtgtgcatgagtgatcatagtatcagtcattgcatttttgaatcactggaataattcataataaaagaggagaatattcattgagtgaatgcatttattgagcaccgtgtgcccaggactgtgccaggtgctttgaaggtaggagagggaatgccacctctcctgctcttgctgcctggtgtcctgaggtctcattctctcagaatcccttccctctttgaacccagtccccctggccccccttctccaagtgcagaggagtgggaagaacctggtactctgttcccagctcctagtttggaaggaacgtctcatctaggttagatctaaggaggaacttttccactggggctgaaaagctccaaagggaggaagatctctaatccccaagatcttttctaaaatcatactgaattcttgattattaaagttacacatgttcattggagaagatctcctgggattttccgtaatcccatcaccgacggttaaggttttgaggttggtggtgcttgcgtggtatttttgttcttttttgcagtacatacgcacacttttacaccgtggagactagaccaagaacacagtatcacatcctgtgttttcaacctcatattctacggtcagggctctgtagagagctcttgagagaaggacgaatgtgctgcactgttgctttgatttggtgttgggctgcttcattcctctatctgggggagttaggatgaagcagccccctcccagggtccgggccaccttacctgaagccgaggaggatcgcagaggcgataaccagagcagagaaggagagtgcgtagcccaccgtgtagatgatgtagaggaacaggagctgctcctccggggagctctgtggcacacgggggacatacgtgtacatgggcagcccatggccctcttcccacaatcttccttcccatggcacagagacagagctggggccccaagtcaggactcaccggggataccaagaccaagaaagagaataaccgtaacctacggcgatggttcttggatatcttgggccctgttccaaggccagagaggtgaatacacaccacctttgtccagaaagcatggtgtgcaaagcccccagaggcaaggagatggatgaaatgaccacagatgcccccatcaaagccaagggtctttgctccagtgaagtgctccaagacatggctccccgctccctggctcagaaccccgcctcaactcactctttcccctcgcttggactcctcgcactccgacaagtccctccagggcaggctggagttgtccttctgcagccagaggccttcagctgtgcagaaccggtacacgtggccctgcggcactggggtggggagacctggccctgagcctcagcccagaatagggcagcctgcccagtgctagatgctccccttcctccccattctgagggctatccctgctcccccagaatggactactctgagttagtgacatccttttcccttctttacacacaaacacacacacacacacctggaccttcctcccctgacatatacgctgttggtccagggacaagacagggggccaccaaggcaggggctcctcagctccaccctcagccctgcctctcggcaaccctaggacacagtttaatgaattcatgcctttgagatgacaggagtttagctcagttccatgtccctgcctccagcctcaaatcacactactgacaaggtctggcaccgaccagcagcagccgtgcctgccccgcagtcactcgctatttctgatttttaggactcagtgcccacctccctcccacactccttggggagagcagaccctgggaacaaggttggcactgagttcccaagagaagggaaggaagacagagcactgatctgagagagagagagacacagccctgcccataagaagttctaatctgatggaggagacacagacctacctgcaaggaccccctggtctaaaaggagtacacggcctcttggtcgtatgcagccttggcctttggagatcccccatagaaaaagggaatacccagctcctaccttcacatagactctaattataggttggaaatggagatagcccttggagagaggaaagggatccagcccccgtcctcagggagctcccctgtctgaggatggtggcaccgtccctgtcttcagagaatcaagactcacacagaaaaaacaaaaaagacctgagaaaggaagagcatagatggaaactaacagagatcaaacacaggccctgcagaggcaaggcggggcattgcctgtgcccattcacatcccagcagaggctgtcccccaccatgccccatgtccacctaccagggagatggctggcctgtggcctcaggtttgatgtgaggctgatagaggccactgcttacttgtgtccaggaggaaatggttcattcctggcctctctgtaggggaacttaagtttgacaccagggccaatgaacttgggacaaaagggcacaatgagagggtggggggatattgacctgtaggaagaacagggggaccaaggagagaagctgcagccaggacaaactttaaaagagttcaacattctaaaagactagaagattttaaagaccagttttcccagctgtgggaggaaggagggagtgaaggccagagaatggagaaggcaccagaggcccactgggggcagtggctgctcagtgttcatgtggagagacagcagtcagaactgggtctcggctgggtgtggtggctcatgcctgtaatcctagcactctgggaggccgaggcaggtggattgcctgagctcaagagttcgagaccagcctgggcaacatggtgaaaccccatctctactaaaaatacaaaaaattagccaggcatggtggcgtgcgcctgtagtcccagctactcaggaagctgaggcacgaaaatcacttgaacttgggaggaggaggttgtagtgagttaagatcaagccactaactactccagcctaggcgacagagtgagactctgcctcaaaaaaaaaaaaaaaaaaagaactgagtctcctgagaagaggcttcattaatgtggggtgtgtgtgtgtgtgtgtgtgtgtgtgtgtgtgtgttatgtgtctgtgtgtgtgtgtgtgtgtgtacacgatggggactgtggcagccccagggcctgaccctcaggggtgcaggacaggggcaaccatctagtctgggagttctatttttcaccctagcaaaaaatgtggcagggacaactttactgcagagtctggtgacagcctcttccagcactgtcagcaaggcctgccaatggaccttgccctcccctaaccctgatcccagacaccaggacagcctccctgctctttcttctcctccttcccagctcctttcccaaacaaaccctgaaccaggtcccccttcaagacacagaaattatctggtaacacagtggggcaagtcagcttgcagcatgactccttctggaagaacctgcattttaaaagatacttcacctgggagaaaaacaaaaacctgaaaatctaatggtgaaactgacagcagtgggaacgatggtgttccaatacccttcgaacgcatttatgaacaaaatcaggtgtacccccaacggcagagaaggggaggcacgtggtctgattttagcaacgcgaagggcccctctcaagcccacaaatgcctctcttatctgctgcatggatgcctgagattcttcactggggccaagtcttctgacgtgaggcaaaatcagtgttttcctgtagatacccccaaaagcagtgatggggacctgagctgactccatgcggaatgagatggtgtcagagcctgcactagcagcctgctttgatgggaggaaatggggagaaaggaagaaggttgagggaccagagaaaagaagacacagccatggaaccacaggcacacaaaccatctaaagacccgcatacccaggactcagcctgcaaccgtgtgatgctagtaagatgcacttcccacagctggcacagggcctggcatacagtaggcactgccttgttgcagattccttcacaacatgctccttacttgctctttccataggctgtgccttcacagaatcagtttttgaacacctactgtacacctgacacctttggacattagaaccacctttcaaggtaggaacagttagtcccattgtacatatgaagaaactgagcctctgagaagccaaacaacttgcctaagatcatcaactagaaagtagcagagtcaagactaaaatccgccagctctttgcctccggaggtcccaagttagcagccaaacttgctgttaataggaaagaatgtggcatgtgccattctcctctgcccttcctctgggctcagatttctcaacattcagtctcctcccagcaggcccccttgccagtgtggacccccggccgctgcaccattcctgctccctctgttcagagccagttgggagggtggggaggtggtgtgtgcacagatgtgtgcattactagcacagagtcaaaggatcactgtgtccctcgctcagtgagcctgtgcaagtgcatctgtcaattacccttcattaacatcaaatattaaaagccaggctggttcctggctgggcccatgatccccagatgcccaccttggctggaggtggggtgggtcagggcatagccctacttatcaacccagctttatctgacttgggaggagctggtaaatcacagccagggatttggctcaaggcttgtcaacacagggaggcagcagggcagccacatgccaggaggcccagggatatttcattaagccagaccctgctgctggaaataaaacccccaattaaacacttcccctcccggaagctgctgcggcgcctgtaatcaagctaacagccgcccttccacgtggatgctggcactcagggctgtggagagctgctcatgaatccattagctcctgcaccctggcaacgaggtggccagcaaggactactgggcccccattttacagatgcagaagctgagactcagagaggccaggcacagggcctccccaagggagtgaggtgagggtcaaaggccaggctcgaaatgaaggcatcagctcaaggccagggtgaagggtactgtagagcatcagggcttaggagaaggagctcaggttctgaacaacacagactcaagttcaaatcctggttctgccttcaaccagctgtgggatgttgagcatgtcccttcacatcctcaggcctcagtttccttatctgtaaaatgggaagcataatgacttcccagaagataaagcatgtgaagtgcccggtacatagtagacctttgaaacatcctcccccatgccggtttcttgaaggggcactccttcactgaggctggagatggagcttgtgacaccacttcagccagaactcctctggggacaagcttgggcctcagtttccccttggcaaccccaggctgtcgtaaaaacccccaggctccacattactcaggggaggcacccgccagagtttccaagaactgtgagttataggttatttttaaagcattttatgactctcatataattagaactaagctaacaaacaggtagggatcaggaggaggtgtagctaatgaggctggaatgatttgtaacaagcagatcagctgtttgtgggtaaacgaggctgctgaagggccctcgggcggccaacaggctctctgaagccacttcagccttctcctcccagtctcgtttgtaccagccatttcctttgaatatcttctgtctttgactcatctgctcctgctctctctgcacaatcctgagacccaagttctcaattagaggggtcagaattcaagggcttggctggcttctccaggacactgcgtagttccgaggcccgtggcctggccccatgtccagggtgctgcctggaaccctcattccttggaggagcttccttttcccttctgcatctgcctgttctttcacgtctggccccagtgtcacctgtccctggaagccttcctaatgccgccacactcctggcagaaggggtggctctggcctccctcagtaccactgcctgggctgctgagccgaccttcagctccatggaggggggttaccccttctccccaatgcacacactcacacacctctaaggtctcagtggcatccctagctcctaacacaacccagctcaggggtctggtgattgttttgacttttgctgtttctcagatcaccactcctctgctccattctgaactctagaagcctgagccatgggacagcacccctcggcttccctggcctctgttgggttgggccagtgggaggcattggcagaagatggaagggcagagggagagagaggctgggtgttctcccctgctccctccctgccttgatttgaagtctgcctgtgactttgtcccctctgtggccacagccctgctgggtggcttctccattgtagcccagctgtcatggggaccccccagccccattcttgtcccttccttctcaggtctaggggtgctcaagctttccattgttgtagtccctggtgctttatatgcctcattggtccctttaccttgccagcctctgaaaatgacccctccccaacattaaattctctccaaattgccaactgagcatgttttctgccaggaccctgcctgagataactcccttccttctccttgacaccagggcacactgtgacgtttctccacaggctactcgcttgatcagcccaagaaagctccagaactgtccccttcttcagaactgctcccacacacctgggtgggggtcagggaagcctccgctgccaacctttgccaaggaaagctccaggacaggccagaggcagcaattacgcagcttgagcctgtggtagttgtctctgagcatccgtaactcagggagtgaggagagggcagcagagtcggtgattccaagtgtcaaaaaagggagtaaattagcctggtgagtggcagggggacggggttggggaaaggctggcagggggcctgtgcagtggccgttatcttcatggagaaagcaataaaaccatgtttgctcataaacgggcaccaccaggacctatttcctgctcaaataaaattaaaggtgatggatggagctgcaagcggcaggcagagctgggggtggcttagtgctgagtgatgggccctgtcctacgcctggctccctggggtctagaggcccagcagacgctggccaagctgccagtctcaaatctatgggaggcagagaaagtgtgtgtattgcaggaagtcagggaggtatgtagggaggtgggaaaaattaacagctaccatttctcaaggccctgtggtcctcccgacacccatgtcacttggctctataccatctcccagatgagtcaaccaaggcacagagaggtctggcaacttgctcctgcttacacggctagtcagcagaaccaccagattgcagagttcataggagagggcagacagctcacccctgtccctagaggtgtgcccagacagcagagggcatccagatcactcacctgtctccaggccagagccacatgcaagggcacacacacacacccccaaggaagactttggtgtagcaattagccacactgactctaaaccaagcttctgggtcgcccactaatggctgtgtgagcttgcaaaagtcactgagcacctctgtgccttagtttccccatctgaaaatgggagggtaatcagagtacttgcctcagagggttgtgaggatgaaaagagtgtagcacggaaagtgcttccaacaggcagtattggagaaggcaggccactgatgggcccaggctcctgcctccttctaggcccaggctctccctgctccttggggagaggtgagtgtactgtgagtgtggacaaggagacagtacttttaggagaccagcctgggcctcatctgacttcagtcccacgtgccaaggtgaagcttacattgggccccaccaggccacctcctccaggaagacacctggcttccccagagcataacctcatgcccgcacttgtttctgggccagttgctgcttgggctccagccccttcaaggtgtgatgataggagcacgaattggattcaaatcctggctctgccattgaccacatcatttggaacaagtgacttaaactttttgtgcttcagtttcctcatctgtacagcaggtataaccacagggtagttataaagccctgcttttagggcaggacttggcacacagtaggtactcaataaatgctggctatgatgacgatgatgatggtgatggtgatgatgatgatgatgatgatgatgatagggaaatatcttttctccccttatggagactgggagctccttgccatgagggtgcttgtctcctgttatcctccacggtgcctgggtgaaactgggctcagcaagggaggctgggatagatagcggggcacattaactaaccctccagtcagggatcctcttgcagcctctgcaaatctctgtacccccaatgaaatgaccttcccacctacccagtcacatcttccccagtacaaggtcccccttgcaggcaggagtgagctgaggagggctgagtctggtggggttcgtcaccccaccaatgccctgatcacttctcccagtgaacctctaaagagtgaggaagtagctaaatgtcactgccaggtatgggccacctgcatacacatatcatacatacatgtatacacacagcagacaccctgggtagcttccctccccgcaagagtctgtccccacccagctcttttcctgactactgaattggaaggggtcgcatttctcttcagacacttactttcccttccccacacactggccagcactggcctcacgcccagacccaggtggtacctcaggccatcatgaaacttatcactactgactgctcccctcaccccaggaaaggcaggcggaccactcactaggaggcctaaagacattctgggtggggagggctgtgtctcagaggaaaggaagcagcgccttgacctcagcctcctcgatacaggggacggtgggggagggagctcaccactgctgacccagggcaggtaccaggtcagggagggggctcaccactgctgacccacggcaggtaccaggttagggagggggctcaccactgctgacccacggcaggtaccaggttagggagggggctcaccactgctggcccagggcaggtaccaggtcagggagggggctcaccactgctggcccagggcaggtatcaggtcggggagggggctcaccactgctggcccagggcagataccaggtcggggagggggttcaccactgctggcccagggcaggtaccaggtcggggagggggctcaccactgctggcccagggcaggtaccaggggcagctgacattcacgaacgagcctggctccccatctggccagcaggcgtattcatcgaaggtccggttgcagaacaagtctgggagcagaaagaacagtctctgagtccctgcttgtgactggccatggccctttccctcccttccccaagacccctcccctcctcggaggctgcatgccactaacctctgctgaatgcttactgtatgccaagcactttccccacccagcaagagccaagcaggggcacttgccacttatcagtggcaggaccttgagcaagtaacttaatgtctgtttcctgatctgtaaaacaggagtatttccagccccatagggttttgtgggatcaagactatatgctacatagataatggaacatagtacgtgctcaatgaaaaatccctatgggcctattcttaaattgcacttcacagattagagggaaatgttagcttaccttccttctgatctcacttaagataaccttctttaggtcacgtgttataattacagtcaggatttcaacctaggcccagcgggctccaatcccgtgctctttaaaccaccttgtgaactccctgaaacatttattcctataaatatgtttgtggagccctcagtccatgcacaggctgggaggtgctgaggacaaaaatggaaaggccgggtgcctgctctgagaggctctagctggggggctggccggcggtgcagggaaggacacacagataagacagctaagacagaaataagacagcaaccccaaagcagactacagcaaacgagtaagggccaaatgatggcagaagtcctggggaagattttctggaggaggcagtgcttccgcggactttgaagaaaaggaagattttggtcggcagaaaggaaggtatccaggtgaaggagtagcttggacaatgagatgaaggcagagggcaggggtggcatcctatagaggcaaatggctcccagccatggacattgagttcatcaaagtcctccagaagttggttgggtggggagcactaaaggtggggagcctacatggactcacctgtggcaggaggtggatcctcagtcagggagcgctggcactggcgtcggtattctcgccatttctgcaccgtctcccagagggacacagtggcaccctggggggagggcatatatgggaggcctgtgggttcagccagcccctctcctgccccctcaccccctaacacacttggtttctcaatctccatgaaacctcaaagccccaaattctgccaggcatcagccacctctgaaagagagtgagaataagtcactgccacccaggggccccaggtggatggtttgacatcttcattcctcccagggtgcatagcttgatgtgtcacgagcacccagcaaatgtctgctaaattgatgcttttggggaggtgggtgggtgaaggaggaaaggagcgtgtgtgtctcatttgtgatctctgatctcacttaggagagagactttctgagggcccaggactctaagctccttctggcgcctagtcagcctgcctgagggcttcttgcactttcaaccattctagaagaagacacacaggccagagtgggagaggaactgaatcaagggtgcacagcccccccaggaagcagagttaaggctagaatctggagtccttcagatcagtgaccatggtagaatatcgcaaggtgtgcgggggccggggagagtagtggcgttcagggctacaaagagctgggatgtctgccattagcattcctcctccaaaacgcactcacttacagatgcactcaacacagcaccccccaccccctccccgtgctcccctctgacacagcaaccaaatctaatattcaacccagcttctatccacccaaaggaagagtcctgaggacatgaggtgaaggggtcagggaggttccagaacactgaagtcacacgtgcaatgggagggatccctctcacctgtgagtagggagagctgagcctccacttccagtgaggtcaccgaaatggcttttcagcacacagacccaaacagacccatcccactgagaatccaccattccttctgagtgtttttgtgcacttccttcagctatgtcttggggttgtcgttctttttagttttttcctgaacagccttaaaaattataaatattcgtccttcagaggctgcagatgctgaaatgacccaagagccccatgtataaaatgtaggacccatacataatttaaaacaacattttgctttttgaaatcacaaaaatgtccacgtgtgctgaaattaaaatagcttctttttagaagcttgcccccttgccttgtagcgtgctgggcacatgctggatccagtctcgggttctagctggcttatcacacacctccctgagagacttgggttgccttgctcaccccttgctgcctcggaggccccatggaagggcccagctcactttaagccccagcagcatccttggcataagtgtgccaaggcggcaggggctaccctgaaggacagagctcttctgagggcaaaggtcaactgtatttgcttggggaaaaaaagaacaagaaatcaaacataacagctgcaaaggtgttgtccatgatattagccacagctgaggaggtggcacagttttcatcagagcaagtcctggtggatcaacccccaccgccccgtttcccttctcacttcttccctcttctccgggtaaagggctcttccatgctgcccctaaatgcagcagctgctgggggtggagggcagagagacggagaaatcccccttggtttctgtttctagaatgaaagcagaccacacacaaggtcactgctgggaactggggcagaaggtgtgtctggggcaggcagagaggtatggaagccagttcttcccagaggcggggggaggggttaacgacagcgccatgaaggccaatctggcctcctgcaccccagggcagcgctgtcacctactctgagcagagctgtggacataaaactatattcagactggggctccctgaggacggggctgtgtctcccctcagactggagcttcctgaggatggggctgtggctcccccttaggtgagggattcctgacagtaagagtatcttgtcccctccctacaccagatcagggcttctaaataccttcgagccttcatcccacccctgcaggcacacacagtgcaaactacccagacttctggcctctcccacgcctcgtatttacagaaaccataactgtgccaggttctgggtggtcgtgggtggaggggaatgcagggagtataaaggtgactgcaggagccctgcctgagagagtcttcaggctactcgggggtcaatgctttacaggacaagtgacataacagggaaggcagtgggtgaaagtgttcagggagtggttggggcagggttcagtgcagactcaagaggcctgagggattggggactgtgaggtggggctggggtgaagggggttggaggcagactgggctagcaaggaggagggcgggcacttcagcaggagggcacagcagggaaaaggtacaaaggtggggacatcagtgctccggagagcagaggagagctgtggactgttatcaggaggattttttggggcagggagagagtggtggtgggccctgggacagatgggaggttctggtctggggaaagactgagtaaatgaggctagggccacccagtgccatagggcctgggtgcccaggtaacatagtggaggctgaacaaccctggccttgggctcagatctgggcctggacctgggtcacccagatattaggtttgcaaccgagtgcaagagttgtatgttttaggctcagcttacacttgtgcaaaagggaacagcagcccctcccccatgggatggctgtggggactgagttaatgcttaggatggtgggcacatggagaaggctcagtcaatggcagcaatccccatgatttctactgtttagtggaaagggcagagtgggagggagtgaccaggcttcctggggactggggccccaccccttcctcacttctaggatcaacatattcccagaaagaggaaatgaatatatgttcatgtccaatgaccaatcattctgcttaatttgtgagatcttccagcagtaaccacagccaatggcaaagtgaagcagggaggaagctttggaccccatgccctgtgaggaggggcaaggccctgcccaccagtgtcccccactcctccatttcatcctcccacaacataagtccctgctgcaagcctgacaaggtggggctgtgggttctgggtagcgggaaggatgcaatccagatgtccctgtccctcacaaggcagcagagctgaccaggagagcaaagcagcggtcagagggggtctaaagggccatgggaagggcaggatggcagtttctagaatcaagacttgacaggcttcatgggatctctctgaggtggatgaaggcacgtggagacgacacctgggttggaggttacaagaaggaaggggcatccctcagattcaggagtttttggaggaagcaggagacaggaaagaggacaccaggagggagtggtgtggtctacaggaaggagcactggacagcgatttataagttcttggtctaaatcccagctctgttaatgcaggactgtgggacacgatttatcttttaggacctcagtttcctcatcagttgccagttctgccgtccataaaatgggcatatcattcttctcaaactgcacagatccaacaagataaagcaggtgaaaatctttgtgacttctcaagccctgtacaagcaggcagcgttggaaggaaggacagcagagaaggaagcaggtggagtggaagcccccggggtggtgggctttccaacaccccaggaaggggctccctctccaaacactggctgccaatctgaaaggcactcctatttctcagtgcgaataagtgtatcagattctttctttctctggggaccattttggtgacgggaaggaggtggcacagaggtgggagacatgcaggaaggcctctcagaaggaggaaggagggattccaactcaaatttctggagtcccccaactaagtccagcccttcaggttccctggcatctcctcccaggaccccaacctccttcctctgtgtcacctcccagaagtcaaatcaccccttccatcaacagacccctgtctctttgaccgccccttgtttttctttctttctttcttttttttcaaaagctcagagcttacaatccattttttttccctaagggctttagatatctgaacgaaaggacaggaaaaggaatactacacacatgttcttacagtcacaaaaacccccacgtggacacacggtcacacgcatcatcacacacgcccccaagcacattcccaatactgagacactgacacagactctctcccaccacacacaatcactcacagactgccaggtacacagtcgcatgctgagacactgtccccaacacacacacacagaggaacacacagacactctcacatgcacactatctctcctgcacatatagacacacactagttgacacccattcacacaccaagatgcccccccccccacacacacacacagaccctcccacagacacagtatcatatgcagggtcacaaaaacatagacactgtcagatgtacagttgcatgctgagatgttgcacacacagggactcattcccacacagactgttacacacagggtcactcacacatacctgggaactgggggttcatatagcctactcccttctccccctggtctgtctcagactacctgtctgtatctctgtcccctcctccaaccaccaccaccaccacacacacataggaattttcctaggggcaggctgcagctgaggaagcctgttttgccttggtgcaaggcattcgagggcaggatgtggtttcttggttgctcctgccccagcccccagcctgggtcctgtccaggaggaaacccagcttagaacaatgtccgcactgatcaaggctcagccctggactccacctgccattcactagagtacagagacccagggtctccaacagcccctctctcatactatcctgcagccctggaaaacacttctggatccccaaggacaaatgggtcagttctgccatttgactaaagtgactaaagttgccatttcaggggccagtgtctcaatcccctccataaccctatgtgatagagcttatgatccttatttacagataaggacatgtattggggataaccaagtgtccaactccagatcaccagctaatagcagaccctatatttgaatccagttgtgtctgattttaactttgagtgtcaaaggcttgcctgtctcctcagtaggcccgctccctcaccagggtattggagaggtaaggaccagggtaggggaatgagccttcccagcagcaatgaaagagtagcctagggcaccttcttcagaagtcaactcagccatccccctacctgcagggatgctgtttccagcctcacgagacctgacagtgagcagctcactctcagaggtctcccttcagtcccgtctgagtaggaggtgttaggtcaagagcccagcccttcacccctttctcttccctgctcctgaactgctgggctactttatacaggggaccctctttttctgagctttcattcccccatcagcaacatgaggggagtaactctaacccttttgacttcatagacagaaaacaaaatgcaaaatacactattttttagtcttataagcacgcatgatgttgtgtcataattgttgcaatctatccttaacacctcctgtgactcagatctctgtggcagctcagtttcccatgacaagagcaccccctcaaagctcccctccctgctaggacctgtcccctcctatccttctctaccaccccaatcctgttatgcccccaggatgcccagcttttgccttaggcctggggctaaggagtaaaatcggatcagaggaaagtgtgggttcaggagcctgacacttctgggaataaggcctctgggaagacagctcacagaaactttcctcttccctttgctttcttcccttcattcaaaccagacctgtaaacctggcctggaggaggatggaaccaggaagcagagcctccacccctatcccaacccagtccgtaagaggagggaacgatgggcaagaaccacatcttgggtctgcagccctggcccctgaaagatcccagccgcaccaggaaaaccaaggcctggctgggggcgctgtgaggaaggtgtcttggaagggggaggttgtctcctggggctcaggacagcagctgggctggggaacaggggcagggagaggatgcgtctggaaaataatctgggggctgaaaaatgtgctggcatcttagctgagaggtatgtctgtccacatctggggtttccgccgaggtggagtctgccctcaccaaggcaatggttctgggacaaacttcaaggttcgttcaggtccactccccacagatctcagttctttaggtctgggggtagcagtgggaggtgataggaagaacctgtttcctgacccaggacaggccacccaagtctatgtctcctctctgctcaagcaagtcccagcatctttggacagctcccctcttcaaaagcagctgaccactgtccctagcccaggatcccagggcaggaaaagcaacaagggcaagagagaggggctgcggtggtccacctgtggcctgctctctggtggcaccaaggagcccaggtgttcttgcgtgtcccagtatgccttctcttggggcctgctgtcagtgcaggatgagaatgggaggtcagcagagtgggtgagtgggggcgcctggctgcttccaggggggcactgagccttctgcctgtttgctacagaggctggtaggggacggggggtaggttccatctgggaggtcactgggaaggacaagctgccaccgcagggccccaggagccatgaatcaaaggctgtgctgggggctgatgagaaagggagaggagccgggtctccgcaccctggccctctcagctcctcccagggtcttctcagggtctttgagcaggtggattgtctggggaggcactgcgggagaggggtctgggtcagactgtggggcagagggagtccgggaggatgccgggctgtgccagggccgctgacacggtttagaaggagttgggaaagtgctggggacaaaggagaagcggagcagaagtcagcgcagggcggccgcggggcagcgggtgcccgggcagagggacccgggtggcgaggaagagggcgcctcgctggggttggggggaatcctctgtagtccaagccctcacctgggccttccagcccaggggcaccaagtctccagtccctactccccccgaggctttcggatgcccccgccagcggtctcggagtttcgttcaagtcccggggccctccaccaggacactgcgcctgcagcccgcagagccacccgcctcccccggtgtcgtcggggtccctggatctcacctgggggcgggggccggccctgcccaccatcccgagcagcagcagcgcaaggcgcagcgggccgggggcgccggccatggcggggagttcaggactgggccatcgctgccacctgcggaaccgcgtgcggagactgatcccgggctggtggcgggcggtgggggaggagccggcgaggggccgccctgcccgcgggaggggcctggcagggtcccggttcttccggccgccagagacccctgggcccgccccgccgcacccctctgccggtcccgggccaggagatagcgggcactgctctccgagcgagcgcggctgggaatcaggaagcgcaggaggcggccaccagctctgagcgccgacagtgcgcctggccggctttcagcgacaagccaggccctcctcccaccctggcaccccggacctcctcccgggtctcccagctgaggaaagctacagcaacccccgcccattcagggtccctcaaaggaaactgaggcctgaggaatggacgggacttgtccaaggtcacacggcttggcaggccactcctggaaagtatcctcagagccaggggtgactaataagaacttttttttcccaggattaccccttcccaggtcctcttctcattcccatgttctgtcctgaaggcaggcccaggatagtcaaggttgggggtggggagactgacaaatggatccacagaactctgacagtcgcaagggtctagaggttcccctctacctggaaacttcagcattgcagggcagggagggatgaggctggggtctgcctttctggaagcttccctgccacctcttgcagctccagcctcctgctcttgtaacctgtgtatgtgtgataatgtgtgtccatggttgttcctgccttctttatctctctccctgcttcgcttcttggggactctggatctttcctgtctgtttccactcccacccctaaacactgcagggccctcaggttcccttcttacacccaacaagtggaaagagaatgctaagagggcactgactgtatcttccctaatgctcttgagaagtggggatgggaaaagaggatcccccaccaaagaaccttgatgccactcttaggaaagatgagttgtggcagagcccagcctcggacctgccgtggggcatgtcgactaaagggacaggaagtttgtgaaagtagctactcctggggagagaactgaacttctcaaagtcctgaggaaggctggacctgcctgagcccagggaaggagacagccagtgggaggggcccctggcttccattcaccaggagagactctcctctccagcaagctctggttccaccacctgagactcgtttattccctcccctcccaagaggtcagtctagcagggaccttctaggtatcacttaggattaggttgttcacctgggagtgacagaaaatcccaccccaaacaacaatggcataaccaagggctctctcatgtaaagcaaggccagaggttcagcccaaggttggagtggctgctccctgatcatcagggtgcctgggtcttctagcttccaccatcctttggtccaagatttccacctcatgatccaaggtggctgctccagccacgatatccaaattccaaccagcaggaaggaggaatgggaaggagatgggtgcacctccacccataaagacacatcttgaaagtggcagccatcaattccacacctcttgctcagaacttagtcacataggcactgctagctgcaaaggagggtgggaaaagcaccctctattccaggcaaccatgggcaaggttaaatactgggcttttatactctagaagaaggcaaattttaaaaaagatactggaagtgagttttaggcactgctatatcaagtttagggtggagagaggagaaaggaagagatagagaagctattcagacagaactggggtctttatcatgaatttgtcagcctccagattacattgattcagcaagtatctatcgaaaacctaccatgtgccagacaccattctaggtcctggggatacaattggtgatgctgtccctatcttcagagagattatattctaatacaggagggaaacattaaataattattggagtcatttataattgtgtaagcactattatggtaagcaaatgcccccagtacttataaggccatgttttctctgccagggggctttctctgacttggagaacatttttgcattcagccagtgcagggtaggtacccctaagagcagctgtcaaccatggatggacaggagtggatggataaataccccatccagaggtgtgtaccacagtctcccagaggtcccctgtgcgatggagcccagcttcccacagcagttacctgctcagtaatgcaccctgtgttggcttcatttcctcacttgtcccactttcccacagtagggtaccagtgcttccggggtcacacctcacataaacaatttggctgggcatggtggctcaccgtctgtaatctcagcactttgggaggccaaggtgggcggatcacctgaagttgggagttcgagaccagcctgaccaacatggagaaaccccatctctactaaaaatacaaaattagccgggcgtggtggtccatgcctgtaatcccagctactcgggaggctgaggcaggagaatcgcttgaacctgggaggtggaggttgcagtgagccaagatcatgccattgcactccagcctgggcaacaagagtgaaactccgtctcaaaaaataaaataaatgaaaaataaataaataatttgtccttaaatccttatctcaggatctgcttctgggagagcccagctgaagacagtgggcatatgagggtatttaggaagctcagggcctgtccctcctcttaacatctgggggtccaaaaacctctgagtttgctgtgatgctaggacagagtatggactcgggaatacagtttccttctttccccttgctgttaccagggcctctcactcaggctccttagagcagaggaaaggatgagctccctaagagcagagatttgaatggatggcatactgtttggtaaactgttaacacctgtaatcccagctactcgggaggctgagacaggagaatcgcttgaacccaggagacggaggttgcagggagcagagatcatgccactgctctccagcctgggtgacagagcaagactccatctcaaacaaacaaacaagcaaaaacccttgaaaacaaagacaatagctactacttattgggccaggagctgctgaatgcttggtgtaccctgatctcatccagtattatgcacaagtgttattgtgccaattttatggatgaggagaccgaggctcaggtatgaaaagtgagttgcccataaaagcaaacagggcattcatcccaggtccacctgccctgagagctggtgccgacacccccaataggcagctgaatttgtggcagcacagaggatgcaggctgcagctcagccagcctgtccgggagcacctcgctctacagcccagagctccgggtcctgctccttacccttaggcccaaggcttctccagtgaccctagcgtggggtgccctcagcttccactaagaaaatgtggtattgagattgtcttcagaaataggaatgggagcaactgatgtgtgctcctgaggaaaaggtgctgtaaggcccattcgccaaggaggcagacctgagagcaggccacccggccctcttttgtcttcaacaggaaaaccttgtccctagcaggaagaccaggtcagtggacaggacagattttttttttttttttttgagacagagtctcatattgtcaccagggctggagtgcagtggcgacactgcaacctcgcctcctgggttcaagtgattctcctgcctcagcctccccagtagctgggattacaggcacctgccaccacgcccagctaatttttgtatttttagtagagatgggattttgccatgttggcctggctggtctcgaactcctgaccttgtgatcctcccgcctcagcctcccaaagtgctgggattacaggcgtgagccaccgcgcccggcccaggacagatctttcacttgagaggaggcaggagggagagagaggcaggaaaagagagggaggttgtagagtggagaggaggagagggaaggaaagggaattgctagaaaagacaggtgtctcttcttttttttaattttttttttgagacagagtctcggtctgtcacccagtctggagtgcagtggcgcaatttcagctccttgcaacgtccgcctcccgggttcaagtgattctcgtgcctcagcttcccaagcagctaggattacaagcttatgccaccatgcccagctaatgtttgtatttttagtagagacagggtttcaccatgttggccaggctgatctcaaactcctcgcctcaagtgatccacccacctcagcctcccaaagtactgggattacaggcatgagtcactgagcccggccaggacaggtatctcttgcacgcatagttcaggtttctttccaagctccatgtccctaagaaactcatttacttcccaaagttcaagaccacattcatcttctgagtgatgaaataaggaaagagccagcatttttttcaacctgatataaacacacatgcatacacatacctaaacacagatttttagagtctgacagtcaaatccatctcagtcacttactctgtatccttaatagcactaaaccttggtataaaatgggtccagtaataagaaccaatatttaccgagcatttgccttgagccaggcactgttttaggagctgtatatgtgttatttcatctaatgctcaccatcgccctcaggctggcccttgccagacagtctgaagatctgctgctgagagaaggcagagacctcagcagtgggccaggaatccactttctgccaggagaacctggctgccagcaagtcctgggggcaaaggggggtatcacgagaggatgcctctttaggtaagggctctacccctccacctcctgcttctcttctcagaccctgccctgggagcaaccctgagttgtagagtgggattttttttttttttagatggagtcttgctcttgtcacccaggctaaagtacaatggcatgatcttggctcactgcaacctccgcctcccaggttcaagtgattctcctgcctcagcctcccaagtagctgggattacaggctcccgtcaccacgcccaactaatttttgtatttttagtagagatggggtttcatcatgttggctgagctggtctcgaactcctgacctcatgatctgcctgccttggcctcccacacctggaattacaggtgtgagccaccgcgcccggcccattttttaccccaattttacaaatgaggatgctgatccccagtgcacttaggtattgagacagcccaggagagcctggatgcaaacccccacagacccacacactaactccccatcccacatttatcaccttgcaggatagtctgactatcagaagcagcacttgcccagaacctggcacaaataagtcctagtaaatggcaatgttaacaccactgttattccccacagccctctatcttccctgctgcgggtgcaccagctgtgccaggtctcatccaggcagcaagtacagctgctaatgcccaggggctctggtgcagaacatcacttcctggctcaggtggctacagtcagatcccccaagtctagatggggaggaggtctgccagggcaaagggtcccttcctctgtggtagaccatcactgccccccatttaccaagccagccaaggttaccaggtgctgggtcctgtccagctcccaacagtcagctgtggagaatttacaacctcttgagctacagtgattactgctctcgtgggcggatgcagcacgctgtttttctgaagtgttatagcatcatttttataactggtttttctgttgagaaagaactcagtgggatcacacccactttactgggagggaaactaagtctcacaagagtcaggggttttgctcaaggtcatttaggaaggtgccggaagggtttgtacaactctggaccaaagaagagaaaaaaaatgagatgagaacggcaaagttcctctctcttctccacatggggactctagccagaaatgactgggctcccttgctctctcccaggagggattagtgtcagaagtggggagaaggtgagagaaaacccaggggagggagggagtcatgggtggagaggcttggcaagaatcatagaaccagaaagtacctatcagcgaagatggtagctattgcgctaagagccacctattctctttctttcagacaaggagattgcacagcacagctggctggatgctcctcaaatctgagcatatagtgtattttagtttcctggggcagccataacaaagttccacaaactgggtggcttaagcaacagaaatttgttgtctcatcgttctggaggccagaagtctggaatcaaagtgttggcaaagttggttccatctgagaaccatgagggagactctgcctgcctctgtcccagcttctggtagcctcagacatccctggacttgtgggtggccttctgcctgtcttcacatggtcttccctctgcacccacatttctcttttgtataaaaatgtcagtcagattagagcccacctaacgatctcattttaactcgattattctgtaaagaccatatttccaaataaggtcacattctgaggtactggaaattaggatttcaagatatcttttgctggtgagtgacaactcaacctataagacatcaagactacattcccaggttcccttgatgtttagggtggccaaggtaatgtggagaaaagtaacacaggccacctccaggatgggcccataagacctttcacaccctctcttcctccatctaccatgttggacacacatggtcagtggagaatgccaaagccccaagggatgatggaacctcaagacagaaggggcctgggtccatgaatgactgtgtggagcagagcctcctgccaacccatgttagattgtagtatgttaggccatcaagatttggggctgtttgtcattgcagtcagcccacccagacaagcccagtggcatatgtccctgagcttatctgggggcagggccagttagtccaggcagaggggctgctgaaggtttcctctatgtaagggcaattaagtaaatgaggttcctcactctgggcccatctcctcctttcctactcccttcaccttactcaatggatcacagggtcagaaaaacgattctggatctgtgcggccgtggcttctgggccaggagagtagattcatttgtttttgtccatctagccccagctttccccacttgtctgcctttttctctggaggaaaggtggggagctggggaagaggtgttatgacagagcccacactgccccttcacagaattaaagctcttgtgggtaaagaggaaaagtaccaaatttcacacatttggaaatcaaatgaaaaagaagtgtcacacgaggccttctcactgtcacctttcagcacctccggcatgactgagaaacctactgagaccaaaatgagaaatgaaaccaactttaacccttgtctgaaataagaggtttcctcagactaacatgttgactggcccaaggagcctgcttcccagaaactgtcccaactgttcccctcattgcccctcagaccttcatggggaggagaagaggccagccaagcacccgaattttctctgaaaagaatggccctggagccaggagtggggaagctgctgctggctttcagggacaaggattagcaccagcactgagtaaagctgcctcagagtcccccccaggtaaggaaggaggagttctagggcaggcaggatcccaaggcaacaggctgacccttgtctctgagccttctgggtctccctttcacttaccacactcaggttagacaaaattagctcccctggttccacataaagggaatttgataactcactcattcccctctcctaaataaaagaaaacaaacagaaaatggaaaatctgaatgtttctgggccaactcctcttaacagtcagcaccaccatgcctttgttctctgggtatgggctcagtggtcatctccagccaccttggaccttacgagtcacacctgggatctagctggaggtgcagccatctaggactgagcctgcaggtgtctcctacccctccacaggctgacagcccagaagatttcattctcgtctcaggtcatttccctcagtcccatctgacttgtgatgtggcaacgcgtcagaatttaaaaccggcctatggttgagggaagctcggaatttccctctgttgttctggtctgacctctagacctggcctcaagtgaatgtgcggctttgcccagcaggtgccatttttcaaggacccaattgcaaagccacctcgagtcacttccttctccgttctgaaagctctcacctccaatgcactcagtgatgctctggtttctggctcatttgccaaacgggatagcaaacaaagctgatgagcctacccagtacctaatagctcagatgtctaatcccccatctttcaggcactctcagggggggttcctaagggaagtgggctcacagaattaattccaagcatggcagttttgtgatacaaaaatgcacaaacagttttctgatgatgccagagaaccttagggccctggaatggggaggctctggcagctcagctgtggctgggttcttggctatggtcagcatcaagactgagactccagatcttgtggacacaaatctaagacaaggagtggtgctccatcaccaagtcaccttgccaggtcaaggacatgaagatcaaatccctgaaggtctatctcttctctctgtccatcaaggagtttgaggtcactgacttcctcctgggggtgcccctcaaggacaaggttctgaagctcatgtttgtgcaaaagcagcccaaggctggccggcggatcaggttcaaagtgattgtcaccataagggactgcaatgataacgtcagtctgggtgttgagtggcccaaggagttactcattgctgtctgcaggaccaacatcctctccatcatcctggtgtagggtgactaccaggggacaaggtcagcaaaccccacacagtgctctgcatggtgacacaatgctgccggctttgtgcctttgatgccacatccaagacttacagagctaacttctggaaagagactgttccccaagtctccctattgtgaatacaaggacccacaccatagcatccaggaatggccaccacatggtgcctttacacaggaacaatcaatgaataaacctgaaagcaagccaacaaaaaaacccacaaacacacagtatgggaataactgtggggtaggctctctcgcagcctccctgccactgcatggtttaggggaaaggtcctggtcagggtgttggaaaatctgagttctcatcctggtcttctgctattctccttcgtcccctaaggcagagcaccttaacttgccgagtcttagttttctcaactgtatgataatccctgctagtgcctacttatacgattgttgtgaaaatcaaatgtgatagtgcacataaaagaacataggaaattgcaaaatgccatctagatataaggaaatcagggtgatgcccacaacattcattcacctccatggtgatgtgtgtcctgtgctgcagccacaccgaactctttctcctggtttaagctctgcccacctttgcgcacctctggcctcagctcctgctgtctctcctagaatgctctgctcccttatttcctttggtcaaatcccatccatccttcatggctccacctgaattctactttctccaaagacttgatccttcaaaagaaagtcaagtctctatcctctgcgttcccatgtcacttcatctttagggcaatgaccactttctgccttacatgatggctgttcatgtgtagtttatgttctctgctgtcttgcctgtctgggggcagggtccatgccttggtggttcttgcagctctcctaagggtgcgtacagagctgacagtacacaagaggcacacagcaccattctgtcttgttgcaatgaatcggaaaggacctcaagaggtgatcaatgccttcagggcgtggaggcagaagatgagcagtcagactccagggatcgggtctataaacattttttgacatagaagcccaatttcaaagcctagtagttttagattatatttgcatttggaggcttttaaagtaccaaaactttagatttatatcttcatgaacagatgtggaagggaaatcaattcctcataggaatggcttatttgtttttatctcagtgctgcatattatgcaccaagtggcaaattaatacataaattgaccagagatatatacaccacagaatagtgccctgatgagaatggagtgaggagtggtctgagctccacatggctgggtgtggcagatgcctgcccattatgtgtcagtcaagtcagagtttcccaaaaagatgttggaagcaaaggcaactctgagtgttagaaaaacccagactattcctcgagaagaagggcaatgctcacacacgtcatttagggggacatgtgctatggtatgcaaagctggtgccatcttgcctttccaaggctgttagaaggatgtcatgagaaaaaggcatggcagccccctggccctttcccacatgtgccctctgcttcccccagcgagcacgtccctcctccaggacaggaggaagagaatggagaaacatcatagattggccctgagagaggtgccctctggggctggtggggcccccctgctctcgcctggcgtggctcccagagtgagtgatgtgagcaaatgaagcgtgagcacaacctccctcctccctcctgcaggcatcagtgccagccctcccaggagccctagggcagagtggatgggtgggcatgaggggcgggacagggcctgatgagaagtcacctgctcaacctctgggccagctgtcccacagccaaatgttccatgggcagaggagggccctgaggggaatgcacgatccagggcccaccagggaactccatagtgggctgctggtggccaaggactggtgtgggcttccagagaaagcagaccaggcagaaagggcaagtctactctaaaaaattccataaacatggaaaaaaactaaaagtgactgctttccccaagagaggggatgacacataatagacaaagcttctgacgtagtctagctaaaagccaaagagctagttatcagctctggagggagcagggttggggagagagagaggggcagacacacacactcacacaggagacacacatagaaacagagagaggcaaagagagagggggagagggaggaggagggggaagagcattttctatttgtctcattcagtttcttatcatgaagggacaccggatgtcctttagggggacaatagaagaggaacaatggaaaggaaagggtttgcataatcaggaaggaccacacagaaaccacaaatgacagatgggtgtccttatcccccagacacaggttgacatccccactcacatgtctgaggaggctgagtttccagtgccagaaacgcccacggatttgtcatcttggagatagggacagagccctcgcattcatagccccccatcttgaagaagctgtgaagatgcgggggaattagaggctaaagcatcaaatccctgcaccaggtcaggtggggattttgcctggaaatagagaggaggtgctttaatgaaccggtcatgtcctgggtgagaatgagaggagaggtggctctgtcaggagaaacagggagctgccggcacagcacatgtgtgaagaggaatttccacactccctgacgacacctgttccgtcaaagcagcttataaagaaacaacggtaacactgtcaccctgtcacatcccac

SEQ ID NO: 31 - DNA, 58644 bp, Mus musculus
gtccctacttcctctctccctgacgccagggacactctgaagagagtacacacttgcgggtctctgcaaagggcttgccagtaggccagaatgacggtctgaggagaccccttctttttgactcagattaacattggtttcatttctcgttttggtcacggtgagtttctcagctgtgaggaagacgaaaagctctgaggagaaggctcaccccttgtgacattctttccctttgtcttctgggtgtgtaaaacgtgataggctctctcttcccataacagcttcaattcaggggcaccctcccaggatcctctcgctccacagagagtcatatgtgtgaagaactctggaggtgagctacacaggaggagccacattgacacagacccaaatcctctttctgattctgtcatcctgagacataactgagaggaccttaggaggaagtgaggaaaccctccatttaatggcggctactctgaagggatcttcagaagggcccttggtctggactaacagacctcggtcctgtatctaagggcacattccaggctgtctagcctccaaatcccaggggatcaccatgataccaatgcagatttgccaggaggctctgctccatgcaggcatgcagggacccagtctcctgctctgtggttctgccaccctctagggccttggcactctttgatgatcatgcatactgcacagagcagaagaggagggaccagaatgtggagagcaagcagtcttgtgggccaggtctgtgggcagccatcttactttcttccccttcccatggttcacaggaaacaccgaagggagagagggggtagtgtcccggagctttctggatcaaatggtctcactctaaaaaggtctcttgaagtcttaactcctgggaccctagagtgtggcctgatttggagataaagtccttacagaggtaatcaagtttgagtcagatccttaggtgggctggaatctaacggagttgcctcttcctccttcctcttctccctttctcttgggacagggtatcacacagcctaggctgctgaactcgatttttttacatagctgaggatgactttgaacttctgatcctcctgcttccacctcccaagtggtggggttaataggtacatgccattatgcctaggtaagccatcttctttctttcttcctttctctctctctctctctctctctctctctctctctctctctctctttcctttcttcctcttcctcctccttcttcctcttcttcctctccttctttctccttcttcttcctcttcctcctccttctcttttttctccagtggagatggaccccaggccctttgcacatgccaggaaacctctctatcatgtgcccacagaccagaattcttatgtcaaggatgtctggacacagagagacacacgcttaggaaagaccacacggtacatgcagaaagcatgcaaagacacagaaggctatccacaatcaaagggctgccagaggcttcgagaaactggtgagatctggagtggactctttctccccagttctcagaagaacccacacatgcaagacctcgacctcagcctcgctgccacttgaattctgagatgaaatgtctgttgttaagctgcacacagtgggctgcatttatggctgccccaggaagctgaaacacaccaggccatgcccagatctggggagcatccagccagctctgcaggactttctttttgtccagaggaagaaatgggtcctaataaaggcacttttgcatctccccaggggatgctttatggctcatcaaccaggccccatttgtccctagggctttccgtcaccttctttgcactctgggaacaggcaaaggcctgaaacatttctggctagtgcatccacgtggaaaagggacagttcttctgctgtcaggaatctcctggttcctctctcttggtccagagttccaagaactctgcctgcatcttcctaagtgacctcaggcaaatccccatgcgtgtggatctcgagtctccccccaccccccacaaccccccacccccgtaaaggggttgtgatctcactgacttctctcgacacagaagtccctttgcaaacgatgctctgacactttgaaaatacagcctgctgcaacccctcaagagagcaataatcacggtagctcaagaggtggtaaatcttccctgctgactgcctggagctggacaggacccagtacctggtaagcttggctgactctgtgaatggggaacaaagagggtagcctgcagtgagagagcatggggcaaagggtccttagggcaagcctccttgtctgctagaactgggggtcctggcagcagccacctggacagatagagttatgtgcaatggcacatgggcctcaggagccacacctgctgccttgctgagcccccactgggttgtgggtttcactgcagagctaaagctgcaactgactgaagacttaattggtgccaggtgttgggcaggggctgcttctgcttgtcaaccctcctgcagcgtgatcagtgtggcttgtggggtctgtgggggtgcaggctgggtgggtttgcatccaaccttgaatgggctatctcaagccatgttacatgggctatctcaagccatgttacatttctttctcctttcctttccttctcttttctttctttccttcctttctttctttctttctttctttctttctttctttctttctttctttctttctttctttctttctttccagctttactcatttgtaaaactgcaataaaagtaacctctggttagaagccagtgtctttctggccaggggatggggtgggatgatagtgcctagggtggggtttattcttgaaggaggttgaagatcgaagaccttgcctgcaggggcctcccatgtgacaagattttgtacacaggagctgcagagtgcaggctttccaggcaggtggatttggaactctgaagtctctgtgtcctctagggggcaggcttcatgttcttggtgacaggcagggggtgaacactgctaagcctgaggccagcaaatgctctcatcatacctacacttcacagacactgtgtcagaattagctatgacagctgcacaggaagtggctggtctgaatctgaacccgtgactgtcagtctctaagatctgtatgtttgtgtgctgatagcaggctcagagacaaagctcccatcccatcttgtccctcaggagtagaatgtgatcttgaatttctttgtaggtgaatttctttgagaagtagcttgggacgacatgtctagtgtctcctctctctctctctctctctctctctctctctctctctgtgcgtgcgtgtgtgtgtgtgtgtgtgtgtgtgtatgtgtgtgtgtgtgtgttcttttttctccagccttttcccaagtagagaggtctgccccaactcctgtccagctcttcctgcagagggtggggctttcctgggtagggacagagaggtggcctgctcttagtctgcatccctgaagtgtttgccagcgtcttttccccaggttcactggctgaggctctcattcgtatttctgaggacaagctgagagtgaagctgtcctcacagaaagtgagaccccttcaagcgcctgggaagaagcccctggcatgagggtaggagcagatgttttcactctggcctatggaagaggaaccctcctggggaggcgctcactagccccgctggtggggagggagcctgaatcctccaggctgcaaggcatcaagctgcttgctacagcaactttgggggttcatgggctgcagtttcgtagttctgatctcatgaacagcggttctctatacctgagccctgggcttctcatctataaaaggggaatgacaaaaacagttcatgatgctttgtaagattggggaacccttagagacacagtaggcggtagctactgtcatttatggctattgtctctctgtgtgtctctgccctatgtctctgcctcgtttctctctctctctctctctctctctctctctctctctctctctctctcgtgtgtgtgtgtgtgtgtgtgtgtgtgtgtgtgtgtgtgtgtatagaccagaagacttgggtgctgtcccttaggaggcacttatctattctatgattttaattatggatgtgtatatgtgcatgtgtgtgcagttgtccacataggccacaagagagcatccatacaccctggagccagagcaccatctgatatgggtgctgggaagagaactcaggtcttacacaagagcatcaagttctctaaaccatacagccatctctgccatctttaaaaaaaaaaaaaaaaaagactcttattggcctggagttcaccaagtaggctgacctgccagcgagccccagaaatccatctgtctttgcctcctcagcactgagaccacagggcgcaccaccgtacctggctttttccatgggttcctggggattgaactcagatccttattcttgcaaggcaagcactttaccaactgagccatagccccatcccctcataattcttgctaattagcagacaatatttcatccattcagatctctctccttagggagtcatcctttctcctgctctaggatggcttgctagctagccttgtaagggaaggggtgtgcattctcagggcacactctgccctctcccacagcccatccctaataaggatttcagaaccttctaaccttctatagcccacgcagctagaaagcacttggatccctacatatggtttgcaacagccacctactgagaccctaccgtcggccaggagctatgctgatacgggaaatgactgaggagacttgcatttctccaggagcgttcagttttatggaaaagccacaccgataagggcagaactcccagattggatctgtgagcatagaccattggttttcaacctgtgactgtgaccccttcagaggtctagtgaccctttcacagaagttgcctaagaccatcagaaaacacagatatttacattacttttcataacagtagcagaattacagttaggaagtagcaacggaattaatgttatggttgggggtgaggtcattataacacaaggagctgcattaaagggtcacagcattaggaagactgagaaccactggtctagatgatgccctgttaccaagatatgtaatgtccacagaggacaaactagcagcacagggaatgtgacataacacttttgtcactatataattccacagtgccctgacagtggtagtaatgaaagggaccaagagccctgggaaacaaggagagatgagtccttaaagtagtaatgacccctcttcctccaagactctgagtcagagatcttagaaaagacaggcttccagtgcagccttccagagccattcagagtaagcatctatgttggctgaaaggacactgaggggcagggatgaagagtggggggcaggggtgaggggcaagtgtgaagagtgagggaacagtggtgaggggcaggggtgaggggtaggggtgaagagtaaggggcaggggtgaaaagtgagggttaggggtaaggggcaggaatagagtgagggaacagggatgaggggcaggggtgaagagtgaggggcactggataaagagtgaggggcagggataaagagtgaggggcaggggtgaagagtgaggggcaggggtgaagggcaggggcaaagaatgagggaacatgggtgaggggcagggatgaagaatgaggggcaggggttaggggcaggaatgaagagtgaggaaacaagggtgaaaagtgagggtcaggggtgaagagtgagggtcaggggtgaagagtgaggggcaggggtgaagggcaggagtgaagagtgaggaaacaagggtgaaaagtgaggggcaggggtgaagagtgaggggcagaggtgaagagtgagggtcaggggtgaagagtgaggcgcaggggtgaagagtgaggggcaggggtgaagggcaggagtgaagagtgaggaaacaagggtgaaaagtgagggtcaggggtgaagagtgagggtcaggggtgaagagtgagggtcaggggtgaagagtgagggtcagggatgaagaatgaggggcaggggtgaagagtaaggagcagggataaagaatgagggtcaggggtgaagagtaaggggcagggataaagagtgaggggcaggggtgaagagtgaggggcaggggtgaagagtgaggggtagggataaagaatgagaggcaggggtgaagagtgaggggcaggggtgaagaatgaggggcaggggtgaagagtaaggagcagggataaagaatgaggggcaggggtgaagagtaaggagcagggataaagaatgagggtcaggggtgaagagtaaggggcagggataaagagtgaggggcaggggtgaagagtgagggtcaggggtgaagagtgaggggtagggataaagaatgagaggcaggggtgaagagtgaggggcaagggtgaagagtgaggggcaggggtgaagggcaggggcaaagaatgagggaacatgggtgaggggcaggggtgaagaatgaggggcaggggttaggggcaggagtgaagagtgaggaaacaagggtgaaaagtgagggtcaggggtgaagagtgaggggcaggggtgaagagtgagggtcaggggtgaagagtgaggggcaggggtgaagagtgaggggcaggggtgaagagtgaggggcaggggtgaagaatgagggtcaggggtgaagagtaaggggcagggataaagaatgaggggcaggggtaagagtaaggggcaggggtgaagagtgaggggcaggggtgaagaatgagggtcaggggtgaaaagtgagggtcaggggtgaagaatgagggtcaggggtgaagagtaaggggcagggataaagagtgaggggcaggggtgaagagtgagggtcaggggtgaagggcaggggcaaagaatgagggaacatgggtgaggggcaggggtgaagaatgaggggcaggggttaggggcaggagtgaagagtgaggaaacaagggtgaaaagtgagggtcaggggtgaagagtaggggcaggggtgaagagtgaggggcaggggtgaagagtgaggggcaggggtgaagggcaggggcgaagaatgagggaacatgggtgagtggcaggggtgaagaatgaggggcagggtgaagagtgaggggcaggtgtgaataactactcctggaaagggggctgtctgagctaggaatggaggaacagtcaggagataagaatagagaaacttcggagggggctgtgtttgcaggagagtggccagaggagacaggagaagtagcaggggagagggaggcagggcaggctccagctgcctccggggagctaatgagcttggagggcttgtgatggggaaatggatggaacatcagtgtatgaatggctttagggacaaatcagaggagggcttgagagagttaatcctccaggaccctgaatgaagagagaaggccaggctaggcctggtgcttttctcagggataagacaaaaatcactggtaaaaagcaagttcaggaccaaagggctttttctggctcccagtgcgaggctacagctcatctaggtggatggagtgctctagctgtggcggcaggaacagaggtgtccatgatcaggaaggggggagggggagggggcacgaggagggggacagggacagggagagggagaaggagagagaggaaggctggtgcctagctcactctgtcctcttcaggtaaggggagagtttgctcatggacctgtcccacccacattcagagtgagtcttgtcatcttggtgagacattctgggaggggccagagagatgtctcagtgtttaagagcactggtttgttcttccagagggcaggaattcctttccagcacccatgacagccagctcacacctatctctaactctggctccagcaggtccttgaacaacccccccccaacacacacccaaacaaaaatctttataatactgcctctctgaaaacatcctcacagacatatgaaattatttctaggtgtttctgaagccagacatgttgacaagattaatcacaacaggcagattgctatgaacaggggacctgacactttaggagctgcagagatgagtcctcccaagtgccccatggactcttatgggaaatagccatggctgcaaaagtgcagaggaccagagtctcacctatcattctgagacagaaactggaaggaaccacattaggggcagaagtatgctatgctaaaagtttgcatctggaccccaccttcccagatgttgctaagtcccatggtgatgttgttaagtcccagggtgatgttgctaagtcccagggtgattttgctaagtcccagggtgatgttgctaagtcccagggcgatgttgctaacaagtcccagggtgatgcacactgagatgagaggtagcatcacagcacacagagaaacttctggatcctcagattctaaaggagaaaccaggcaccctgcccatacatacccagacatattgacaccccatgtacaagaacacaaatgctttattttcatttgagaagtgagccccaagaagctcttgcccccaagccacactattagaaaatgaaccaagaaaggaaaaagagtcagcactgggcacatggttgagcagacatccactgtgggaatctggggatctccgtgcgagtgcagcccccctccacatctgttccattcaaagggctgtgaaccatggcaactcttgcaaaagaaagcctttaactggggcttgcttgcagtttcagagtgttagtatattatgacttagtgctggagaaggagctgagagttctatatcagatccttagaaaggagagagagagagagaaagagagagagagagagagagagagagagagagagagagagagagagagagagagagagagagccagccagccactgggcttggcttgggcttttgaaacctcaaaacctgcccccagtgacttacttcctctaacaaggccaagcctcccaatccttctgaagtactgccacttcgtgataacaaaacatttaaatagatgagcctatatgagggttattcttattcagaccaccaagggttctttctattgattgggatacaatgtaaccaaccacctgctgctcttgagggcatgcccccccccagggggcggggtggcagcaatagattgtattctctcagtctatgagccaaataaccccttcctttctaaagttgcttcttgtcaggatcatgagacacaataatgagggaaataacacacaattagtcatgaatgggttggtagattcagttaggggtaaatgggttagtggatgcagttagggttgcatgaattaatagattacttctgatgtgggttctctctctgtactagtgttctctagaggaatggaatgtatagaatgtatacatatatgtgtgtacatatatgtatacatatatggctgactcacaccagagatgctgagaatctggtagatgctggaatctcagtccatgagactgggtatctcaacagtcatggccttagtcgtttaccctgaaggcctgtaggattcctggagagcttctggtcttcagtttgtgctgaaagcctaaagtttattctaatatcagcaagggaacatggcagtagcaacagtagagtagacgaacttgccagcaagagtgaagacaagcaggcaaaaatccaagccttccttctgccatgctccttatccaggctgccaccagaagatgccaccaacatttagggtggggggtttccatttcaaaaaatctgaccaagaaagcccctgaagggaatgctgattctattcaggttgacaaacaaggttagccctcatactcaaagccagtatggttaggtatattaaaccctgatggtccatgtaggatacccttcaccactccagaagtctgtgaaggatgcttctgactgtagttctttacctttacatcagaatcaggagcccaagtaaaattttcttcaaaatgttcttagacttgctggacagtggtggcgcacacctttaattccagtacttgggaggcagaggcaggtggatctctgtgagttcaagaccagcctgatctacagagtgagtcctagaatagccagggctacgtagagagagcttgtctaacacaacaaaacacagtgctcagtctgtggagtggtgttattagctataaaaagcagaataacgaaaggtacattgcttaactgtgcctgtgacagcccaaaataaaaagtaccttttccagcctctcttgaaactagggatggccatgtgactaaattctgatgagcaggtggggaattgatgattgctgtcttcaggacaggtccctctgggcaatcagctggtccttccctgcagctggacttttgatgtcctgattggttctaaagcgagccacttcgggtcatttaggtagatgctggtaccagaaaagcgaaaagatctggagaccttgatgagcagagaatggctactcactccaacctgggctgaagttccagctttgctttccgtaaaagccctagttagatcatttatttggatggatggtcctgacagctaaacagccaagcctgtgtggcacacagggggaacctgcttgacctcaggctggggctaaaacaagggactcaaaggcagagctcaccagaagggagcttctctctctgagtggagcgcgctccgcacctctcttggctgtctccctccgcgggattgagcactggatgtatagacccacttcctgcaggactttgggaagttctgtaatctctaagagttgcagctatgcatccaatctctcttctcttccagaatggtccagactagccctaggcaggtccagggctgagtagagccacacccaacttccttatactagttcatggtggggggggggtgcatcctcttgccttcctcaagaggttagtggtacacctcggcttgcctgtcccacttattaactcacagaagaggtaggagtctggagctctcccgacctgtactgcagccaagggcaaaggtgtggtgtaggaagacagactgaagtgcatagggtaagctagtcagggcacacattgtagcaggcccagggacagcaaggggtggacagggaacatttggaaagttctagaaaaacagaatccagcctcaaccctcttcaccctgcaatttctaaagttttagatagaaaggaccctaaggactcttctgggatctcttgtcctgatccctaccaccttgactgctgtgcaggcccagaaggctgggcttgggatgaggagaggattggggaagtaggtggcacccaactagtccgatctttcttccctagtaactagcagcttgtgggatactttccagaagtctgaccaacactatgaccttgtaccaatcctacacctttcctggcctcagtttccttttggaagcactgactcggtgggggcgtggctttccttagttgagggggagccaggaggagatcggggtgcgggggtgggaggcgggctccactggtcgcagcgagctggccaggcgcaggcaccacaggcgctcagagctagaagctccgctcctgcggctcttaaacctgagtggagcccgcggggagcacagcgccgaacatctcctggcccgggacgctggaggccggtctggccccgggcctcctgaaacccaggcggaagaggacagggaccccgcccgatccctcctgcggacgggcggggcggccccacgccagctcctccccccgcagcccggcagggatcagtcgcggcgcgcggttccgcaggtggcagctatgacccagtcctgagcgcccagccatggccagcaccccaagcctcctgcgcctggcgctcctgctgctcggggcggtgggcagggccggcccccgccctcaggtgagccctgggaaccccggtgacaaatgggagggggacgctgcggtgttctgcgggcacaagagctagcggaggggctcctggacttgagcagaaactccgggaccccagacaggggaagtgcaaggctcaggcgaggaagagacagaggagttgaggagtccaggtggggattggacatgaggtgactaccctcatcctgaagagctgcctcacttctcggctccagctgctctgtcagggcaccagctgccccagggttgccctgctctgacttctgcgacccgtctttgtcccttattactttcccaactccttttccaaacccactggcactctgccttccctctgtactcagaacccctgcggtgccttcccctgcactcctcctgggcttccttgtgtatggggtacccaggaagctctagaggaccgaaggggcctggttgtagaaatgcagcttcctcccatcacctcatcacagtctttgactcatagccccagggaccctgcagcctgttgtccttcctgatgacctcccaggtggcactgacttgccacctccaccccagcctctgcagcaaacatgcagcaggttccctgtttcttctggatcagccaggccctctcatacactcggctaatacccatcctagacccccttggattaataacccaccagaaagaataccgagggtcaccggaacatccaacctccttggtgtcgccaaagactaggtcgcagctggactcttgtgggctcttctctgactctctctgacctgcctgtgaatcctgccccaggctcctgccctggccatgatggccagctgcttgtatggagggcggttgttcaaatgtgccaggatacccttgcatagaagaggcccaaggctgggcagtgttcctatagaagggagtactttacacatcatgtcttgtgtccacctccagagctaaagggcttaaccgttggggagtgggcctgcatccgtttgagcttggtctgacataggagggcacagacctcagccctggctgagaaccgagttgtggacagaggtgcctccccaggaagtgcactgtctcagctcccaaaccctttcccagattaatcctctccctgttctccagggccaactgtccccaagagataccttcccagtctctggcactgcctctctgttcccctgcaggccatggctttcctggtgacattgggatctttccagccacaaccgcagattcgctgctcagttccttcttgtgaggcaggatggtggggatttgagccttctggtcctaggctgctgtgggtcacatttgcagattaggttgagagtgaggggacagagccaagcttgaggccttcctttcttctccctgcaagactccctcctctaatgtcaagcatcttgacccttactccagccctggttcataagagcagaaatgcaggtgctgaagagacacactggagctttgatggggtgcccttgttatggcgagtactaatgtctccggtagccgcctgcagaggtgtgtgtgtgtgtgtgtgtgtgtgtgtgtgtgtgtgtgtgtgtgacaggcagctttaacgttagattgcaataattacagcacaaccgcatggaccctggaaagactcaagaataaattttgtattttactttctgtctgtgagatcaccttcctgtcattcgtggtagggtgagtactcagaaacagggttccctaggtggtagggtacagcagcttagggatgggggagcaaagagagtgggaccccagctcttggcccatgccttcctcctgcccggtgggcatgaaggccaagggagcaggtctggtgagggcagaagttgcttccctgcaaattaagggatggttgagctaacttgtgccaaacgtgacctaggctgttccagtgtgctttctgggaaggaccactcctctcaccctgttcccttctacccatagaccctctatgagggagctgggctactgagaagctaagcaagcatttgacacttgacgttccaaccgggtggaactgggttctgaggtcaggtctgatctttgctggaactctttagcaggaccctcgatgatcctaaacccagtttctctatcagtaaaacagggatcatagggtctgacatggagggatggagggtccctaaggggacccatttctgaaatggcagcttgaggcctctgggagaaatgtcctttggaacctggtgtgtccccaggctgcagagtacagcctggtgcaggattgttgcaagcccctggcctctgtactccaacaaagggcagtgggggctgaggcttcggcttggtctgggtagactttgtccctagctgggcttccttccagacacagacccagcatagggctgtccaggagcagccaagaaaccacatcctgtcttctagtgtctggtgcacctgtcctcggcaaattcttgtgtgtgtgtgtgtgtgtgtgtgtgtgtgtgtgtgtgtgtgtgtgttgtgtgtgtgtgtgtgtgtgttacacagagatgcatatgagatagattggagataggtgtccaagatataagaggctccatttctttttgtgtttgtttgggaccctttgtgtcacagtggatcggtgtcaccatgtatgcagcaatgtattagcatataatcacacgtccaacagttcgtgcgcttgtgtgtacttgcatgtgtgtgtgtgtgccttgatatcctacctgttatactgtgcttttgggaaggtatgggattgtatataacagcccggtgggtgaatgggaatctcctggtatgtaaccttgtaggggaaaagtacagtgcttgtggcagtgtttatatgtgtgattgtatgggtcatgtgtgtgtgtgtgtgtgtgtgtgtgtgtgtgtgtgtgtgtgtgtgtgagagagagagagagagagagagagagagagagagaatgtttcggcaagtgcctgtgcacctggctgtctgtgtgtgttgatgtggggtcaggagaccccatgtcagggtctcagtgctaggaacatccctgagggggtgagggatatagcctgtgacagtgtgtctgtgagaggttccttgagtctggaagagttgcctgtaccttgccttgccccgtccgtctgggtcagctatcttaggaatgaccttaagaaaacaaaatgtagacaaaaaaaaaatctagagctgagcaatgggaaacgtgacccaggctctgagaggggaccaggagaaaaagtctggttgccaggaggaagggaatctacagggctgtgcctagctgggaggctctagagccctgtctgctcctgctgaaagcccgccagccaccctccttcctcctcttataatcaggtgagactgggctctcttttctcctacccctcaacccaacagattgccagaaaaggaaaagctctggcgtgcgttcgcgctcaggctgagccagtggaggatgccctacgccatggtgcaggttgtggatagagcttacggggcgcatcatcgctggctgtgaactccttgatcttattctcttaggacgcctcctccttactgtcccctccacctgggcatcgtcctcgcttgccttgaccctccttttcctttttcaagatctctggagcctcaggggtcctcatgtcccctcaacttcctagcacagggactaaaagtatgtgccaccgtgcccagctttttatctgggttcccggtgtggaacttaggccttcaagggtttgcagggcccactttctggactgagccacctccccagcctgctcgccgtgacactattgtccttactgtgccttccttttgaaaggaccaccttccttgctaggccagcctccatttccctttcccatacctcctttccccctcagtgacccctcaggtcaacactgagacctggcccgaccactccctgagctcatacacccactgtcttcttacgacatctgtcctgcaaggctcttggccccaactccattcagcctgaagactcagcacagtctctacccatctctggatttctcctctactcaccaccatggaaacttggcaagctgtggctttagggtcttgtcttaacagagcctcaagctagagttaagtttcctatcttcactctgctcttcgagtcaaagcgtctttgatgctctcatggtagctgggccatccaggtcctgtctccagcccccattccctcttcttcattgggttcttgggcctcttcctcactccctgggtagacacctgctgctccagttcccagcagtgaccttgctttctgccatttgtcctactaagaacagacatggtgggggttcctccccttatccctgcctgccctcacctgctccactgccttcagggcactgagactaaagaagggatataagaagaaagtgagaaggaagtgagggaggtggtaccagtccaccatggctcagtccgatgagtgcgccacctcacagcagtggctccaagaacaatccaccgttgctgttgccacctctggtttccttttctttattctccgagtgaatactgctgacctttgctctcggaaggacactcatctccagagatgttggtggcattcagagcaagcttgacccaccttccccaccccaaccccacttctggaactttccatgtcaccaggaacaagcccaggtcactgtgtgttgttctctggtgatgtcataggacatctcaaaccagggcaggctcacccagaaatcagatctgctgtatgtaagtggggaggggtggggaagggtggggtgagggataggactaagactccggggctctggcatctgaaaatcagctgtttgatttcagcacctgtgtgtaacttgtagcttcaaaaggtgaacgtctaggctgaagagacgacttgttgggtgctcgctgccaagtctgagaatgagtaccgtctccagagccccacatggttggaaggaaagcgccaactcctacaggctgccctctgacctccatgtacatgctgcacactgtggcaacacatgctctcccctgtgagcacacatgcacatacacgatttgcaggtgcatttaatttcgcctaagtcccaacttcgatacagggggctctctgatcatttggacagctatcactcctaaacaggtcatatttataatcttgaaggatgtttttgaagcaaatgaaaaagcaccgcagctcaaggctagctaaagggagcactcagaaataagcaaggggttggtgctcagtggagtgcatctgttacagccatatactccaaagccagtaatgttaaacttcgttaggctcccatccctccatcacggggaggaggccacctcccagggcaggcacaaacaacttcagagttctggaacttttccgtcttcaccctgtccttactattccgtatcctcctgggacgtagaagccaggctgcatctcagatctgtgttgtgtcagaagagacactgtgcggtgggatggtggcctttcgagggcagcgatcgatcaagtctagcaggagagtgggtgataattctggctctttctatgagccctctgtgagaccacatcctgcaacctctgatgctgcaggttagccactgagctaaggcgactgtatgctggccttagctctgctgcccgagatgccatgtgcctttgatggagtcttctcttgactctcctagagtggttggaggcaagctatctccaggctggcagtgcggccagacatccggaggggaggagtcccaggctgtgatgcagctgtccctcaggaagtctctccttgttgagggtagatgaagggcagctgggaccatgaatgagtcacacactctccctctctgctctccttcaccccacctccttaagccttaatctgttagacactctctgggtacttactagatggcagccttgtgcaggataaacaccccagaaggcctggatccccaaagtggcagtcaccggctctctcccctttcagaggttcctggtgggctttggtccactggaggttaagaaaccaagagggtgggagtccagtgggaccagaggggctgctggagccacggggcttctgcttttatttctgctttcccttgtagggtaccacggtgtccctctcagagacggtgcagaaatggagagaataccggcggcagtgccagcgtttcctcacggaagcgccactcctggccacaggtgcgtccagatgaggcctcacgcctgtactcccgaacacctccatagaggctttgacgatccccagtccatagctggtgtcgtttttctctctggaacggcatctgcctggacctctatcccagtgactacactgtgtcttcactgaagtccctcctgtccccttcccatctgttttctctcaggcagctttgtgggtgctgtttcattgctgtctttacccccagagcaggaccccactttccattccatgttttcctcagcccctccttagctgtgtatagactgacacatttataatcaagcttttttttttttttttgagacatgagctcatgtagcccaggctagttcccaactcactatgtagccatgaatgaatctgaacttccaatccccttgcctctacctcccaaacgttggtattcggtgcctatgtatcaccactcttggctcaagcagtgctgaaggctgaacccagggccttatgcacgtgagacaggcatcctatcgaccgagccaacgggagtaaatcttggggggagtatgtaaggtggtttaaagaacacagcattggagccggttgggcttgggttcaaatactgtctctgatcataacagaaaccaggggaaggtctcctcggcctctcaagccaccattttcctcccatctgtgaagaatggttcaaaaaaatgccttataggagccatctgttgagccctagctatattccttcttctatataacatctgttataacaaagttccatggaccaggggatgcctccattccacagaaggcatagaattgttaaggaaatcgctaaggtccggcccctgatgagtaatgggatccttcctcggtccctgccctggggagagtgcttagagtccagagagcacttagcaggggctgggggggagtgtagcttcctgtggtccaggaggttgggaaggatggatgacagcagcctgggactcagaggtggctctactgtttccacaggcctcttctgcaaccggacctttgatgactatgcctgctggccggatgggcccccaggttccttcgtgaatgtcagctgcccctggtacctgccctgggccagtagtggtgagtggtcccctgcctgatcccaggatgctggggcaggatgggacatagccttccttcctttgggacccagttcccgcacctgaaaatgtcctcaggcctcctggagggtagagcacctgctctgggtggtggttggatagtcagcaatgacaggggtcggaactttctgaggtgtcctgagtctggtatttgcgcaggcaggggtggatgtgccttaagacagcaacgagacccctctgacctggtagtcagcaaaggagccaggagggaggaacagatcataggtgcgcaggaaggtacctatgaggtgtcattttctggtttgcatgcctgtgtgtctggtgtatgtgtgtctggtgtatgtgtgcccgctgtttgtgtatgtgtctgttatatgtgtgtgtgagagtgtctggtgtgtgtgtgtgcatgtgtgtacctgtgtggtgtgtgtgtgtgtgcgcacacgtgcatgtgtgcattaccaagaggtgctggcttgtcacttcctgatacttttaaaggtttacagggagcagtgctcaagggaatggtgggctggcccctccgaccttgtccagcctacttctgcctgaggggagactctacacagggaaagctatgactgggtgggtgagagagtcctgccctccagaaacccccggaggaccagggtgcccatgagtgcagtggtaacttccacgtctactgctccattccaatcacatgctgaggctccatgggggacaactgggtcaagcattcttgctggaaggagtcccagtgtccatgaggggagaaaagacactttgtgtgtgtatgtatgtgtgtgaagtacgtctctgtatgtgtacacatgtgcacatgtgtgtgttcatatgtgtgcaggtacatgtttattacatgtgtgggggccaccatgtagagaccatagggacaattttgggctgtcctcacagactgtccacctttgacgaggctgccttattagtgaaccccagggatccacgagtctcagcgtcctcagcactgagatcgcaggcatatgctattttaccctccttcctacatggatgctgaggcactaaaccgagatcctcaagcttccatggcaagcacgttacagacccagccacctgcccaactgagagaagatacttgagagggtaatgatagttagttacccactatctgtgtccagtcctgtcctgacagctgccttggacatggacctgttcgtgtgaggaaaccggagccccaagagatttaagtctcttgctccaaatgagctggagactggtggaaccctgggcactttgcttagccattatcctcaaccagcctgtgagcaagcatagggatgacgtcaggcttgggaaaagccaggggtcttcttggaggagttggcctggtgggccggacatgaacttcagcatgaaacccaggcggatcttctagtgaggctcctcccatctctcctgtgttcctcaggacaaaccagagtgtaaaagaggcagactgccagtggctcagtggctcagtggcccttcactcagaattccttagtgccttttgcctgtggacaggcgagacactcattggatcctgcccacagctctctgagacgattcctcccattttccctcttggcgaggaagctgaaggacagagttacaacgtggcttttccctgacacacagctagcttggtttggcagacctgggcatcagtccaggaggttgggcaaggatctgcatctccttgttgaactgctgagccaggcttgccggggagcaggggagtgccgtcacgtttggcattgggtctggagacaggtgagtggtctgcatgaccgtcattgtcaggacacattagtgagggcgatgggatcctgcccattccctctaagccaagctatcctgtgcctctgcttattgatgatgcaagaggctgtgtggtctggaatggttcctagaggtctctgtgttttggttcgtaggctcactcgggagctggagtggagccaagtgatgtggataggagatgatttgagatggggggggggggtggagtgcgggggacacaagcctccattcattttttcccactttccctacatgcttggcaccttcctacatggcgtacacgatccctgcctccaaggttgggacctctgcttgggtatcccggctgagcctctagacccccgggagccaggcgcgggacagagcctatcactcagcgctaagcgcccccagctctgcctgcgcttgcgactccatccatcacctttaattttatttgagcaggaaataggtcctggtggtgcccgtttatgagcgaacacggttttattgctttctccatgaagataacggcctccgcacaggccccctgccagccaccctccctcccgtctcaccaggctaatttactccttcccacccgtttttcgacacccagatcaccggctctgcctaccctcttgagttggggacccccagagagacgcccactagattcacacagcgctatctgtcattgtaccagaggggctccctggtcccgcctaggactgtggggaatgagcaaggggggtgtctctggagcattcttagcctgcctcagggagcagctagcagagatgcctcacagcaggagctggggacaggggggccttgtctctggcgggttctctaggaaacatgcccagtgaggaataggaggggagtttagtggagctcagcacctccaaaggcctgaggagaaaggagtaggctaggggacagaggtcctcaagttagctggagttaccaccagggtgcccacagagaggcaaagccacggcctgagcccccagactccagcaggtaggggtgagagagctgtgggcatgttctttctccatcatcctagggtcttctgccagtgggtgtcacctgtagacaaaacccagtaatgactgtgtgatgcaagtctaaaggagtcagccttctggggtagagagcaaagcagagaaatgggtggcctcagaaagaactacgttcaaaccaatgaccatagcccagctaagtccttatcaggacctggggacacacttgtgtgacatatgccagggagctgtatggagctggaaaggtcaactttagggtcctagtggaaataggttgggaaagtcagagatatctttttttcctgaggtgtgccatcagggcaggtggcaatggggccaggcagaaaggacagtcataggcatggggaggaggaggagggagaatgctcagggagcactttgaacatgctgtcaagacctcaggcctcaggggtgcgtgggcagggtcccaagaaaaccattccaggccttgcagtctggaatgttattgtggacttgggatcccagatggtgtagaaagagcagaagcaggtgaataggaagtggaagcgtctagtccacacaaagatgacagaaagatgaggtctctgcggcctgctagcctgttggctgtctcaggcccttggcagctccatttaccctcccgcagggacccactccttccatgccagcccaacctcgttagtggccctctccaggttcctacctgtttgttagcttaactctaattatatgagggtcataaaatgctaagtggcttatcactcacgattcttagaaactctgataggccagcgcaggctcccctgggtaatgtcgagcatgggagcttttaaagtaggccagggttaccaaggggagtccgagacccaagttaggccttgtaaagcggggggtggggggggtggggggagcaaggcctctgtgtgactgcacaccaggcagtcctgcccattcttctgggaatagttcccattttatagacgagggaagctgagaagcagagaagtggcggaatacccccacagtgcaacagctgattaagagtgcaaccaagatttgcacttgagtctggacttcagaacctgctcttctcctaattcttgatgctcccaggcctttctgttcctcaacccagagctggccccttcgttgctaccctgtcccatcctgtcacatacaggagaggtgccggcctgactgagcctcagcatcttcatctgtgaaatgggtcccccttccgcaccccatggccctcactgggcacttctgttgccagggtgcaggagctaatagattcgtgagcagctcttcacggcgttgagtgccctccatccacgtggaagggtggctgttagcttgattacagacgtcctggcagcttccgggaggcgaagtgtttaattgggggttttatttccagcaccagggtctgacttaatgaaatatcactgggcctcctggcatgcggccgcctggttgtctccgtgtattgactagactaagccaaacccttggctatgattggccaactcctcatagaccagataaagctgtgctgataaacagggttttgtccagaccacctacctccagccaagaagggcatttgggaaccatgggtttagccagttatccagctgtggcttttaatatttgatgttaatgagggctaactgacagatgaacttgcagtctgggcttctctgggacacagtgatctctttaaaccagagaggcacaccccccacacacacccaagctggccctcagcagagatcccagagctatgcaggctgtctgggggtcacaatggcatgtgtggaaatctaaacccaggtacctagccacgattgactcttgggtacaaccccagttgctaagttttgacttttggaggcagagagctgggagttagaatcctgcctgtgtgtcttcctatctccacgatcctgaacagacctcttggtgtctcagaggctcagtgttttcatctgtaaagtggggttaaccatgccaccctggtgaggtggctatgatgtctaaggtacagtaggttttcaaaacttgattctgtgagtaaatagccttcagcaagcacaatacatgcagggaggaagcctacaattgaacagtgcctcctgtgtgcacagtgcatggagggcacagtgcctactgtgtgcatggtgcatggagggtataagttactactgtgtgcacagtgcatataggggtcagtgcctactgtgtgcatggtacatatagggtacagggcctactgtgtgcactgtgtatgtaaggtacagtgcctactgtgtgcatggtgcctactgtatgctggggtttgtgccagctctagggagagtctactgctgtgttttctccattctcctttctcccaagcttccctctccctactctactccctatacccttccattcagacaggctgcagagcaggccctgatacttgttcattcccacaaaattggctcaggttcccattaccatcggggtgtatctatagccaaagacaggcttcttatctaccagaagactggactcccagaaagaattttaactatccaagcaccagaagcatttggggacctgaggatggccctctgagacactaaaatgagagcatgtgcctgccttccttcctcagccatttgtgagctccttagagatgcccccagtgctcaggtcacgacctgctgctggatgaggtgctatcagatcctcgggggtttgtcagagtctgaaaacgtaggttccaggccgaggagacggcttagttgataaagtgcttgctttaaagatcaagaggatctgagtttggattcccggcacgtaaaaggctgggtgtagtagggtgtgcctgcacaggggaggggctggctggtcagctaggttagcccaagggaactccatcttcagtgagagatcctgtcccaaaagtcaggtggctgtgggagaggcacctggcatccaccatcaactctggcctccgtgcacatatgcacatatgtacacacctatgtgtccctgcacacacatgcatgtgcaaaatgcagacacacacacatacacacacacagatacacacacaacacacacatatacacacagacacacaaacgcacagatacacatataacacatgcatatacacacagagagacacacacacacagacatacagacacacacacgtgcgaggttcttcttacactggtaacactacaaagcttatttatttcaataaattccccctcctcaagagggaaccctgcttcagggagtattcatgaagggaagagagaaagaagagaggtgtgaagactgggcagactgggtgctgggtggcagggttggtgttgagaataaggcctgattgacaagcacatgattgcactggaagagggttgttacaggacccacaggaagtctccttgacacataacaatggtctcagaaattgggaaattgggtttcttcactgaaagtctacccctggaggcaggggtcccttgggtgtgcctcccacagggtacatctgctactctgccatatgtattatgtatatatgcgtatatgcatatgtatatatgcatataggtatatatgatgtatataggacatatatgtatatataatgtatatgctgcatatattatatgtgatgtatatgtgtatatgcacacgtgtatatatacatatatatgtttgtttatgtgtatatatgtgtatatatgcattgtgtatgtgtgtatatgtgtgtatatatgtatatgtgaattaatcagccttttcttactgacaatatcttcaccttaacactcaccagccatggccaccaagggctctgagtgacttctgtattctccccattcctttccacagtacctgccacacacagcccacagctggtccttcaagtcttttgccctttaaaatatttgtattacatttatttgctcatttaggggaggcactgtgacagcatccgtgtggaggtcagaggacagctcgtagaagttggttccttcctcctctcatgtgagtcccagagatcgaacttggggcagcaggcttggtagcaggcatctctacctactgatctatcttgccaattcaagtcatttgtcttttgtttgtttgtttttcaagacagggtttctctgtgtagccctggctgtcctggaattcactttgtagaccaggctggcctcgaactcagaaatctgcctgcctctgcctcccaactgctgggatcttctacagtcagccgttgactttggcagtcctcctcactctcctgtgctaatacccctccttcaactgcttggttgctgacttccacccctgttccttggcgttgctgatagacttacgttctcctgtagggaggcaatgattgaggcctttcctaggcacagtgagcactctgctgtctgctgctcttacatggagtctggggcaaaaaaaatcgctcctcttcatcatctccctagaaaggtccacagtaggacgtagtgggttggcctaatgtcatttgtattctaatgttaatttgggtcccccaaaactgtttgccccaaagactagagagtctgtacgtaagacactgagggacagtgcccccagctaattctgattggtaaataatgacgtcagcggctaatagctggggagaagagacataggtcggggttaggtttcccaggtttgaggccaccatgagaaggggagaggaaaagccaccatatgatagagaggatgttcaggagaggagaaaggagtgacaccatgagctagaggccaagagaacgtggctcagagggctgcctaattggagctaagagcagcccagatgaagcagtgaataataacatggattgtggagaggaggtagattctaacagcatggagggtaggcagccacccagctattgtgcggattaaggcataataaatataaaggctgtgtgcatgtctatcatctgggtatataaaccattaaggagggaaggaaccccatgctgggattttttaaatactttttaccacagccgggcatgattgggactcctcagaacctgagtgagtgtgaagaccacaggtgacagcccacccccagctctgtagaaagggtgtcaggcccctgtgggtttcccttcacgctgctcttctctgagagctgatggaaggtgttgccttctctcagagaagcaggtcttgaagagctgtgtccttcttgaatatagaacctgaggttacttgaaggagcaagctttgtttccccatctgaagggaaaatttccaagaatgatagctataacagtaccatgagactttgtgttccttttagaggtctttaaaaaaaatctcctcaggctggggctccctgggcaggccatgtctcctcagactggggctccctgggcaggccatgtctcctcagactggggttccctgggcaggccatgtctcctcaaactggggctcctgggcaggccatgtctcctcagactggggatcctgggcaggccatgtctcctcaggctgggactccctgggcaggccatgtctcctcaaactgggggtcctgggcaggccatgtctcctcaggctgggactccctgggcaggccatgtctcctcaaactggggctcctgggcaggccatgtctcctcagactggggatcctgggcaggccatgtctcctcaggctgggactccctgggcagaccatgtctcctcaaactgggggtcctgggcaggccatgtctcttcagactggggctccctcagtagaggttgcttaacttccagtctcaggagttgagtaccagctttgttcttagacctttctatccgtcaaagaatataggagggcaagggacccgagtcaggaagatcagaatcacggagggtgactgtgattggcaggaccccttctgcccggcaccagaccttgtcgatcatgtgatttgaggcaggaggataggacatagtcccaaaatatatttatcttgtctaaaagatacagattcactcaactgtgtctttgggtggctaggagaaatagctgagagtggctgggtcacccttattttggtgataccttcttgtatgcctggatcgtaatgggtgctgtgtgcatgcgtgtgtgcatgcatttgtgtgtgtgtgtgtgtgtgtgtgtgtgtgtgtgtgtgcatgtgtgtgtgtggtgtggtgtgtgtgtgtgtgtgtttgtgtgtgtgtgtgtgtgtgcatgcatttgtgtgtgtgtgtgtgtgtgtggtgtgtgtgtgtgtgtgtttgtgtgtgtgtgtgtggtgtgtgtgtgtgtgtgtgtgtgtgtgtgtgtggtgtggtgtgtgtgtgggggtgtgtggtgtgtgtgtgagtgtggtgtgtggtggtgtgtgtgtgtgtgtgtgtttgtgtgtgtggtgtggggtgtgtgtgtgtgtgtgtgtgggtgtgtgtgtgtgtgtgggtgcatgcgattcctgttactaactcagaagagtcagctctaatggagcagggtgcccccaagagaggaaagaacaaagacaacattgggtgggctgctcatctctaggctgagcctcagatgtcctgtctcccttctcagtgctacaaggccatgtgtaccggttctgcacagctgagggtctctggctacataaggacaactccagcctgccctggagggacctgtcggagtgtgaagagtctaagcgaggggagagagtaagctgaagggttccgagcctgggaaggggcagctaggtccctgattcacagaagcagaggctctaggctttgggtggggcagttgctgtcacatcatcagtccccctgcttccagtgactttgtacccctgctatctggccaaaggtggtgagtactcaccttggatccaggtcgcaaacatcctggggccacgtccatgggtcattctctttttttattctggaatcccaagtggggccccagggcacctcacatccttagaccccagaatgaggcacttgggaggtgagtgtacatgcacacatatggcctgcaggccatgcacacatccccatgtccctttgtgcacacagaactttcctgaggaacagctcctgtccctgtacattatctacacagtggggtacgcactttctttctccgccttggtcatcgcttcagccatccttgttggcttcaggtaaggaggggctcaagactgggagggcagggctgcctcctgctccgttccttaatagaggaagttcaaaccaaagtaaccagagggtccttctcactagaactttctgaaaaacatgaggttgtaaacacacacagacacatacacagacacatagtacataccacacacacaccacaccacacacacacaccacacacacagcacatactacataccacacacaccacaccacacacttgcacaccacatacatcccacacacacatatacacataccacataccacacacacacacacacacacacacacatactactcacatgtgcacgcacatgcacatgcatgcacacacacacagacacatactacatcacacacacacacacacacacacacacacacacacacacacacactataacagtggatggtaagatgttgggaaattccaagaagtcccacccactattactaataataatcagtaactcagcatgagttttggaaagtctccgcgattagagattcttctgtcttgaagcttgttaactccagcatgcaagaacatgcaagaacagttccatagtggaagcatttgtctgagctcatgattttggagtgttcagtgtttggccacttggtctttcatgggattggctcctggccatgagactgtgtgttagagggagctgttcatctcctgacggccaggaggcagagaaggggagagactgaagattaagtgtacccttcagaggcaccctgcacagtgacttacttccttcaatttggctctgtcccctaaagtgttcaccactcccgagatagcaccacaaaccaaatctacacatctcagagatagctcccaatcaaatcgtatcagatattcttttattatgaatgatttcagagattcagaagtgtaagaggaaatacatatagaaataaatgcccataactaaggcattttgagctggggacacggctcagcagttaaagcacttgacacatcaatgtgaagaccagtttcagtcacataaatgcctgtgagtatggtggcttgcctctaattcagcttcagaaggccacgcaagacaggatctccagagagcttgctaaccaggctagccatatcacaaagtagcacatgccaggtgtgctggcaaacatctctagtccagcacctaggtcatggcaggaggattgtcacaagctggaggccagtctaggttatatatagtttcaggctagcctaagctacagaacaaagcaaaggacagccatctagtccccatgcccaccccccacccccacaagagctgattcttgctcgttaagggcataattcccactctttctcgttaccttgcgcccctttgccaagtgtctataacaacacacaggtggtccactgatacttttaagtgtttgtatcctgctgtggtttccaggggtggaaatccatctttacgttctcatgagagccattcaggtagtgccattttttatgtgttttgtggatttttctctctgttcacaaagcttaaaaaacaacgggactctcctgtgattcttgcctgtgcatttcctttgggcgtacccacagatgtaaaaatgccaccagtaaccaaccacctggccttcagtgtttggttaactagtgttaggttgcttcccaggtggccgctgccaagtggcactctggccacccagtgaagaaggttccctgagcttcataccacacccacatttagcattttcagaattaagcaatgctaacctataaagcatgtaaaagaccgtatgattgtagcttgcttatctttgacccttggagagattaagtgggtcaaaacaaaggttaaaggtcaggggtagtataggtagtcaactggccctttcctataatcccagtacgtttttgtttgttttgggttttttcttttcatattttagtctatgagttgctttgttcactgccttttttaaaaaaatagtttatgccaggcagtggtggtgcacgcctttaatcccagcacttgggaggcagaggcaggcagatttctgagttcgaggccagcctggtctacagagtgagttccaggacagccagagctgcacagagaaaccctgtctcaaaaaacccaaattaaaaatgtgtttatttggcttgttatagccatttatctggatattaacctacttaatagtgggcattcttaatctaagctttaagtgttaatgagacacaatttatgcttattcgtcattctatggtgcctttttcacaggcattctacatttaaggaaacaaaagtggtcagtcaccaagtttattgataagtaaagcatatcaataggaactattgcataacaaaagttaattttatcaatcgagaggcactatttttttccactgaagatgccgcaagggtccccagatttgtaaggtggtctctgtcatttacaattcttttctgttggtctgtttagctaccctagtcctgaacacagcaccttgtctcctaaagatttaatagaaatgtaaggcctcagaccagcaagttgactcagctagtaaaggctcctgctgccaagcccgatggcccgagtctgttcctgggatctacagtgaaggaaagagctgactcttccaaatttagtcccagacttctggtgggcatacaagtgttcaggcatgcgtggtccaaaacacacacacacacacacacacacacacacacacacacacacacacactcacatatgcacatacaataaaccaattaatgtaataaaatgtttttttaaatgacaaataaaaataaatcctaactctctggccgcagagatagcccagtggattaaacatttgattctcactgtgagaacctgggttcgaatccctggaacccatgaaaagccacatatggttgtgggcatgtgtttgtggcctggtgctcctgcagaggcacagaaagcagagatagcagtaaccaaggaagctcaggggttggccagcctgatgtggggagtggtagacaaaagattctgtctcaaacaggacaggaggggaggattaacaccccgagttgtcctctggcctctgcacatgcactcacacacatgaacatgcacacatatgtgtacttacacacagaggcatcctggctctctgaaggcagagactcctatgttgtgattccttttgcatgttgattattttgagacagagtctcatggaatctgggctagccttgaacttactctgtatagctgaggctagccttgaactcctaattcccctgcctccactttcctaagtgctgggattatagagtgtaccatcatggccagctgagcgttgttgttttgctgaaaccctgtcttgccttgtagcctagacttgcctcaaactcctgatcccctgcctctgcctcccgtgtgctgggattataggaaagggccacttgactgcctacactatccctgacctttagctattctttgtaaatcttttcagtaccctgaaaaaagttgacattttattgcagctgtttgaattcattattcaccataggctagtggcatctctgttcttgagtgtggtgtgactgtgtatcttccatgaacttaagacttctctagcaattttgagccaagtttatcatattgtccacaatgaccttacccatcctcttgttagagatcgtttctgaaaatcaaatagaatctatgaacaagtcttccatttctttttattgcttattgctagaatgtgttagggaacccactgctgggacccttgagacattatagttcatccagacattgttctggtgttcctctgaagatttcatctgtaagccataaccagctctggttcacctcttctgtggccctgttgtagggtgagactgtaaatagtcagtagcggtgacacatccttgcttggctgctgaatttgaagtcgccgagttcctccgttaagaatgatgttggcttttgcttgggaggtagcctttatcaaatgaagtacccttggattcccagtttgccatacagttgtgtgtgtgtgtatgtgtgtacacgtatgtgctcttcacatagattgcataccaaacatggaagcagaagagaaacatcaggtgtcccactctgtcactctcagagcgacatactttttccatatttgcttgagaacaggatctctcactgaacatagagctgggctggccgccagcaaacccagcagtcggtcttttttttttttttttttgattgagtgagtattctgctgcatgtacacccaaataccagaagagggcatcagattgccttatagatggtcatgagccaccatgtggttgctgggaattgaactcgggacctgtggaagaacagccagtggttaagctcttaactggttgagccatctcaccagccatcccagtggtcttctgttccctatgccccagccccaccccagtgctgaggttacaggtgtgccggcttgcttttccacaggactgctggggatccgaactgaggtcctcacgcctgcacagctaactctcaccccctgagccatctcctcagctctgctacatatttttccctgagaggatacattgtacccatttccttttgaattcccactgtgtgcctagagttactctgccccagagaacagtctagaaacatcctgtcctaaagaatcaactctcccaggggaagactgatcctgacacatatgttgctttggttacacataactatgaaagatggcaccacagcaaggggtggaagtgagccgtgactaccaagttgagggcctcgtagacgggcagggcatcagagattttcaaggttgtgaggaagaaagacattctcagaggaaggaagatttgagcatattcccagaggtggatacatgcctgatgtgtatgtatgtgggctgaccagagaactggtactggctgaagagccagtgttggctgtcatgccaggaacgggctctgttttctcccttagacacttgcactgcaccaggaactacatccacctgaacctgtttgcatccttcatcctccgagcactgtccgtcttcatcaaagatgctgccctcaagtggatgtatagcacggctgcccagcaacaccagtgggatgggctcctctcctatcaggtgggtggtgcagcctggggagcctgggaggggagggcattggtcagagtctactacataaccattagatggaaaaaagcaaaagtagcccagatgtgaccttagggagtcactgtatgataggagaggcagtccataatggagaatccctagtgttatgggaaactcctagtctgatggcagaggcagtacacaatggggagcccctagtgtgatgagagaggcagtctaacttggatagtcctagttagatgggagaaggcaatacaccatgggagtacaccctagtctgatgtgagaggccgtctaccctgacaggcctagtttgatgagactgaacagcttaagaagcccctagtctgatggagaagacactctaccatggagagtccctagtgttatgggagaggaagttcaacacatggagcccctagtctgatggaagagaaagtccattgtggggagcccctagtctgatggaggaggcagtccacctggggcaggtaagagtctctgccatagggagttcagtctgatacggggagttctctggatgcagacctgagtttgagtctcagctctaccttgtactggttgcatactagtccagacacatcccatgacttctccagggctcagttctcctcccagcatggggacaatagcaggtgctttcttctcaaaagaaagagggttcaatgacccagagcagagagagttcccagtagtgaccctggccatatgaaagctccttcaccccatgttaaccatggtaggacagtggccaggccaggccatcgaggactgacaagtggggcaagaggcagggctactgttcccatgggacctttctttgcccctaggactctctaggctgccgactggtgttcctgctcatgcagtactgcgtggcagccaactactactggttgctggtggaaggcgtgtatctatacacactgctggccttctcggtgttctcggagcagcgcatcttcaagctgtatctgagcataggctggggtaaggcccacagttgttcaccttacaaccttcatggagacctgcagcaagggctggaagaccccaccctaccatatatatatgtatatatatatatgtatatacacacacatacatatatatacatatatatacatatatatacacatgtttatgtgtgtgtgtatatatatatcatacaccatataccacatatcatataccataatctcatatcatatatcatatgtttatattatatatgtaatatatggcatctacatttttcttagtaaatgccattctcatatggccaaatatcacccccagccccaccacaccactagaagtcaggacactgtcctcacatacctcttctcctgaggtcctactggagagtacttcatacccagtgcagggcaatcagaggtcctgtgggagatgctacatcctgggcctcacagtgggcaaggggtatgcaagtgaacagggtacgggctaacataggataccattgtgatgatgaagcaaaggactctggggtgagccaagctgggaggggtggccgacaaagaaaaaggtgaactgtggatgtgcctggagcccagctggaaaggttctagccaaaaaagtctactgagaaccatcaggtctttttttggctggaacatttctggttgtttttctacctctcgatgtatgggggtctcatggaggatggggagggttgcaatttggttgggatgaggagacagatgagggcaacccctcctagagggatcagtgggtaggtattgggtcacaagaggctcctagcttcctggctctgggccttgtcgtctacttgtcaaatgcaggtcttagcttctgctttcccactcagtccgctgctgattctgctgagagacttagatctctatacagataaaagtggccctgatttcagcatacagagatccctgatggtccctgtccttcctcttcctccaagacccagcccattctactagatctttccttccttcctaaccctctctatcctgccaggcaaccccatcaggtggggcatctggagagtgagtcctgatgctccctgggggtgggtccagggacagaccattaaggaactcagggaagggcttcctctgtgtgggggacaaatagtgtctgtccattctgggaaataacatcagtgctgtttgtatctgtcaccatagcaacccaagggcaggaccaaccaaagggatgtgtacagaaaagcagggagttggtaggggtcagtggaaacagaggatgctctggagttctcaaaggagatggggaagggtgccaggtctttcttgcctatccttgctcagggctcagaacccttgggggcttctttcccaaccagaacatcttttttgggggggaagtgaggtagagagaagaagggtccgagggaagacaagagtcacagagacctgcccaagtcaggatgctgcaaagcagctgtgcagctgaactgatgaaatgcagcctgcaaggattatgtcatcttggccgctggttgggctatgctcctgtttctttaccttgtttaccagatgttaacgaatggatgaagctcaccaggggtagctagcggtgtgagcaagctctctcatactggagtgaggtctcagagagaaagaacaactgctgaagcaggacacacagctggaagttcctgtacatgagtggcctaagaaattgtgtgttcttgtctagagagcttcccttttcttgttgatatatttattccatccctactgggcatactctatggggcagggtctacactatgccccacccccctcctaggtctccccattatctgttcagttccatgaagacctagttataaaacatcatgggtgttggaatggctggtctgtgtaaaaataaacagaatggggagagatagctcccttgatgaacatacttagtacccagtcatgaggatgggagttcaagtcctcagaactcccacaaagaagctgtgaaagatgctggggagacagaaggatgctcaggacttcctggccaatcagtttaacctaattagtaaaccccaggttccagtgggagaccgtgactcaaaaatacaagatagcagatccttaggaatcacctgagatcgtcctctggccctcacatgcatggccatggtcacttttgtacacttaccctcaaacatagacagggacacacgcgcgcgcgcgtgcacacacacacacacacacacacacacacacacatgcacgcatgcacacaataaatgtagtaaaacttttaaacaatagtaatagtaaactgagtaaatgggactgcatggagatctgatgggtgtgggccagctgtgcactgttgaaccccctgcctctgtgaatcatgagctagtgcagtgatccagacacaccagttgttcagcagctatgactgtgtgggacctggggacttaaggatactgaagatagatggtgactggaaatgtatacctgggagaatgtcccaacgccacatatgcatgtgtgtgagccctccaacacacacacacacacacacacacacacacacacacacacacacacacacgcatacaccttaatatgcacactgtgtcctacttcatacacccgcatgacccacttgagaaaggcataggtaagaggcaggtaatgagaatattgatgcagaaagtcattgagggtggctggagttacagtcctttcctcctgatctgtggcctcatctgccatgagagggagatcagcccacctgccagttaccagcacagaccaagctctgggatgaacaaggctcctgctctactctatggaccttagaaaccagctggattgtgtttccattcctgtataacaatgacctttgaactaagagcatcaaacttctaactcacagttcctgggctcaatactcttgagttcaacatagctgcgcatccctgactcagaatgtccagctggagctgtctgttagagttgctgtcatccagggcttagctaggggatctatttcactcatgaagctgtgggcaggagtcctcaattctgtactctaggacctctctgttggctgtcaaagacaacacttggtatgacaactgccccttccttcactcccccaacttagtgaagagagagagacagagacagaaacagagacagagacagagagcaagagaaactagagaactctataatcctagctcttaagaagtagatggagaaagatcagaagtttcgaggccacctttgatttcacagcaagttttaggccagtttgggctacttgagatcctgtctcatcaacaaccacaaaatttcaaatgccaagaggtcttaatccctgggaagcacccaagtggctatctataagctatattagtcacttttgcgttgctatcacaaaacacccggggcatggttatcataaagagaaaaggtttatgtgcaagatcaccattctgcaggttatgccaaagattagacagacccattactttggtcctcttgtgggggtgccatgttgtggtgatggggtgcatagagatgagaaaatcgctcacttcatgccagaagcaaaaatgagagactggatgggctagggtccccaaatctcctttggaaaggactgtccccagtccctatcttctgaagactccaacatctacaagtatcacaccaatgcttatctaaaccccagtgctcactgggaagcataaccactgtgtctgttgactgggtaggcttctgtgcaaccgggatgggggcatgtctgttttctaggcccaggacagttgcatgggggaaggaacagacactcaaaggagcttgtgggtcctgaaggagtggactgaggtagacagatgggctgaagacagggaggacggagcatcagagtttcttggtccccttcccataatgttgtacagatcctatgctacttgagggtctatcttgaggtctcacagccaagactttggaggcaaatcctggtagagggcctgatacatggagggtctggaccacaaagaagtcagtacgaaggatgtggagtgtgactgtgaaatcctgatcctccattctccccagcattcagccaccctgttttagggccaggaagggacagagacttggggcacgaggggtctggggtgtggagaggacctggtcactgtggcagcagctcggacctgccagctccgatctcctctctgtcttccctccttcttctaggagttccgctgctgttcgttatcccatgggggattgtcaagtatctctatgaggacgaggggtgagtgagcgtcctgctgcaggagagtgatgcgctagggtctcatgctgctcagttctgagagtcttgaaccctggagcatacgtttattgcctgtcaaggaggatccgtggggtcagcaggagtttagcgtatgagtcagtctctaatgtccactccctgaacctgtcatggcatggtaggatgatcaatatttctggccttcgtagtccatggtgcctccctgatgggttttatgaacatcggagttaatatcctgttgttctgtatatgaagctgggcgtgcatgtggctgtttgcagaggtccgtaaagatggggggaaggcatgggtggctctgtgagtggccatgtattgaggatttgggtagggggcggggcgtggactgcctttgcagggctcttcatggatctgcggcttcgtgtagtgctttgcttggcctcgtgcacatgtgccttgtcctgtcctagcccctgagggctctgtgattccagctggctgccttgtgtgcccctctcttcctctccagctgctggactaggaactccaatatgaactactggctcatcatccgattgcccattctctttgctatcggcgtaagtgacaggattggggggttggagcggaagctggtggacctggactgtgaccagactaatggctgggagagagactgagagctccgaaccctcccccctccactcatgtgttctgcaggtcaactttcttatcttcatccgtgtcatctgcatagtggtctccaaactgaaggctaatctcatgtgcaagactgacatcaaatgcaggtacattaaccaaggctacaggggcgccctcggccttcccttctggcacagagagaaactggggtgctctgtttggaaccctgcaaaatgctcttttccacccaggcctggtttataacccctaacctttcccctcactctattcttagcagcccctggacctttgaagtcttgacctctgcccccatcccccgcacccccagcagccagttcagggtatttcaatgaagcgtgttcatgactcagcagaaacagagagaggaggtatagacacagacaggaaagaacagtcagtctgtgcacacacgcagaatgaccccggtggtctcaccctctctccaggcttgccaagtccactctgactctcatcccccttctggggacacatgaagtcatctttgcctttgtgatggacgaacacgcccgaggaaccctacgcttcatcaagctgttcacagaactctccttcacttccttccaggtgacccaaacctggggccacttgcctgggatgtcccaaagtaagggaggggtgggcaccagcctgcatggtgcagacggagacctgggaaagcaagcctggccccgagtcacacagttggagcagagccagagagtgtccccaggtatttggacatattaatcagtcttctctggacgtccataagacacgaagacctcctaggtgtggacctgggtgtctgggagtctagagaaagaaagggccacccactagcgtcctgccaggcaattgatgcacacaatgcatttaattctcccaggactcacagttgagagattgcccccacttgacataactggaaactgaagcccagagatgttaaaacaagatttccagggtgtcatgtggcttttcctagggagacatgaacagacagacatctattcaccccagatagagtactgacagccaaccaaagaaatggtacaactgaagtccagttgaaccaatgagcttcttggggttggatacgggatcatgggaggctcaaagacagctccatcattgaaaagtccaccccaccatggctgataactcatggaagatgcagccccagatctccctgcacaatctctaggcagctccgcggagcagagtctcctctctgcaactgctgactgctcatataacccagtggaggggccttgtatctttctgaacttcctgagttttgtaagtcccaggatcttcctgggccttatgaatgtcctccctccttctaggaagaatgtcttaagtcagaagaggtagtgtaccacacaggcctcacacaggttcaaaacagggaattggtcctcttcactagcattagatgatgcaactgttactggagagatggctcagcagttttttagagtatttgatgctcttgcagaggactcaggcttggttcccagcatccctgtgttcatatataattgcctgttactccagcttcaggggataagatgccctggcctccaaggggtcctacacacacgaggtggatataaacatacacacacacacacacacacacacacacacgtacacacacaaattcatgcacatacacatatatgctcatgtatgcaagtacacacacagactcaaagatggacagacacacacacacacacacacacacacaaaatttattttggaagattaaaaagaaaacaacccacccttatctatcttcaagcctgcctgggatgccctgtctgaggagacgggtatcagaggctggttgtccagttgcttcctttgggctcccttcctgttaacatgcctcttgtttccagggcttgatggtggctatcctgtactgctttgtcaacaatgaggtaaggtctgaggagggatggtagggactctgtgggggctatgcagtgagggttcatgtagtcttcctagttgaaactgctggtcctttcactatggctgagatttaaggtgacatctggcctttatattattttctgtagtctcctcgccaacacacacacacacacacacacacacacacacacacacacacacacacaaatgaaaaaagagcttaggcatgacttagccttgcattaaagagttaatgttgactatttcaagcaggggtgtccaaccttctgaccttgccacatatcactgtcatccacaaatgatttgggctacattcggcgctgtcttaatatgcactcggccattaggctacaggttgggcacacctgatttattgcaaagtgattcgacacacatgtgtccaagccactctggtggcctctgcccacaagagctgttctccatacccagggttgccatggcaatgccaggtacttgtgacctgagaagatggcctgaacatttgtctcatgtggttgtcagggcctgcaccagctgctggttggtgggtagcagcggggacaggggaggggagggactggcgatgaattgactgtggcttgtgtcagaggccaaagtgaagtagccgaggtgccctgagggctcattctgttctgctctgccaagctgtgtgatgtcaggctaaccaccttgaggtcttttgctcttctacccaggggtcagtagaggtgagaaagatttaccaaacctggagaccaatctggtacttagtcagggagggcacttggaatgtgaaagggttaacattggatggtgcagatgccaggtcattcattcattcattcattcattcattgggttattagcacattagatggtactcatgccaggccagatcattcattcattcattcattcaatcactcattcattcattggggtattagcagtgtgtgtgtgtgtgtgtgtgtgtgtgtgtgtgagtgtgtgtgccatagatcacaggtgaaggtcagaggattgggggatttgattctccctctctcctgtgtaggttctgatgggccaactcaggccaccaggcttggtggcaaaagcctttacccaccaagccatctccccagccccagaatcattctttgttttacttctctcactgatcaacaagaggaccttgtgtgagaggcagattccttgagtggccattcatttgactcactgaagcagccggcagcgagagcccgctgtgtgctgagcactgtgctgggagcaggggtagtcagaggaggaagatgcagtcacgactgtcaagtgttctctgctgagtgggacggaggcatggccagagacctgctaggtgtctgggattggaatcaggctgcacctgggctctaatcctagctgagccctgggcaaacatttatatgttttcctctgcattatcaccttgacttgaagagtggtggctgcttccctaagttaaccaagatggtgcccctttttggctatgtatatatacaggtgtgtgcacatggatgtggaagctggaggctgtgccaagtgtctccctcagatacccccccccaccttgttttgagatagtgactctggctgaatacggagttcatcaattagttagaacctcagagatccacctgtctcccccccacctctccctaacaaacacccctccagcactgggcttattttgttttatgtgttaggaatgttttacctgcatgtatgtctgtggaccacgtgtatgtctggaggccagaggaaggcactggatccccctggagatggagctattgagggccaatggtattattgagccacatatggttgctgggactcgaacctggatcctctggaggggcagccagtagtcaggtcctctcctcacatttctgaattaatttagtggttcttgagaacaactctgatgaccgggcccaccatggaggctctgaaaaagtactaagggagcctggatggagggataccatgttctttaagtcctgctgctgggtttggctgcgccccagtgtatcagttttctttcccttcttccaagtggaagactgtaagagattgctttcctgcagctgtgcagaagggagccatctttgggctcaatgtctctctcccagctgtcagcactacacaagcccagctaggcaaggcagcgtctgttctacctccttccctcaccctccagggctgggctccacgacgccactgtctgggacaccaagacgccctggcaggcaggcaggcgctgggcaatcttagctccattcagcacagaagttcttgtaagggatggcttgtggccacacagagtgtctggctgggcttaaggcttgatgtatgacatggaaagagtagaaaaggagagtgtttgccttggggcaggtagaggcattggcagggagcctgttgcacacagctggccgatggcagccagccctcctgatggcttgggactaaaaggaacacagtccccagacagtgtgagatggaaagcctgtggcaaggagggaaaagcagacaacaagaatagctcccagaagaagagggacccagtcctcaggacgttccgtacagcttgtaacaaccctctctggagcccaagtcatagagctgtgatggagccaaggaccagggatggtgggcatcagatcagagcccttccgtgttctgtgtaactttctgccccagcagtctgatcctttagcatatacccagctgagaagtcccctcccttggggaacgcctgagctcaatgcaatggggaatctgagttggctgaactccgtaggcagattgtccagccaggctcccatcagtttctctgcatgggatggatccaaagccaggcacagaaattcccctcgctttcttcacatcttccctgacctgggaggttcagggactgagtggagatcagaagggaaatctgagcttgataattcacgattgtcattcccaccattcagggggcagagggaggagggtgaagagttcaaatccagcctaggctacctagtgagactttgctgtcagaaaagaaacaacaataaacccagacccgagtagaacaaaggaaaagcctcctcagggagtttagaccgctgggggggggggggtcctcatcagggttaggggtggggtgtgcctttccctttcaattgtccaagccacacagggagagccttttataaagcgagactccatcttctctggctcaacctcgctctcactctccacctcactctttctcttccgttgaataaaactgtgatggattgtaaaaggtacttagctgaatcactgaatttagagatagaaagggccaattaggtcatcaagcccatctctctccagaggagaggcagaaaataggagacaacaataaacaattttattgggatattaatttaggcgcctgaagaccttggctcgtgtcttgtaatataatccagtggattttttccccttctctgctaatgtaataacagggccattttgtgggcagttggtttgcctgatggcttttttttttcttctctctcttctttcccacggaaggtccagatggagtttcggaaatgctgggagcgctggaggctggagcacttgaatatccagagagactgcagcatgaagcccctcaagtgtcccaccagcagcgtcagcagtggggccacagtgggcagcagcgtgtacgcagccacctgccagagttcctacagctgagccccagtgccggtcctcctgtggtccttgcttctggctgggtggccatcccaggtgggagagatcctggggatagggaatgtgaaggacacaggcacaccacacacacacacacacacacacacacacacacacacacacacacaccatgctttctttctctaaacctatgaagcaggcaagtgggcagtgcctcctgggacctaaacacatgtcctccaaggagaacagcctgctaatttaatcaccgtggcaggaagagaggaagaaacaattgctgctaagatgaagaggacttcttcctgtttaaagccgcaagacccttggggttccattggacagaacagcaaatcaacccggactcacactcaagggcaattgctgatgggtggaattggggcttccgagaagaggccatgagagacctgcccttggaacctcagccagtccagagctcagcaaggtgagccggctgtgctgtgtgcatggctggggttgtcacctgcatcaatcagccttcctcccgacaagaggctttctctgtgcatctggattgctgacattcccccatctgcctgttcttctgatatcctgttgtttccttggggaggggaatttgttgaagtcataccgtgcagctctctctggtgttgaggagatgatgctcagaggtgttctttgcctggccctttaagccactttgctcttggcctctgcagtgcctagggtactagggcaggtcccacggtgagaagcccagatgtggggtgtggaccctcagttctgttgtaaagatgctcagataccctctagggttcatctaaaagatcccctagggggtgctgctgacatgaatgactctagagaaccaagggatccattgccaccacacctccacctcatctgtgaccagagtctatgacttggatgagaattagggtacatcctctgacttcagaggctatgatccagaagagactcttccactgaagccaaccccccctctgcctttgaaatcctcccactttgagcatatttagactttttcccttttttcttttgtgtctattcaaacgtataattctgatttctctcacccaatggaagaactagatcatggtttttgttatgtttgagggagtcaggggaaagtgattgatttgatccccctactgaagttaataagtaatgtctgtcccacctccagattcctcccacacataatgaacagcagatagagcaggatgtgggggtgggggtggaatatatcacacttgccccctccagccatggtgagaaggcttaaaggagacagcactgcagagacccaaacccaaagactgcctacctggggatgtaggcagtggcttcctagaggccaagaaagagtccagatctggagaagaatccttgttgtctcgacttcttttggggttggggtggctttaaatatattctctcatgaagctgatctctccctcaccctgtggagagtgggggaccttccccagtgcttacactagacacattatcctgtaccccttggagaggcacgaggcatgtatagaagataataacaggccataaaacatgccaagcagaaaataccttatccttcaagcttcaacagagggttgtgtctatgttaatagggaagtgggacctcaggctagagaaagcagtgcagcccgactgcctccttgatcaagacaatgagttgggtgggggaagtgggcccagggtcctttgcatcctaaggaaagggcaggttttccggtgggcacctctttcttgtttctactctgggaagagtggaaagacaagcatgggataaactgggaactttctagaaccattaattacacataagtgaaggggaaagacagatataatctgcctgaaataaattttccaagggaaagatgctgagagagtctaggcaacccagtgggagctttaatgtggagtttccccccctctctggaactctggattcttgggttcactgcaccccacattccaagactgttaatacacatttccctcccagattcttgatactgaagaagtctttgcctgtccctgagtccctgtactattaatgtttttttttttttttttttgaatggcaccacactccctctgagctctctgcaaacttgcctacgctaaatatagctcccccgggtctgggaacaatccgatgctatgtactctgaaattccactagctgtttacatgcctccggccataagtctaagcctggcacttgctgggaactctctgaccgccccgaccctttcctggggctactattgctagcctatcggatatatgaggcagctttgttggagacacacagccagcaggctcaagtggtggttatcaatgtttgatggcttcagcactctggccagctcccgggaacagagtaagggctgaaatctactcttcttctatcctcgtcagtctttgaatacctaaatcaccaaactttacaagtcacttaccctccaagactgccttctctttcgaatgactttggggagggcagacatgattacaagtgctccagcgctcctcatactgaagaccgcatgaatagagttctgggacattcggcaggcaggaaagatcctgacagttcctcctgactttggcctacagaagccaggagagagtcttgcaaggatttctggggtctacagcactaggctgccagggcagctggacctctggaaagcacatggtctttcaagacctgtcaagttcgagtccttgtgtgaccaaaagggaatactaaaggcggacccattccatggcaaagatgtgatgagaggaagctgggtgtgttttaaagtgtgctctactttccttgttcttagagttaagagaggaggactggagagatggttcagtggtcaagaatgtgaactcttggagaggaacaacatttagtttccagcacacacatcaggaagctcacagccctagtaacttcagggtacctgacacactctttcggcttccactgacacacacacacacacacacacacacacacacacacaccatacctgacaccttattttggccttgactggaaccagcacatttgtggcatacaaacacgtcacacaaacatacatatacacataaaaaaaaataaaatctgcaaaaccaaaatccatcggtgaaatacacatgagcagagaacaggggtaatgtttgagagcacagtcatgagattgtttaatgccttgtcttagatgtttttccagattcatctctttgtttgaaatatgctggtaggcacacaaaagtgactgaaagaaatgaaacggtgaccaggcacctcatctttccatctccagtgctccccgaattctggggaggtctcacagagcaccggatggtacagtgctctgaaggaccggtagagtctcgtcttcgctcatgcctgagctgactgagtttcaacccttcaaggcaaagagcactatgcgtgcctgtgtttgtcctgtgcattccagcccaaggtgaggagatgctggagttaggttcagccctcctccaccatgaaggtcaccaggcctgcacaagccagggtggggctggctgggagtctggcagatgtatccccgccatgcacggacagggctcccattatcgctaatggctgcgacgtgctcaggggaggcagaacatgtttcaaaggtttatattccatctgctgaattgattctaatctacagggctgactctactttgggctcctaggaagcaaacaattttttttctttgatcctcaataaaacacagggattgattctgctaagacagctatgcaaatagcatgttaaatattcaacagaaaggaaattagaatcaactctaatgtggtgagatgggtttccccctcaaccttttttttttttaatggctcaaatgagtttccttggtgagaaaaggggtccagtttgagaaacttctatcaacattaccatgtgtctatgctattgtctgcaacctgaaccgtttctctggtcctggggaagaccacatctggaagcaccattcaggaccagtgagatggatcggtgggtaaaagcacttgcctccaagccaaatggcccgagtttaatcctgcgtcccacgtgctagagagaattgactcccaacgttgtcttcttgaccttcgtgtgcatggagtgacatgcatgtccccccttccacatacacatacccacatagtaaataaataaatgtaatttaaaaagaaaatctaaaagaatggtaacagatgtgttgctttggaaaatattttcttaaataaagtagcatgggtgagtggcgtgatttcgagagctttccttagtgccgtggtgtgtttagggaatccatgattatttctgctttgctcatgggatgattggcaggaaacagatggagccaatggtaaattagaagagtagataagacacctcgttaggaaccacaaaaaatacgtcaacttttgctttgtcgttaagggcctcactgcatagcgcaggctggcctagaacgtccctgtctgcagatgaacaacaaacagaaggggtggtattttaaaaagtacattgaggcactggagagatggctccgtggttaagagcaccatctgctcttccagaggtcctgagttcaattcccagcaaccacatggtggctcacaaccctccataataggatctgaagccttcttcagatgtgtcagaagacagctacagtgtacttacatacatgaaataaataaatctttttaaaaaaaagtatattgaaaggacttgaagatcttttgggtatacttaggaaggcgcacataacagaaggaggagaggctgggctggtgagatggctcagcagctaagagcatttgctggtgtgctagcagactggggtttcattcccagccctggcttggtggctcataaccatccaacaggcatgcatgtggtgtatacatacacatgcagacgaaaccttcatacagtaaaaataaatacatctaaagggggaaaaaagacaagatcaaagcagaaaaccacgggtggtggctgctatctgtaatctgggtacttgtaaggataagccaagaggattgcctagtgtgggctagagtaagacttgttgtgatggtttgaatatatttgacccagagagtggcgctattaggaagtatggccttgttggagcaggtgtatcactgtgggcacgggctttaagaacctcatcctagctgcctagaagccagcattctgctagaagccttaagatggaggtgtagaactctcagctcctcctgcaccatgcctgcctggatgctgccatgctcccaccttgatgataatgaactgaacctctgaacctgtaagccagccccaattaaatatggtccttaaaaagaattgcctcggtcatggtgtctgttcatagcagtaaaaccctaactaagactcctggtctctacagaacaaaacaaagcccacagaattgaagatgctgaagtgttttagacagctgacagaatagcactggcatacttttgaggcaggaagagagttgtctgtgggactccctgagaacccgctagccacaatggcccatgggagcagggaagctatcttcactctcctcttcttcaaggccaactcctagtcccctccccagctcagaaacaaactacctgccatggcttcctctttctctatgccccatccttgggagaccaccagatcctggtggcacagcctgcttccacttcctgtagaccccctcggtttaaccactctaccccatccccattcctgagtatcagctcccaatacttagaagcatattctacgtggaaaccccagtggccccacctggcaggatctcagaagcattttctaccacgcaacccacagccaccacactctcctaaaaaaccagagaaggcaacagacaccagtgagtggagagcccacccaacaaagacaagaacagagatcagcacctagacgtacaatcatcccaaactcagatgcctagatgtcagcataaaaacgggatcaataatagccagggaagtatgtctcttctacagcccagcagtcctaccacagcaggctctgagacaggcactatagctccagaacagggcaaggacttcaaaatagcctttaggaacaggaaactcagaggcaagcctccacaaaagaaagcaagagatgggagagagagcctcaggcattgaagacctggtagaagaaatagacatcttggtcaaagaaaatgttaaatctaaaataaataaataaataaaaaattcaggcacaaaacatccaggaaatctaggacactacgaaaagaccaaacccatgactaacagaaagagaggaaggtgaagaaacccaggtcaaagacacaggaaagattttccacaaaagcatagaaaacaatgtcccgcagctaaagaaggaggtgcatcaaggtacaagaagcaaaaggaaccccaaatagactggaccacaaatagaaatctcttatggcacagaatgatcaaaacaccaagtgttcagaataaagagcaaacactcaaaacagcaagggaaaaaaaccaaataacatataagggcagatctattagaataacacctgacttttcaattgagactctaagagccagaagggcctggacagatgttctatagactctaaagagagcacaggtgccagcccagactactatactcagcgaagtctacaatcactgtaaagaaagatgttccgtgatataaaaacaaacaaactcaggcagtgtctatttataaatctagccctacagaaggtgcaagaaggaagacttcaacctgaaaacacccttgaaaatgcaaagaataatgtcagactagcaaattaaaagagggggagacccatagtacagcaaaatagcaggaatcagcaaaggttgcccactggtttactgtcaacatcaatggtctctgttcctccagaaaaagacacagacagagtggatgtgaaaacaggacccagcatccttaagaaaatacaccttattgtcaaggatagacatgacctcagggtaaaagaatggaaagacatattccaaggaaatggacctaagaaacaaaccagcatagccacttcgatatctgacaacatagacttcaaaccaaagctaatataaagggatagagaagaacattctagactcatcagaggaaaaacccaccaagaggatattacaatttttatcatctacacaccaaacacaagggcccccaagttcataaaagaaacactactacagctgaggtcacatattgaccctcatacattgatagggggtgacttcaataccccacacttaccaatagacaggtcatccagacaaaacctaacagagaaatgctgtagccaactgatgccataaaccgagtggacctaatagatgttcacagagcgtttcacccagccacacaggaatatgccttcttttctgcatctcacggaactttgtccaaaattgaccacatacttagtcgcaaagtgagtctcaacagatgcaagaaaattgaaactacgccctgcatcttatctgactaccatagatttaaagttggactttaataaagacagaaacaataaaaagcttatgaactgttagaaactgaacaactccttacagagtaaaaaacaggtcaagacgaaagttaaaacttcctagagtcagatgaaaataaaaacacaacctactgaacttacaggacacggtagcggcagttttaaatgacaagttcatcgcactgagtgcgttctgaaatgctcagtttccaattttttctcacatgtatatgacccatatagggttatgacccacagtcttaaagctgggtctgacaaagccacacatcaagatctgtcccagaccgtctgaaaagattgcgggacgtctgttcaagtcgatacatcttagccacacaggactcaagaaagcacctgcttccccggctcctctggtgtgccagctatgtgatcctcccagttgccctgtggaagacgagaatctggaggtatagacctgcaatcccagctactggggaggggggggggcaaggcttgtggatcccagtgtggtcaaggcatgcttgggctggagagtgaaatccaaggccgtcctaggtatcttagtgagacttcatctcacaggaaggtcaaagcgggctggtgatacacaacagctgattaagtgctcgaagggctcgcctaggatgtaggaggctctaggttaaatgctgctatcaggaataaacagacaagaaacaaaaaagctagccttcttctcctctgtcccatgcacaaccctgccatccttcttaaaaaaaaaaaaaaaagccacgtcataattttgtctgcactgctttaaatatttacagtgaccacatgagcttgattggcagctggaacatctgtcgtagtaccggtccctcttctttcttaactagctgtctttttgtttaggctagccacagaaaccttccatgtccctctttcttaacagtcagtctgcagccaccaataccatggcacaggtagcttctccatcctttacggtcagcaggaacacgcatcccggacacccacatggtctctggtgacaacaggtgtcccagacctccgcatggtctccaatggcagtacataccccagacaccaacataccctctgatactgcatggccccaggcaccattatagccctgggcataagcacaggcctttcacatcaatggactagacattaccacagcctaaggggccaagcaggctactcaaatcaatatagcctcccggaggcagcatagccaagggacgtcaacatgggccatgcatgtcagcatggatttgttcactgtagcattagagacatcccaggcagctttgtatgcaaatgttcattgcagtgagttgttggtctggttggcttctgaagcaccataaatacgaaatcattgctgagattcctctcagatatcctgctgttgggcagagtcaggatgatgtagcagttaggcagagggtccgagtgctggttctgtgcaatctcctgactgctgctcacctccctgcccttgatgtttgccaccccgaggctcaccagactcggttctcgtgcttggaggctgtgggcagctgccctgcattctcccagggcaagcagctcaggcctctgcaacagcgaggtgcttgctgaagcgcgtaggaccagctcatttcagttaccacgcgtttccaagggagctcaaggccgctgcacaccaccctgtactctatgccgacagatcggctcaccaggcatgactgttgagcttgtaggctgtgggctgaacggctgcctgcttcctctatctcccagtagggtacgcagcataggcagaggccctggtgggagctggctggcgagcctacgtggtttggacgtgtgtctgtcgagctgcacatctccctgacgccagtgctggcagtcccgggactcctcagcaacgacttttgtgcttgcaggctgagacgtggtagcagagggtatagattcatcatttcccacgtggggctccattccaccgtctttccgtccgatttggtgagtccacattctaaaagcatcttcccataagactgccgcctcgccctgcccccccccacgccccatttattgcggggggacctgcagacaccttttctgccaccgcatctcccttcgtgggtctctcagactccgcggagctctgcggtggatgctggcagctgctgccatcttttattttccacatttagtttatttttgactatgaaggtaactgtgtgcttgtgtgtgggtatatgcacatgaatgcccatgacagagaccagaaatgcctgtgagatctctcagagctgaacttagaaacagtgcgaacagcctgatgcaggtgctggaaactgaacccaggtcctgtcctctgaaaaaaagctcatgctcgccatctcagagccacatctgtgctctgtgattaattagtcacacgccgattccagccttgctttctaaggggctgtcagcctagcttcctctataatgatagacttacccctgagcccttgggacaaggatgtagatgttagaagttttgagatccgtgcttgaggatgggatgtgaagggaaggttagattatgaagaagcatgggacattttggggaagaatagctatatttatttgattgtaaatatgggttttatgcatacagcaaaattcatcaaattgtgacaatatatcgtggcatgtcaattacattccaatgaagcttcaaaaatataaagaaaggtgaatatatatatatatatatccattaaatgaataaatccattataggaataaatccattaaatctccatataattaagttgatccacctatgttcatagcaagtccatggggaaacagtcattctggagaaatgtcctcagtagtcctgatagaaatgcaaactgccgcagtctctctcaggagaaatcagtaacacaaatggcaaatatcttttgcctcgggctacttttcaagaatctgagctgagagccaaagctgtagctcagcaacagatacctgtctacctgcccagcatgagtgaggcccggggttcaattcccagtatgagagagagggagagagagagagagagagagagagagagagagagggagagggagagggagagagagagagagagaaacatgccgaatgcacacagtcaaaaacacaaatgatgcctatacaaaagtgttcattcacgtgtcgcttgtaagagcaaaggaataatgtccaccgatggcaggacagctgctaagtgaagctctacgcagttgaagagagacaagagcaccacggagaggctctgagagatgatgactcagtagctaagagcaaacaccaaacaccgctcttacaggtgacctgagttcaattccgagcatccacctctgtctcaggggatccgacacgctcttctagtctctacaggcactgtgctcacatgggcacatcctcactcacaggcacacataaccgcaagtaaaacaagcctttgaaaagcactgctgtggacttgcccaccaggtgtgccatcgagtggaaatacctggtgaaacgacaggtacatcacattcctgccaatgctgcatatctggattaaggcagtggctgcaggtaaatcttcactgagctgtgcattcgagataaatgtgcttcatgcacaaggtgcatctctgcgaggttttccctacttagaaagaggtaaaggagtgagaggaaccagggaaacacagacagtaggcatgtgggctgtggaaaggaagggatttatgaagtgacgggaaagagttctttctttccctccctccttccctgccttctccccccaccccttgggaagaccaaagcatgtctaaaagccaacgactgatgagaagatcagtcaaactaagatttagctacatacacgtgatgatagacacctgcaatcccagtccttgggagatgaaggcagaataaacgttgtgtttgaagcaaacctgggctacatagccagttccaggccatcctgggctacgtagtgagattctaactccaaaacaaaacaacaaagagaggaagagagttctcataagagaacgcagaggtagaatcaggaagacgcaccctaggagactgggaaggtgggagagtccaagtacgagcagggcttagatacagagggacatccccactgtcccaagcacagaaggggaggaaggggacggcacagaaggctcacgggattgagaacagcacatatagttgtcttccataaatgtgctacatggcttgaggtaggaacagagtggaagtagattttagaaaggggaaatatttgaaatagtcattcaggaagtaggataggaagggaatgtagaagctagttagatactgagtccttatccagatggtcacatgactttc

SEQ ID NO: 32 - DNA, 58644 bp, Mus musculus
gaaagtcatgtgaccatctggataaggactcagtatctaactagcttctacattcccttcctatcctacttcctgaatgactatttcaaatatttcccctttctaaaatctacttccactctgttcctacctcaagccatgtagcacatttatggaagacaactatatgtgctgttctcaatcccgtgagccttctgtgccgtccccttcctccccttctgtgcttgggacagtggggatgtccctctgtatctaagccctgctcgtacttggactctcccaccttcccagtctcctagggtgcgtcttcctgattctacctctgcgttctcttatgagaactctcttcctctctttgttgttttgttttggagttagaatctcactacgtagcccaggatggcctggaactggctatgtagcccaggtttgcttcaaacacaacgtttattctgccttcatctcccaaggactgggattgcaggtgtctatcatcacgtgtatgtagctaaatcttagtttgactgatcttctcatcagtcgttggcttttagacatgctttggtcttcccaaggggtggggggagaaggcagggaaggagggagggaaagaaagaactctttcccgtcacttcataaatcccttcctttccacagcccacatgcctactgtctgtgtttccctggttcctctcactcctttacctctttctaagtagggaaaacctcgcagagatgcaccttgtgcatgaagcacatttatctcgaatgcacagctcagtgaagatttacctgcagccactgccttaatccagatatgcagcattggcaggaatgtgatgtacctgtcgtttcaccaggtatttccactcgatggcacacctggtgggcaagtccacagcagtgcttttcaaaggcttgttttacttgcggttatgtgtgcctgtgagtgaggatgtgcccatgtgagcacagtgcctgtagagactagaagagcgtgtcggatcccctgagacagaggtggatgctcggaattgaactcaggtcacctgtaagagcggtgtttggtgtttgctcttagctactgagtcatcatctctcagagcctctccgtggtgctcttgtctctcttcaactgcgtagagcttcacttagcagctgtcctgccatcggtggacattattcctttgctcttacaagcgacacgtgaatgaacacttttgtataggcatcatttgtgtttttgactgtgtgcattcggcatgtttctctctctctctctctccctctccctctccctctctctctctctctctctctctctctctctctccctctctctcatactgggaattgaaccccgggcctcactcatgctgggcaggtagacaggtatctgttgctgagctacagctttggctctcagctcagattcttgaaaagtagcccgaggcaaaagatatttgccatttgtgttactgatttctcctgagagagactgcggcagtttgcatttctatcaggactactgaggacatttctccagaatgactgtttccccatggacttgctatgaacataggtggatcaacttaattatatggagatttaatggatttattcctataatggatttattcatttaatggatatatatatatatatattcacctttctttatatttttgaagcttcattggaatgtaattgacatgccacgatatattgtcacaatttgatgaattttgctgtatgcataaaacccatatttacaatcaaataaatatagctattcttccccaaaatgtcccatgcttcttcataatctaaccttcccttcacatcccatcctcaagcacggatctcaaaacttctaacatctacatccttgtcccaagggctcaggggtaagtctatcattatagaggaagctaggctgacagccccttagaaagcaaggctggaatcggcgtgtgactaattaatcacagagcacagatgtggctctgagatggcgagcatgagctttttttcagaggacaggacctgggttcagtttccagcacctgcatcaggctgttcgcactgtttctaagttcagctctgagagatctcacaggcatttctggtctctgtcatgggcattcatgtgcatatacccacacacaagcacacagttaccttcatagtcaaaaataaactaaatgtggaaaataaaagatggcagcagctgccagcatccaccgcagagctccgcggagtctgagagacccacgaagggagatgcggtggcagaaaaggtgtctgcaggtccccccgcaataaatggggcgtgggggggggcagggcgaggcggcagtcttatgggaagatgcttttagaatgtggactcaccaaatcggacggaaagacggtggaatggagccccacgtgggaaatgatgaatctataccctctgctaccacgtctcagcctgcaagcacaaaagtcgttgctgaggagtcccgggactgccagcactggcgtcagggagatgtgcagctcgacagacacacgtccaaaccacgtaggctcgccagccagctcccaccagggcctctgcctatgctgcgtaccctactgggagatagaggaagcaggcagccgttcagcccacagcctacaagctcaacagtcatgcctggtgagccgatctgtcggcatagagtacagggtggtgtgcagcggccttgagctcccttggaaacgcgtggtaactgaaatgagctggtcctacgcgcttcagcaagcacctcgctgttgcagaggcctgagctgcttgccctgggagaatgcagggcagctgcccacagcctccaagcacgagaaccgagtctggtgagcctcggggtggcaaacatcaagggcagggaggtgagcagcagtcaggagattgcacagaaccagcactcggaccctctgcctaactgctacatcatcctgactctgcccaacagcaggatatctgagaggaatctcagcaatgatttcgtatttatggtgcttcagaagccaaccagaccaacaactcactgcaatgaacatttgcatacaaagctgcctgggatgtctctaatgctacagtgaacaaatccatgctgacatgcatggcccatgttgacgtcccttggctatgctgcctccgggaggctatattgatttgagtagcctgcttggccccttaggctgtggtaatgtctagtccattgatgtgaaaggcctgtgcttatgcccagggctataatggtgcctggggccatgcagtatcagagggtatgttggtgtctggggtatgtactgccattggagaccatgcggaggtctgggacacctgttgtcaccagagaccatgtgggtgtccgggatgcgtgttcctgctgaccgtaaaggatggagaagctacctgtgccatggtattggtggctgcagactgactgttaagaaagagggacatggaaggtttctgtggctagcctaaacaaaaagacagctagttaagaaagaagagggaccggtactacgacagatgttccagctgccaatcaagctcatgtggtcactgtaaatatttaaagcagtgcagacaaaattatgacgtggcttttttttttttttttaagaaggatggcagggttgtgcatgggacagaggagaagaaggctagcttttttgtttcttgtctgtttattcctgatagcagcatttaacctagagcctcctacatcctaggcgagcccttcgagcacttaatcagctgttgtgtatcaccagcccgctttgaccttcctgtgagatgaagtctcactaagatacctaggacggccttggatttcactctccagcccaagcatgccttgaccacactgggatccacaagccttgcccccccccctccccagtagctgggattgcaggtctatacctccagattctcgtcttccacagggcaactgggaggatcacatagctggcacaccagaggagccggggaagcaggtgctttcttgagtcctgtgtggctaagatgtatcgacttgaacagacgtcccgcaatcttttcagacggtctgggacagatcttgatgtgtggctttgtcagacccagctttaagactgtgggtcataaccctatatgggtcatatacatgtgagaaaaaattggaaactgagcatttcagaacgcactcagtgcgatgaacttgtcatttaaaactgccgctaccgtgtcctgtaagttcagtaggttgtgtttttattttcatctgactctaggaagttttaactttcgtcttgacctgttttttactctgtaaggagttgttcagtttctaacagttcataagctttttattgtttctgtctttattaaagtccaactttaaatctatggtagtcagataagatgcagggcgtagtttcaattttcttgcatctgttgagactcactttgcgactaagtatgtggtcaattttggacaaagttccgtgagatgcagaaaagaaggcatattcctgtgtggctgggtgaaacgctctgtgaacatctattaggtccactcggtttatggcatcagttggctacagcatttctctgttaggttttgtctggatgacctgtctattggtaagtgtggggtattgaagtcaccccctatcaatgtatgagggtcaatatgtgacctcagctgtagtagtgtttcttttatgaacttgggggcccttgtgtttggtgtgtagatgataaaaattgtaatatcctcttggtgggtttttcctctgatgagtctagaatgttcttctctatccctttatattagctttggtttgaagtctatgttgtcagatatcgaagtggctatgctggtttgtttcttaggtccatttccttggaatatgtctttccattcttttaccctgaggtcatgtctatccttgacaataaggtgtattttcttaaggatgctgggtcctgttttcacatccactctgtctgtgtctttttctggaggaacagagaccattgatgttgacagtaaaccagtgggcaacctttgctgattcctgctattttgctgtactatgggtctccccctcttttaatttgctagtctgacattattctttgcattttcaagggtgttttcaggttgaagtcttccttcttgcaccttctgtagggctagatttataaatagacactgcctgagtttgtttgtttttatatcacggaacatctttctttacagtgattgtagacttcgctgagtatagtagtctgggctggcacctgtgctctctttagagtctatagaacatctgtccaggcccttctggctcttagagtctcaattgaaaagtcaggtgttattctaatagatctgcccttatatgttatttggtttttttcccttgctgttttgagtgtttgctctttattctgaacacttggtgttttgatcattctgtgccataagagatttctatttgtggtccagtctatttggggttccttttgcttcttgtaccttgatgcacctccttctttagctgcgggacattgttttctatgcttttgtggaaaatctttcctgtgtctttgacctgggtttcttcaccttcctctctttctgttagtcatgggtttggtcttttcgtagtgtcctagatttcctggatgttttgtgcctgaattttttatttatttatttattttagatttaacattttctttgaccaagatgtctatttcttctaccaggtcttcaatgcctgaggctctctctcccatctcttgctttcttttgtggaggcttgcctctgagtttcctgttcctaaaggctattttgaagtccttgccctgttctggagctatagtgcctgtctcagagcctgctgtggtaggactgctgggctgtagaagagacatacttccctggctattattgatcccgtttttatgctgacatctaggcatctgagtttgggatgattgtacgtctaggtgctgatctctgttcttgtctttgttgggtgggctctccactcactggtgtctgttgccttctctggttttttaggagagtgtggtggctgtgggttgcgtggtagaaaatgcttctgagatcctgccaggtggggccactggggtttccacgtagaatatgcttctaagtattgggagctgatactcaggaatggggatggggtagagtggttaaaccgagggggtctacaggaagtggaagcaggctgtgccaccaggatctggtggtctcccaaggatggggcatagagaaagaggaagccatggcaggtagtttgtttctgagctggggaggggactaggagttggccttgaagaagaggagagtgaagatagcttccctgctcccatgggccattgtggctagcgggttctcagggagtcccacagacaactctcttcctgcctcaaaagtatgccagtgctattctgtcagctgtctaaaacacttcagcatcttcaattctgtgggctttgttttgttctgtagagaccaggagtcttagttagggttttactgctatgaacagacaccatgaccgaggcaattctttttaaggaccatatttaattggggctggcttacaggttcagaggttcagttcattatcatcaaggtgggagcatggcagcatccaggcaggcatggtgcaggaggagctgagagttctacacctccatcttaaggcttctagcagaatgctggcttctaggcagctaggatgaggttcttaaagcccgtgcccacagtgatacacctgctccaacaaggccatacttcctaatagcgccactctctgggtcaaatatattcaaaccatcacaacaagtcttactctagcccacactaggcaatcctcttggcttatccttacaagtacccagattacagatagcagccaccacccgtggttttctgctttgatcttgtcttttttccccctttagatgtatttatttttactgtatgaaggtttcgtctgcatgtgtatgtatacaccacatgcatgcctgttggatggttatgagccaccaagccagggctgggaatgaaaccccagtctgctagcacaccagcaaatgctcttagctgctgagccatctcaccagcccagcctctcctccttctgttatgtgcgccttcctaagtatacccaaaagatcttcaagtcctttcaatatacttttttttaaaaagatttatttatttcatgtatgtaagtacactgtagctgtcttctgacacatctgaagaaggcttcagatcctattatggagggttgtgagccaccatgtggttgctgggaattgaactcaggacctctggaagagcagatggtgctcttaaccacggagccatctctccagtgcctcaatgtactttttaaaataccaccccttctgtttgttgttcatctgcagacagggacgttctaggccagcctgcgctatgcagtgaggcccttaacgacaaagcaaaagttgacgtattttttgtggttcctaacgaggtgtcttatctactcttctaatttaccattggctccatctgtttcctgccaatcatcccatgagcaaagcagaaataatcatggattccctaaacacaccacggcactaaggaaagctctcgaaatcacgccactcacccatgctactttatttaagaaaatattttccaaagcaacacatctgttaccattcttttagattttctttttaaattacatttatttatttactatgtgggtatgtgtatgtggaaggggggacatgcatgtcactccatgcacacgaaggtcaagaagacaacgttgggagtcaattctctctagcacgtgggacgcaggattaaactcgggccatttggcttggaggcaagtgcttttacccaccgatccatctcactggtcctgaatggtgcttccagatgtggtcttccccaggaccagagaaacggttcaggttgcagacaatagcatagacacatggtaatgttgatagaagtttctcaaactggaccccttttctcaccaaggaaactcatttgagccattaaaaaaaaaaaaggttgagggggaaacccatctcaccacattagagttgattctaatttcctttctgttgaatatttaacatgctatttgcatagctgtcttagcagaatcaatccctgtgttttattgaggatcaaagaaaaaaaattgtttgcttcctaggagcccaaagtagagtcagccctgtagattagaatcaattcagcagatggaatataaacctttgaaacatgttctgcctcccctgagcacgtcgcagccattagcgataatgggagccctgtccgtgcatggcggggatacatctgccagactcccagccagccccaccctggcttgtgcaggcctggtgaccttcatggtggaggagggctgaacctaactccagcatctcctcaccttgggctggaatgcacaggacaaacacaggcacgcatagtgctctttgccttgaagggttgaaactcagtcagctcaggcatgagcgaagacgagactctaccggtccttcagagcactgtaccatccggtgctctgtgagacctccccagaattcggggagcactggagatggaaagatgaggtgcctggtcaccgtttcatttctttcagtcacttttgtgtgcctaccagcatatttcaaacaaagagatgaatctggaaaaacatctaagacaaggcattaaacaatctcatgactgtgctctcaaacattacccctgttctctgctcatgtgtatttcaccgatggattttggttttgcagattttatttttttttatgtgtatatgtatgtttgtgtgacgtgtttgtatgccacaaatgtgctggttccagtcaaggccaaaataaggtgtcaggtatggtgtgtgtgtgtgtgtgtgtgtgtgtgtgtgtgtgtgtcagtggaagccgaaagagtgtgtcaggtaccctgaagttactagggctgtgagcttcctgatgtgtgtgctggaaactaaatgttgttcctctccaagagttcacattcttgaccactgaaccatctctccagtcctcctctcttaactctaagaacaaggaaagtagagcacactttaaaacacacccagcttcctctcatcacatctttgccatggaatgggtccgcctttagtattcccttttggtcacacaaggactcgaacttgacaggtcttgaaagaccatgtgctttccagaggtccagctgccctggcagcctagtgctgtagaccccagaaatccttgcaagactctctcctggcttctgtaggccaaagtcaggaggaactgtcaggatctttcctgcctgccgaatgtcccagaactctattcatgcggtcttcagtatgaggagcgctggagcacttgtaatcatgtctgccctccccaaagtcattcgaaagagaaggcagtcttggagggtaagtgacttgtaaagtttggtgatttaggtattcaaagactgacgaggatagaagaagagtagatttcagcccttactctgttcccgggagctggccagagtgctgaagccatcaaacattgataaccaccacttgagcctgctggctgtgtgtctccaacaaagctgcctcatatatccgataggctagcaatagtagccccaggaaagggtcggggcggtcagagagttcccagcaagtgccaggcttagacttatggccggaggcatgtaaacagctagtggaatttcagagtacatagcatcggattgttcccagacccgggggagctatatttagcgtaggcaagtttgcagagagctcagagggagtgtggtgccattcaaaaaaaaaaaaaaaaaaacattaatagtacagggactcagggacaggcaaagacttcttcagtatcaagaatctgggagggaaatgtgtattaacagtcttggaatgtggggtgcagtgaacccaagaatccagagttccagagagggggggaaactccacattaaagctcccactgggttgcctagactctctcagcatctttcccttggaaaatttatttcaggcagattatatctgtctttccccttcacttatgtgtaattaatggttctagaaagttcccagtttatcccatgcttgtctttccactcttcccagagtagaaacaagaaagaggtgcccaccggaaaacctgccctttccttaggatgcaaaggaccctgggcccacttcccccacccaactcattgtcttgatcaaggaggcagtcgggctgcactgctttctctagcctgaggtcccacttccctattaacatagacacaaccctctgttgaagcttgaaggataaggtattttctgcttggcatgttttatggcctgttattatcttctatacatgcctcgtgcctctccaaggggtacaggataatgtgtctagtgtaagcactggggaaggtcccccactctccacagggtgagggagagatcagcttcatgagagaatatatttaaagccaccccaaccccaaaagaagtcgagacaacaaggattcttctccagatctggactctttcttggcctctaggaagccactgcctacatccccaggtaggcagtctttgggtttgggtctctgcagtgctgtctcctttaagccttctcaccatggctggagggggcaagtgtgatatattccacccccacccccacatcctgctctatctgctgttcattatgtgtgggaggaatctggaggtgggacagacattacttattaacttcagtagggggatcaaatcaatcactttcccctgactccctcaaacataacaaaaaccatgatctagttcttccattgggtgagagaaatcagaattatacgtttgaatagacacaaaagaaaaaagggaaaaagtctaaatatgctcaaagtgggaggatttcaaaggcagagggggggttggcttcagtggaagagtctcttctggatcatagcctctgaagtcagaggatgtaccctaattctcatccaagtcatagactctggtcacagatgaggtggaggtgtggtggcaatggatcccttggttctctagagtcattcatgtcagcagcaccccctaggggatcttttagatgaaccctagagggtatctgagcatctttacaacagaactgagggtccacaccccacatctgggcttctcaccgtgggacctgccctagtaccctaggcactgcagaggccaagagcaaagtggcttaaagggccaggcaaagaacacctctgagcatcatctcctcaacaccagagagagctgcacggtatgacttcaacaaattcccctccccaaggaaacaacaggatatcagaagaacaggcagatgggggaatgtcagcaatccagatgcacagagaaagcctcttgtcgggaggaaggctgattgatgcaggtgacaaccccagccatgcacacagcacagccggctcaccttgctgagctctggactggctgaggttccaagggcaggtctctcatggcctcttctcggaagccccaattccacccatcagcaattgcccttgagtgtgagtccgggttgatttgctgttctgtccaatggaaccccaagggtcttgcggctttaaacaggaagaagtcctcttcatcttagcagcaattgtttcttcctctcttcctgccacggtgattaaattagcaggctgttctccttggaggacatgtgtttaggtcccaggaggcactgcccacttgcctgcttcataggtttagagaaagaaagcatggtgtgtgtgtgtgtgtgtgtgtgtgtgtgtgtgtgtgtgtgtgtgtggtgtgcctgtgtccttcacattccctatccccaggatctctcccacctgggatggccacccagccagaagcaaggaccacaggaggaccggcactggggctcagctgtaggaactctggcaggtggctgcgtacacgctgctgcccactgtggccccactgctgacgctgctggtgggacacttgaggggcttcatgctgcagtctctctggatattcaagtgctccagcctccagcgctcccagcatttccgaaactccatctggaccttccgtgggaaagaagagagagaagaaaaaaaaaagccatcaggcaaaccaactgcccacaaaatggccctgttattacattagcagagaaggggaaaaaatccactggattatattacaagacacgagccaaggtcttcaggcgcctaaattaatatcccaataaaattgtttattgttgtctcctattttctgcctctcctctggagagagatgggcttgatgacctaattggccctttctatctctaaattcagtgattcagctaagtaccttttacaatccatcacagttttattcaacggaagagaaagagtgaggtggagagtgagagcgaggttgagccagagaagatggagtctcgctttataaaaggctctccctgtgtggcttggacaattgaaagggaaaggcacaccccacccctaaccctgatgaggacccccccccccccagcggtctaaactccctgaggaggcttttcctttgttctactcgggtctgggtttattgttgtttcttttctgacagcaaagtctcactaggtagcctaggctggatttgaactcttcaccctcctccctctgccccctgaatggtgggaatgacaatcgtgaattatcaagctcagatttcccttctgatctccactcagtccctgaacctcccaggtcagggaagatgtgaagaaagcgaggggaatttctgtgcctggctttggatccatcccatgcagagaaactgatgggagcctggctggacaatctgcctacggagttcagccaactcagattccccattgcattgagctcaggcgttccccaagggaggggacttctcagctgggtatatgctaaaggatcagactgctggggcagaaagttacacagaacacggaagggctctgatctgatgcccaccatccctggtccttggctccatcacagctctatgacttgggctccagagagggttgttacaagctgtacggaacgtcctgaggactgggtccctcttcttctgggagctattcttgttgtctgcttttccctccttgccacaggctttccatctcacactgtctggggactgtgttccttttagtcccaagccatcaggagggctggctgccatcggccagctgtgtgcaacaggctccctgccaatgcctctacctgccccaaggcaaacactctccttttctactctttccatgtcatacatcaagccttaagcccagccagacactctgtgtggccacaagccatcccttacaagaacttctgtgctgaatggagctaagattgcccagcgcctgcctgcctgccagggcgtcttggtgtcccagacagtggcgtcgtggagcccagccctggagggtgagggaaggaggtagaacagacgctgccttgcctagctgggcttgtgtagtgctgacagctgggagagagacattgagcccaaagatggctcccttctgcacagctgcaggaaagcaatctcttacagtcttccacttggaagaagggaaagaaaactgatacactggggcgcagccaaacccagcagcaggacttaaagaacatggtatccctccatccaggctcccttagtactttttcagagcctccatggtgggcccggtcatcagagttgttctcaagaaccactaaattaattcagaaatgtgaggagaggacctgactactggctgcccctccagaggatccaggttcgagtcccagcaaccatatgtggctcaataataccattggccctcaatagctccatctccagggggatccagtgccttcctctggcctccagacatacacgtggtccacagacatacatgcaggtaaaacattcctaacacataaaacaaaataagcccagtgctggaggggtgtttgttagggagaggtgggggggagacaggtggatctctgaggttctaactaattgatgaactccgtattcagccagagtcactatctcaaaacaaggtgggggggggtatctgagggagacacttggcacagcctccagcttccacatccatgtgcacacacctgtatatatacatagccaaaaaggggcaccatcttggttaacttagggaagcagccaccactcttcaagtcaaggtgataatgcagaggaaaacatataaatgtttgcccagggctcagctaggattagagcccaggtgcagcctgattccaatcccagacacctagcaggtctctggccatgcctccgtcccactcagcagagaacacttgacagtcgtgactgcatcttcctcctctgactacccctgctcccagcacagtgctcagcacacagcgggctctcgctgccggctgcttcagtgagtcaaatgaatggccactcaaggaatctgcctctcacacaaggtcctcttgttgatcagtgagagaagtaaaacaaagaatgattctggggctggggagatggcttggtgggtaaaggcttttgccaccaagcctggtggcctgagttggcccatcagaacctacacaggagagagggagaatcaaatcccccaatcctctgaccttcacctgtgatctatggcacacacactcacacacacacacacacacacacacacacacactgctaataccccaatgaatgaatgagtgattgaatgaatgaatgaatgaatgatctggcctggcatgagtaccatctaatgtgctaataacccaatgaatgaatgaatgaatgaatgaatgacctggcatctgcaccatccaatgttaaccctttcacattccaagtgccctccctgactaagtaccagattggtctccaggtttggtaaatctttctcacctctactgacccctgggtagaagagcaaaagacctcaaggtggttagcctgacatcacacagcttggcagagcagaacagaatgagccctcagggcacctcggctacttcactttggcctctgacacaagccacagtcaattcatcgccagtccctcccctcccctgtccccgctgctacccaccaaccagcagctggtgcaggccctgacaaccacatgagacaaatgttcaggccatcttctcaggtcacaagtacctggcattgccatggcaaccctgggtatggagaacagctcttgtgggcagaggccaccagagtggcttggacacatgtgtgtcgaatcactttgcaataaatcaggtgtgcccaacctgtagcctaatggccgagtgcatattaagacagcgccgaatgtagcccaaatcatttgtggatgacagtgatatgtggcaaggtcagaaggttggacacccctgcttgaaatagtcaacattaactctttaatgcaaggctaagtcatgcctaagctcttttttcatttgtgtgtgtgtgtgtgtgtgtgtgtgtgtgtgtgtgtgtgtgtgtgtgttggcgaggagactacagaaaataatataaaggccagatgtcaccttaaatctcagccatagtgaaaggaccagcagtttcaactaggaagactacatgaaccctcactgcatagcccccacagagtccctaccatccctcctcagaccttacctcattgttgacaaagcagtacaggatagccaccatcaagccctggaaacaagaggcatgttaacaggaagggagcccaaaggaagcaactggacaaccagcctctgatacccgtctcctcagacagggcatcccaggcaggcttgaagatagataagggtgggttgttttctttttaatcttccaaaataaattttgtgtgtgtgtgtgtgtgtgtgtgtgtctgtccatctttgagtctgtgtgtgtacttgcatacatgagcatatatgtgtatgtgcatgaatttgtgtgtgtacgtgtgtgtgtgtgtgtgtgtgtgtgtgtgtatgtttatatccacctcgtgtgtgtaggaccccttggaggccagggcatcttatcccctgaagctggagtaacaggcaattatatatgaacacagggatgctgggaaccaagcctgagtcctctgcaagagcatcaaatactctaaaaaactgctgagccatctctccagtaacagttgcatcatctaatgctagtgaagaggaccaattccctgttttgaacctgtgtgaggcctgtgtggtacactacctcttctgacttaagacattcttcctagaaggagggaggacattcataaggcccaggaagatcctgggacttacaaaactcaggaagttcagaaagatacaaggcccctccactgggttatatgagcagtcagcagttgcagagaggagactctgctccgcggagctgcctagagattgtgcagggagatctggggctgcatcttccatgagttatcagccatggtggggtggacttttcaatgatggagctgtctttgagcctcccatgatcccgtatccaaccccaagaagctcattggttcaactggacttcagttgtaccatttctttggttggctgtcagtactctatctggggtgaatagatgtctgtctgttcatgtctccctaggaaaagccacatgacaccctggaaatcttgttttaacatctctgggcttcagtttccagttatgtcaagtgggggcaatctctcaactgtgagtcctgggagaattaaatgcattgtgtgcatcaattgcctggcaggacgctagtgggtggccctttctttctctagactcccagacacccaggtccacacctaggaggtcttcgtgtcttatggacgtccagagaagactgattaatatgtccaaatacctggggacactctctggctctgctccaactgtgtgactcggggccaggcttgctttcccaggtctccgtctgcaccatgcaggctggtgcccacccctcccttactttgggacatcccaggcaagtggccccaggtttgggtcacctggaaggaagtgaaggagagttctgtgaacagcttgatgaagcgtagggttcctcgggcgtgttcgtccatcacaaaggcaaagatgacttcatgtgtccccagaagggggatgagagtcagagtggacttggcaagcctggagagagggtgagaccaccggggtcattctgcgtgtgtgcacagactgactgttctttcctgtctgtgtctatacctcctctctctgtttctgctgagtcatgaacacgcttcattgaaataccctgaactggctgctgggggtgcgggggatgggggcagaggtcaagacttcaaaggtccaggggctgctaagaatagagtgaggggaaaggttaggggttataaaccaggcctgggtggaaaagagcattttgcagggttccaaacagagcaccccagtttctctctgtgccagaagggaaggccgagggcgcccctgtagccttggttaatgtacctgcatttgatgtcagtcttgcacatgagattagccttcagtttggagaccactatgcagatgacacggatgaagataagaaagttgacctgcagaacacatgagtggaggggggagggttcggagctctcagtctctctcccagccattagtctggtcacagtccaggtccaccagcttccgctccaaccccccaatcctgtcacttacgccgatagcaaagagaatgggcaatcggatgatgagccagtagttcatattggagttcctagtccagcagctggagaggaagagaggggcacacaaggcagccagctggaatcacagagccctcaggggctaggacaggacaaggcacatgtgcacgaggccaagcaaagcactacacgaagccgcagatccatgaagagccctgcaaaggcagtccacgccccgccccctacccaaatcctcaatacatggccactcacagagccacccatgccttccccccatctttacggacctctgcaaacagccacatgcacgcccagcttcatatacagaacaacaggatattaactccgatgttcataaaacccatcagggaggcaccatggactacgaaggccagaaatattgatcatcctaccatgccatgacaggttcagggagtggacattagagactgactcatacgctaaactcctgctgaccccacggatcctccttgacaggcaataaacgtatgctccagggttcaagactctcagaactgagcagcatgagaccctagcgcatcactctcctgcagcaggacgctcactcacccctcgtcctcatagagatacttgacaatcccccatgggataacgaacagcagcggaactcctagaagaaggagggaagacagagaggagatcggagctggcaggtccgagctgctgccacagtgaccaggtcctctccacaccccagacccctcgtgccccaagtctctgtcccttcctggccctaaaacagggtggctgaatgctggggagaatggaggatcaggatttcacagtcacactccacatccttcgtactgacttctttgtggtccagaccctccatgtatcaggccctctaccaggatttgcctccaaagtcttggctgtgagacctcaagatagaccctcaagtagcataggatctgtacaacattatgggaaggggaccaagaaactctgatgctccgtcctccctgtcttcagcccatctgtctacctcagtccactccttcaggacccacaagctcctttgagtgtctgttccttcccccatgcaactgtcctgggcctagaaaacagacatgcccccatcccggttgcacagaagcctacccagtcaacagacacagtggttatgcttcccagtgagcactggggtttagataagcattggtgtgatacttgtagatgttggagtcttcagaagatagggactggggacagtcctttccaaaggagatttggggaccctagcccatccagtctctcatttttgcttctggcatgaagtgagcgattttctcatctctatgcaccccatcaccacaacatggcacccccacaagaggaccaaagtaatgggtctgtctaatctttggcataacctgcagaatggtgatcttgcacataaaccttttctctttatgataaccatgccccgggtgttttgtgatagcaacgcaaaagtgactaatatagcttatagatagccacttgggtgcttcccagggattaagacctcttggcatttgaaattttgtggttgttgatgagacaggatctcaagtagcccaaactggcctaaaacttgctgtgaaatcaaaggtggcctcgaaacttctgatctttctccatctacttcttaagagctaggattatagagttctctagtttctcttgctctctgtctctgtctctgtttctgtctctgtctctctctcttcactaagttgggggagtgaaggaaggggcagttgtcataccaagtgttgtctttgacagccaacagagaggtcctagagtacagaattgaggactcctgcccacagcttcatgagtgaaatagatcccctagctaagccctggatgacagcaactctaacagacagctccagctggacattctgagtcagggatgcgcagctatgttgaactcaagagtattgagcccaggaactgtgagttagaagtttgatgctcttagttcaaaggtcattgttatacaggaatggaaacacaatccagctggtttctaaggtccatagagtagagcaggagccttgttcatcccagagcttggtctgtgctggtaactggcaggtgggctgatctccctctcatggcagatgaggccacagatcaggaggaaaggactgtaactccagccaccctcaatgactttctgcatcaatattctcattacctgcctcttacctatgcctttctcaagtgggtcatgcgggtgtatgaagtaggacacagtgtgcatattaaggtgtatgcgtgtgtgtgtgtgtgtgtgtgtgtgtgtgtgtgtgtgtgtgtgtgtgtgttggagggctcacacacatgcatatgtggcgttgggacattctcccaggtatacatttccagtcaccatctatcttcagtatccttaagtccccaggtcccacacagtcatagctgctgaacaactggtgtgtctggatcactgcactagctcatgattcacagaggcagggggttcaacagtgcacagctggcccacacccatcagatctccatgcagtcccatttactcagtttactattactattgtttaaaagttttactacatttattgtgtgcatgcgtgcatgtgtgtgtgtgtgtgtgtgtgtgtgtgtgtgtgcacgcgcgcgcgcgtgtgtccctgtctatgtttgagggtaagtgtacaaaagtgaccatggccatgcatgtgagggccagaggacgatctcaggtgattcctaaggatctgctatcttgtatttttgagtcacggtctcccactggaacctggggtttactaattaggttaaactgattggccaggaagtcctgagcatccttctgtctccccagcatctttcacagcttctttgtgggagttctgaggacttgaactcccatcctcatgactgggtactaagtatgttcatcaagggagctatctctccccattctgtttatttttacacagaccagccattccaacacccatgatgttttataactaggtcttcatggaactgaacagataatggggagacctaggaggggggtggggcatagtgtagaccctgccccatagagtatgcccagtagggatggaataaatatatcaacaagaaaagggaagctctctagacaagaacacacaatttcttaggccactcatgtacaggaacttccagctgtgtgtcctgcttcagcagttgttctttctctctgagacctcactccagtatgagagagcttgctcacaccgctagctacccctggtgagcttcatccattcgttaacatctggtaaacaaggtaaagaaacaggagcatagcccaaccagcggccaagatgacataatccttgcaggctgcatttcatcagttcagctgcacagctgctttgcagcatcctgacttgggcaggtctctgtgactcttgtcttccctcggacccttcttctctctacctcacttcccccccaaaaaagatgttctggttgggaaagaagcccccaagggttctgagccctgagcaaggataggcaagaaagacctggcacccttccccatctcctttgagaactccagagcatcctctgtttccactgacccctaccaactccctgcttttctgtacacatccctttggttggtcctgcccttgggttgctatggtgacagatacaaacagcactgatgttatttcccagaatggacagacactatttgtcccccacacagaggaagcccttccctgagttccttaatggtctgtccctggacccacccccagggagcatcaggactcactctccagatgccccacctgatggggttgcctggcaggatagagagggttaggaaggaaggaaagatctagtagaatgggctgggtcttggaggaagaggaaggacagggaccatcagggatctctgtatgctgaaatcagggccacttttatctgtatagagatctaagtctctcagcagaatcagcagcggactgagtgggaaagcagaagctaagacctgcatttgacaagtagacgacaaggcccagagccaggaagctaggagcctcttgtgacccaatacctacccactgatccctctaggaggggttgccctcatctgtctcctcatcccaaccaaattgcaaccctccccatcctccatgagacccccatacatcgagaggtagaaaaacaaccagaaatgttccagccaaaaaaagacctgatggttctcagtagacttttttggctagaacctttccagctgggctccaggcacatccacagttcacctttttctttgtcggccacccctcccagcttggctcaccccagagtcctttgcttcatcatcacaatggtatcctatgttagcccgtaccctgttcacttgcataccccttgcccactgtgaggcccaggatgtagcatctcccacaggacctctgattgccctgcactgggtatgaagtactctccagtaggacctcaggagaagaggtatgtgaggacagtgtcctgacttctagtggtgtggtggggctgggggtgatatttggccatatgagaatggcatttactaagaaaaatgtagatgccatatattacatatataatataaacatatgatatatgatatgagattatggtatatgatatgtggtatatggtgtatgatatatatatacacacacacataaacatgtgtatatatatgtatatatatgtatatatatgtatgtgtgtgtatatacatatatatatatacatatatatatggtagggtggggtcttccagcccttgctgcaggtctccatgaaggttgtaaggtgaacaactgtgggccttaccccagcctatgctcagatacagcttgaagatgcgctgctccgagaacaccgagaaggccagcagtgtgtatagatacacgccttccaccagcaaccagtagtagttggctgccacgcagtactgcatgagcaggaacaccagtcggcagcctagagagtcctaggggcaaagaaaggtcccatgggaacagtagccctgcctcttgccccacttgtcagtcctcgatggcctggcctggccactgtcctaccatggttaacatggggtgaaggagctttcatatggccagggtcactactgggaactctctctgctctgggtcattgaaccctctttcttttgagaagaaagcacctgctattgtccccatgctgggaggagaactgagccctggagaagtcatgggatgtgtctggactagtatgcaaccagtacaaggtagagctgagactcaaactcaggtctgcatccagagaactccccgtatcagactgaactccctatggcagagactcttacctgccccaggtggactgcctcctccatcagactaggggctccccacaatggactttctcttccatcagactaggggctccatgtgttgaacttcctctcccataacactagggactctccatggtagagtgtcttctccatcagactaggggcttcttaagctgttcagtctcatcaaactaggcctgtcagggtagacggcctctcacatcagactagggtgtactcccatggtgtattgccttctcccatctaactaggactatccaagttagactgcctctctcatcacactaggggctccccattgtgtactgcctctgccatcagactaggagtttcccataacactagggattctccattatggactgcctctcctatcatacagtgactccctaaggtcacatctgggctacttttgcttttttccatctaatggttatgtagtagactctgaccaatgccctcccctcccaggctccccaggctgcaccacccacctgataggagaggagcccatcccactggtgttgctgggcagccgtgctatacatccacttgagggcagcatctttgatgaagacggacagtgctcggaggatgaaggatgcaaacaggttcaggtggatgtagttcctggtgcagtgcaagtgtctaagggagaaaacagagcccgttcctggcatgacagccaacactggctcttcagccagtaccagttctctggtcagcccacatacatacacatcaggcatgtatccacctctgggaatatgctcaaatcttccttcctctgagaatgtctttcttcctcacaaccttgaaaatctctgatgccctgcccgtctacgaggccctcaacttggtagtcacggctcacttccaccccttgctgtggtgccatctttcatagttatgtgtaaccaaagcaacatatgtgtcaggatcagtcttcccctgggagagttgattctttaggacaggatgtttctagactgttctctggggcagagtaactctaggcacacagtgggaattcaaaaggaaatgggtacaatgtatcctctcagggaaaaatatgtagcagagctgaggagatggctcagggggtgagagttagctgtgcaggcgtgaggacctcagttcggatccccagcagtcctgtggaaaagcaagccggcacacctgtaacctcagcactggggtggggctggggcatagggaacagaagaccactgggatggctggtgagatggctcaaccagttaagagcttaaccactggctgttcttccacaggtcccgagttcaattcccagcaaccacatggtggctcatgaccatctataaggcaatctgatgccctcttctggtatttgggtgtacatgcagcagaatactcactcaatcaaaaaaaaaaaaaaaaaagaccgactgctgggtttgctggcggccagcccagctctatgttcagtgagagatcctgttctcaagcaaatatggaaaaagtatgtcgctctgagagtgacagagtgggacacctgatgtttctcttctgcttccatgtttggtatgcaatctatgtgaagagcacatacgtgtacacacatacacacacacacaactgtatggcaaactgggaatccaagggtacttcatttgataaaggctacctcccaagcaaaagccaacatcattcttaacggaggaactcggcgacttcaaattcagcagccaagcaaggatgtgtcaccgctactgactatttacagtctcaccctacaacagggccacagaagaggtgaaccagagctggttatggcttacagatgaaatcttcagaggaacaccagaacaatgtctggatgaactataatgtctcaagggtcccagcagtgggttccctaacacattctagcaataagcaataaaaagaaatggaagacttgttcatagattctatttgattttcagaaacgatctctaacaagaggatgggtaaggtcattgtggacaatatgataaacttggctcaaaattgctagagaagtcttaagttcatggaagatacacagtcacaccacactcaagaacagagatgccactagcctatggtgaataatgaattcaaacagctgcaataaaatgtcaacttttttcagggtactgaaaagatttacaaagaatagctaaaggtcagggatagtgtaggcagtcaagtggccctttcctataatcccagcacacgggaggcagaggcaggggatcaggagtttgaggcaagtctaggctacaaggcaagacagggtttcagcaaaacaacaacgctcagctggccatgatggtacactctataatcccagcacttaggaaagtggaggcaggggaattaggagttcaaggctagcctcagctatacagagtaagttcaaggctagcccagattccatgagactctgtctcaaaataatcaacatgcaaaaggaatcacaacataggagtctctgccttcagagagccaggatgcctctgtgtgtaagtacacatatgtgtgcatgttcatgtgtgtgagtgcatgtgcagaggccagaggacaactcggggtgttaatcctcccctcctgtcctgtttgagacagaatcttttgtctaccactccccacatcaggctggccaacccctgagcttccttggttactgctatctctgctttctgtgcctctgcaggagcaccaggccacaaacacatgcccacaaccatatgtggcttttcatgggttccagggattcgaacccaggttctcacagtgagaatcaaatgtttaatccactgggctatctctgcggccagagagttaggatttatttttatttgtcatttaaaaaaacattttattacattaattggtttattgtatgtgcatatgtgagtgtgtgtgtgtgtgtgtgtgtgtgtgtgtgtgtgtgtgtgtgtgtgttttggaccacgcatgcctgaacacttgtatgcccaccagaagtctgggactaaatttggaagagtcagctctttccttcactgtagatcccaggaacagactcgggccatcgggcttggcagcaggagcctttactagctgagtcaacttgctggtctgaggccttacatttctattaaatctttaggagacaaggtgctgtgttcaggactagggtagctaaacagaccaacagaaaagaattgtaaatgacagagaccaccttacaaatctggggacccttgcggcatcttcagtggaaaaaaatagtgcctctcgattgataaaattaacttttgttatgcaatagttcctattgatatgctttacttatcaataaacttggtgactgaccacttttgtttccttaaatgtagaatgcctgtgaaaaaggcaccatagaatgacgaataagcataaattgtgtctcattaacacttaaagcttagattaagaatgcccactattaagtaggttaatatccagataaatggctataacaagccaaataaacacatttttaatttgggttttttgagacagggtttctctgtgcagctctggctgtcctggaactcactctgtagaccaggctggcctcgaactcagaaatctgcctgcctctgcctcccaagtgctgggattaaaggcgtgcaccaccactgcctggcataaactatttttttaaaaaaggcagtgaacaaagcaactcatagactaaaatatgaaaagaaaaaacccaaaacaaacaaaaacgtactgggattataggaaagggccagttgactacctatactacccctgacctttaacctttgttttgacccacttaatctctccaagggtcaaagataagcaagctacaatcatacggtcttttacatgctttataggttagcattgcttaattctgaaaatgctaaatgtgggtgtggtatgaagctcagggaaccttcttcactgggtggccagagtgccacttggcagcggccacctgggaagcaacctaacactagttaaccaaacactgaaggccaggtggttggttactggtggcatttttacatctgtgggtacgcccaaaggaaatgcacaggcaagaatcacaggagagtcccgttgttttttaagctttgtgaacagagagaaaaatccacaaaacacataaaaaatggcactacctgaatggctctcatgagaacgtaaagatggatttccacccctggaaaccacagcaggatacaaacacttaaaagtatcagtggaccacctgtgtgttgttatagacacttggcaaaggggcgcaaggtaacgagaaagagtgggaattatgcccttaacgagcaagaatcagctcttgtgggggtggggggtgggcatggggactagatggctgtcctttgctttgttctgtagcttaggctagcctgaaactatatataacctagactggcctccagcttgtgacaatcctcctgccatgacctaggtgctggactagagatgtttgccagcacacctggcatgtgctactttgtgatatggctagcctggttagcaagctctctggagatcctgtcttgcgtggccttctgaagctgaattagaggcaagccaccatactcacaggcatttatgtgactgaaactggtcttcacattgatgtgtcaagtgctttaactgctgagccgtgtccccagctcaaaatgccttagttatgggcatttatttctatatgtatttcctcttacacttctgaatctctgaaatcattcataataaaagaatatctgatacgatttgattgggagctatctctgagatgtgtagatttggtttgtggtgctatctcgggagtggtgaacactttaggggacagagccaaattgaaggaagtaagtcactgtgcagggtgcctctgaagggtacacttaatcttcagtctctccccttctctgcctcctggccgtcaggagatgaacagctccctctaacacacagtctcatggccaggagccaatcccatgaaagaccaagtggccaaacactgaacactccaaaatcatgagctcagacaaatgcttccactatggaactgttcttgcatgttcttgcatgctggagttaacaagcttcaagacagaagaatctctaatcgcggagactttccaaaactcatgctgagttactgattattattagtaatagtgggtgggacttcttggaatttcccaacatcttaccatccactgttatagtgtgtgtgtgtgtgtgtgtgtgtgtgtgtgtgtgtgtgtgtgtgatgtagtatgtgtctgtgtgtgtgtgcatgcatgtgcatgtgcgtgcacatgtgagtagtatgtgtgtgtgtgtgtgtgtgtgtgtgtggtatgtggtatgtgtatatgtgtgtgtgggatgtatgtggtgtgcaagtgtgtggtgtggtgtgtgtggtatgtagtatgtgctgtgtgtgtggtgtgtgtgtgtggtgtggtgtgtgtgtggtatgtactatgtgtctgtgtatgtgtctgtgtgtgtttacaacctcatgtttttcagaaagttctagtgagaaggaccctctggttactttggtttgaacttcctctattaaggaacggagcaggaggcagccctgccctcccagtcttgagcccctccttacctgaagccaacaaggatggctgaagcgatgaccaaggcggagaaagaaagtgcgtaccccactgtgtagataatgtacagggacaggagctgttcctcaggaaagttctgtgtgcacaaagggacatggggatgtgtgcatggcctgcaggccatatgtgtgcatgtacactcacctcccaagtgcctcattctggggtctaaggatgtgaggtgccctggggccccacttgggattccagaataaaaaaagagaatgacccatggacgtggccccaggatgtttgcgacctggatccaaggtgagtactcaccacctttggccagatagcaggggtacaaagtcactggaagcagggggactgatgatgtgacagcaactgccccacccaaagcctagagcctctgcttctgtgaatcagggacctagctgccccttcccaggctcggaacccttcagcttactctctcccctcgcttagactcttcacactccgacaggtccctccagggcaggctggagttgtccttatgtagccagagaccctcagctgtgcagaaccggtacacatggccttgtagcactgagaagggagacaggacatctgaggctcagcctagagatgagcagcccacccaatgttgtctttgttctttcctctcttgggggcaccctgctccattagagctgactcttctgagttagtaacaggaatcgcatgcacccacacacacacacacacccacacacacacacacacacaccccacaccacacacacaaacacacacacacacacacaccaccacacaccacactcacacacacaccacacacccccacacacacaccacaccacacacacacacacacacacacacacacacaccacacacacacacacaaacacacacacacacacaccacacacacacacacacacacaaatgcatgcacacacacacacacacacaaacacacacacacacacaccacaccacacacacacatgcacacacacacacacacacacacacacacacacacacaaatgcatgcacacacgcatgcacacagcacccattacgatccaggcatacaagaaggtatcaccaaaataagggtgacccagccactctcagctatttctcctagccacccaaagacacagttgagtgaatctgtatcttttagacaagataaatatattttgggactatgtcctatcctcctgcctcaaatcacatgatcgacaaggtctggtgccgggcagaaggggtcctgccaatcacagtcaccctccgtgattctgatcttcctgactcgggtcccttgccctcctatattctttgacggatagaaaggtctaagaacaaagctggtactcaactcctgagactggaagttaagcaacctctactgagggagccccagtctgaagagacatggcctgcccaggacccccagtttgaggagacatggtctgcccagggagtcccagcctgaggagacatggcctgcccaggatccccagtctgaggagacatggcctgcccaggagccccagtttgaggagacatggcctgcccagggagtcccagcctgaggagacatggcctgcccaggacccccagtttgaggagacatggcctgcccagggagtcccagcctgaggagacatggcctgcccaggatccccagtctgaggagacatggcctgcccaggagccccagtttgaggagacatggcctgcccagggaaccccagtctgaggagacatggcctgcccagggagccccagtctgaggagacatggcctgcccagggagccccagcctgaggagattttttttaaagacctctaaaaggaacacaaagtctcatggtactgttatagctatcattcttggaaattttcccttcagatggggaaacaaagcttgctccttcaagtaacctcaggttctatattcaagaaggacacagctcttcaagacctgcttctctgagagaaggcaacaccttccatcagctctcagagaagagcagcgtgaagggaaacccacaggggcctgacaccctttctacagagctgggggtgggctgtcacctgtggtcttcacactcactcaggttctgaggagtcccaatcatgcccggctgtggtaaaaagtatttaaaaaatcccagcatggggttccttccctccttaatggtttatatacccagatgatagacatgcacacagcctttatatttattatgccttaatccgcacaatagctgggtggctgcctaccctccatgctgttagaatctacctcctctccacaatccatgttattattcactgcttcatctgggctgctcttagctccaattaggcagccctctgagccacgttctcttggcctctagctcatggtgtcactcctttctcctctcctgaacatcctctctatcatatggtggcttttcctctccccttctcatggtggcctcaaacctgggaaacctaaccccgacctatgtctcttctccccagctattagccgctgacgtcattatttaccaatcagaattagctgggggcactgtccctcagtgtcttacgtacagactctctagtctttggggcaaacagttttgggggacccaaattaacattagaatacaaatgacattaggccaacccactacgtcctactgtggacctttctagggagatgatgaagaggagcgattttttttgccccagactccatgtaagagcagcagacagcagagtgctcactgtgcctaggaaaggcctcaatcattgcctccctacaggagaacgtaagtctatcagcaacgccaaggaacaggggtggaagtcagcaaccaagcagttgaaggaggggtattagcacaggagagtgaggaggactgccaaagtcaacggctgactgtagaagatcccagcagttgggaggcagaggcaggcagatttctgagttcgaggccagcctggtctacaaagtgaattccaggacagccagggctacacagagaaaccctgtcttgaaaaacaaacaaacaaaagacaaatgacttgaattggcaagatagatcagtaggtagagatgcctgctaccaagcctgctgccccaagttcgatctctgggactcacatgagaggaggaaggaaccaacttctacgagctgtcctctgacctccacacggatgctgtcacagtgcctcccctaaatgagcaaataaatgtaatacaaatattttaaagggcaaaagacttgaaggaccagctgtgggctgtgtgtggcaggtactgtggaaaggaatggggagaatacagaagtcactcagagcccttggtggccatggctggtgagtgttaaggtgaagatattgtcagtaagaaaaggctgattaattcacatatacatatatacacacatatacacacatacacaatgcatatatacacatatatacacataaacaaacatatatatgtatatatacacgtgtgcatatacacatatacatcacatataatatatgcagcatatacattatatatacatatatgtcctatatacatcatatatacctatatgcatatatacatatgcatatacgcatatatacataatacatatggcagagtagcagatgtaccctgtgggaggcacacccaagggacccctgcctccaggggtagactttcagtgaagaaacccaatttcccaatttctgagaccattgttatgtgtcaaggagacttcctgtgggtcctgtaacaaccctcttccagtgcaatcatgtgcttgtcaatcaggccttattctcaacaccaaccctgccacccagcacccagtctgcccagtcttcacacctctcttctttctctcttcccttcatgaatactccctgaagcagggttccctcttgaggagggggaatttattgaaataaataagctttgtagtgttaccagtgtaagaagaacctcgcacgtgtgtgtgtctgtatgtctgtgtgtgtgtgtctctctgtgtgtatatgcatgtgttatatgtgtatctgtgcgtttgtgtgtctgtgtgtatatgtgtgtgttgtgtgtgtatctgtgtgtgtgtatgtgtgtgtgtctgcattttgcacatgcatgtgtgtgcagggacacataggtgtgtacatatgtgcatatgtgcacggaggccagagttgatggtggatgccaggtgcctctcccacagccacctgacttttgggacaggatctctcactgaagatggagttcccttgggctaacctagctgaccagccagcccctcccctgtgcaggcacaccctactacacccagccttttacgtgccgggaatccaaactcagatcctcttgatctttaaagcaagcactttatcaactaagccgtctcctcggcctggaacctacgttttcagactctgacaaacccccgaggatctgatagcacctcatccagcagcaggtcgtgacctgagcactgggggcatctctaaggagctcacaaatggctgaggaaggaaggcaggcacatgctctcattttagtgtctcagagggccatcctcaggtccccaaatgcttctggtgcttggatagttaaaattctttctgggagtccagtcttctggtagataagaagcctgtctttggctatagatacaccccgatggtaatgggaacctgagccaattttgtgggaatgaacaagtatcagggcctgctctgcagcctgtctgaatggaagggtatagggagtagagtagggagagggaagcttgggagaaaggagaatggagaaaacacagcagtagactctccctagagctggcacaaaccccagcatacagtaggcaccatgcacacagtaggcactgtaccttacatacacagtgcacacagtaggccctgtaccctatatgtaccatgcacacagtaggcactgacccctatatgcactgtgcacacagtagtaacttataccctccatgcaccatgcacacagtaggcactgtgccctccatgcactgtgcacacaggaggcactgttcaattgtaggcttcctccctgcatgtattgtgcttgctgaaggctatttactcacagaatcaagttttgaaaacctactgtaccttagacatcatagccacctcaccagggtggcatggttaaccccactttacagatgaaaacactgagcctctgagacaccaagaggtctgttcaggatcgtggagataggaagacacacaggcaggattctaactcccagctctctgcctccaaaagtcaaaacttagcaactggggttgtacccaagagtcaatcgtggctaggtacctgggtttagatttccacacatgccattgtgacccccagacagcctgcatagctctgggatctctgctgagggccagcttgggtgtgtgtggggggtgtgcctctctggtttaaagagatcactgtgtcccagagaagcccagactgcaagttcatctgtcagttagccctcattaacatcaaatattaaaagccacagctggataactggctaaacccatggttcccaaatgcccttcttggctggaggtaggtggtctggacaaaaccctgtttatcagcacagctttatctggtctatgaggagttggccaatcatagccaagggtttggcttagtctagtcaatacacggagacaaccaggcggccgcatgccaggaggcccagtgatatttcattaagtcagaccctggtgctggaaataaaacccccaattaaacacttcgcctcccggaagctgccaggacgtctgtaatcaagctaacagccacccttccacgtggatggagggcactcaacgccgtgaagagctgctcacgaatctattagctcctgcaccctggcaacagaagtgcccagtgagggccatggggtgcggaagggggacccatttcacagatgaagatgctgaggctcagtcaggccggcacctctcctgtatgtgacaggatgggacagggtagcaacgaaggggccagctctgggttgaggaacagaaaggcctgggagcatcaagaattaggagaagagcaggttctgaagtccagactcaagtgcaaatcttggttgcactcttaatcagctgttgcactgtgggggtattccgccacttctctgcttctcagcttccctcgtctataaaatgggaactattcccagaagaatgggcaggactgcctggtgtgcagtcacacagaggccttgctccccccaccccccccaccccccgctttacaaggcctaacttgggtctcggactccccttggtaaccctggcctactttaaaagctcccatgctcgacattacccaggggagcctgcgctggcctatcagagtttctaagaatcgtgagtgataagccacttagcattttatgaccctcatataattagagttaagctaacaaacaggtaggaacctggagagggccactaacgaggttgggctggcatggaaggagtgggtccctgcgggagggtaaatggagctgccaagggcctgagacagccaacaggctagcaggccgcagagacctcatctttctgtcatctttgtgtggactagacgcttccacttcctattcacctgcttctgctctttctacaccatctgggatcccaagtccacaataacattccagactgcaaggcctggaatggttttcttgggaccctgcccacgcacccctgaggcctgaggtcttgacagcatgttcaaagtgctccctgagcattctccctcctcctcctccccatgcctatgactgtcctttctgcctggccccattgccacctgccctgatggcacacctcaggaaaaaaagatatctctgactttcccaacctatttccactaggaccctaaagttgacctttccagctccatacagctccctggcatatgtcacacaagtgtgtccccaggtcctgataaggacttagctgggctatggtcattggtttgaacgtagttctttctgaggccacccatttctctgctttgctctctaccccagaaggctgactcctttagacttgcatcacacagtcattactgggttttgtctacaggtgacacccactggcagaagaccctaggatgatggagaaagaacatgcccacagctctctcacccctacctgctggagtctgggggctcaggccgtggctttgcctctctgtgggcaccctggtggtaactccagctaacttgaggacctctgtcccctagcctactcctttctcctcaggcctttggaggtgctgagctccactaaactcccctcctattcctcactgggcatgtttcctagagaacccgccagagacaaggcccccctgtccccagctcctgctgtgaggcatctctgctagctgctccctgaggcaggctaagaatgctccagagacaccccccttgctcattccccacagtcctaggcgggaccagggagcccctctggtacaatgacagatagcgctgtgtgaatctagtgggcgtctctctgggggtccccaactcaagagggtaggcagagccggtgatctgggtgtcgaaaaacgggtgggaaggagtaaattagcctggtgagacgggagggagggtggctggcagggggcctgtgcggaggccgttatcttcatggagaaagcaataaaaccgtgttcgctcataaacgggcaccaccaggacctatttcctgctcaaataaaattaaaggtgatggatggagtcgcaagcgcaggcagagctgggggcgcttagcgctgagtgataggctctgtcccgcgcctggctcccgggggtctagaggctcagccgggatacccaagcagaggtcccaaccttggaggcagggatcgtgtacgccatgtaggaaggtgccaagcatgtagggaaagtgggaaaaaatgaatggaggcttgtgtcccccgcactccaccccccccccccatctcaaatcatctcctatccacatcacttggctccactccagctcccgagtgagcctacgaaccaaaacacagagacctctaggaaccattccagaccacacagcctcttgcatcatcaataagcagaggcacaggatagcttggcttagagggaatgggcaggatcccatcgccctcactaatgtgtcctgacaatgacggtcatgcagaccactcacctgtctccagacccaatgccaaacgtgacggcactcccctgctccccggcaagcctggctcagcagttcaacaaggagatgcagatccttgcccaacctcctggactgatgcccaggtctgccaaaccaagctagctgtgtgtcagggaaaagccacgttgtaactctgtccttcagcttcctcgccaagagggaaaatgggaggaatcgtctcagagagctgtgggcaggatccaatgagtgtctcgcctgtccacaggcaaaaggcactaaggaattctgagtgaagggccactgagccactgagccactggcagtctgcctcttttacactctggtttgtcctgaggaacacaggagagatgggaggagcctcactagaagatccgcctgggtttcatgctgaagttcatgtccggcccaccaggccaactcctccaagaagacccctggcttttcccaagcctgacgtcatccctatgcttgctcacaggctggttgaggataatggctaagcaaagtgcccagggttccaccagtctccagctcatttggagcaagagacttaaatctcttggggctccggtttcctcacacgaacaggtccatgtccaaggcagctgtcaggacaggactggacacagatagtgggtaactaactatcattaccctctcaagtatcttctctcagttgggcaggtggctgggtctgtaacgtgcttgccatggaagcttgaggatctcggtttagtgcctcagcatccatgtaggaaggagggtaaaatagcatatgcctgcgatctcagtgctgaggacgctgagactcgtggatccctggggttcactaataaggcagcctcgtcaaaggtggacagtctgtgaggacagcccaaaattgtccctatggtctctacatggtggcccccacacatgtaataaacatgtacctgcacacatatgaacacacacatgtgcacatgtgtacacatacagagacgtacttcacacacatacatacacacacaaagtgtcttttctcccctcatggacactgggactccttccagcaagaatgcttgacccagttgtcccccatggagcctcagcatgtgattggaatggagcagtagacgtggaagttaccactgcactcatgggcaccctggtcctccgggggtttctggagggcaggactctctcacccacccagtcatagctttccctgtgtagagtctcccctcaggcagaagtaggctggacaaggtcggaggggccagcccaccattcccttgagcactgctccctgtaaacctttaaaagtatcaggaagtgacaagccagcacctcttggtaatgcacacatgcacgtgtgcgcacacacacacacaccacacaggtacacacatgcacacacacacaccagacactctcacacacacatataacagacacatacacaaacagcgggcacacatacaccagacacacatacaccagacacacaggcatgcaaaccagaaaatgacacctcataggtaccttcctgcgcacctatgatctgttcctccctcctggctcctttgctgactaccaggtcagaggggtctcgttgctgtcttaaggcacatccacccctgcctgcgcaaataccagactcaggacacctcagaaagttccgacccctgtcattgctgactatccaaccaccacccagagcaggtgctctaccctccaggaggcctgaggacattttcaggtgcgggaactgggtcccaaaggaaggaaggctatgtcccatcctgccccagcatcctgggatcaggcaggggaccactcaccactactggcccagggcaggtaccaggggcagctgacattcacgaaggaacctgggggcccatccggccagcaggcatagtcatcaaaggtccggttgcagaagaggcctgtggaaacagtagagccacctctgagtcccaggctgctgtcatccatccttcccaacctcctggaccacaggaagctacactcccccccagcccctgctaagtgctctctggactctaagcactctccccagggcagggaccgaggaaggatcccattactcatcaggggccggaccttagcgatttccttaacaattctatgccttctgtggaatggaggcatcccctggtccatggaactttgttataacagatgttatatagaagaaggaatatagctagggctcaacagatggctcctataaggcatttttttgaaccattcttcacagatgggaggaaaatggtggcttgagaggccgaggagaccttcccctggtttctgttatgatcagagacagtatttgaacccaagcccaaccggctccaatgctgtgttctttaaaccaccttacatactccccccaagatttactcccgttggctcggtcgataggatgcctgtctcacgtgcataaggccctgggttcagccttcagcactgcttgagccaagagtggtgatacataggcaccgaataccaacgtttgggaggtagaggcaaggggattggaagttcagattcattcatggctacatagtgagttgggaactagcctgggctacatgagctcatgtctcaaaaaaaaaaaaaaaagcttgattataaatgtgtcagtctatacacagctaaggaggggctgaggaaaacatggaatggaaagtggggtcctgctctgggggtaaagacagcaatgaaacagcacccacaaagctgcctgagagaaaacagatgggaaggggacaggagggacttcagtgaagacacagtgtagtcactgggatagaggtccaggcagatgccgttccagagagaaaaacgacaccagctatggactggggatcgtcaaagcctctatggaggtgttcgggagtacaggcgtgaggcctcatctggacgcacctgtggccaggagtggcgcttccgtgaggaaacgctggcactgccgccggtattctctccatttctgcaccgtctctgagagggacaccgtggtaccctacaagggaaagcagaaataaaagcagaagccccgtggctccagcagcccctctggtcccactggactcccaccctcttggtttcttaacctccagtggaccaaagcccaccaggaacctctgaaaggggagagagccggtgactgccactttggggatccaggccttctggggtgtttatcctgcacaaggctgccatctagtaagtacccagagagtgtctaacagattaaggcttaaggaggtggggtgaaggagagcagagagggagagtgtgtgactcattcatggtcccagctgcccttcatctaccctcaacaaggagagacttcctgagggacagctgcatcacagcctgggactcctcccctccggatgtctggccgcactgccagcctggagatagcttgcctccaaccactctaggagagtcaagagaagactccatcaaaggcacatggcatctcgggcagcagagctaaggccagcatacagtcgccttagctcagtggctaacctgcagcatcagaggttgcaggatgtggtctcacagagggctcatagaaagagccagaattatcacccactctcctgctagacttgatcgatcgctgccctcgaaaggccaccatcccaccgcacagtgtctcttctgacacaacacagatctgagatgcagcctggcttctacgtcccaggaggatacggaatagtaaggacagggtgaagacggaaaagttccagaactctgaagttgtttgtgcctgccctgggaggtggcctcctccccgtgatggagggatgggagcctaacgaagtttaacattactggctttggagtatatggctgtaacagatgcactccactgagcaccaaccccttgcttatttctgagtgctccctttagctagccttgagctgcggtgctttttcatttgcttcaaaaacatccttcaagattataaatatgacctgtttaggagtgatagctgtccaaatgatcagagagccccctgtatcgaagttgggacttaggcgaaattaaatgcacctgcaaatcgtgtatgtgcatgtgtgctcacaggggagagcatgtgttgccacagtgtgcagcatgtacatggaggtcagagggcagcctgtaggagttggcgctttccttccaaccatgtggggctctggagacggtactcattctcagacttggcagcgagcacccaacaagtcgtctcttcagcctagacgttcaccttttgaagctacaagttacacacaggtgctgaaatcaaacagctgattttcagatgccagagccccggagtcttagtcctatccctcaccccacccttccccacccctccccacttacatacagcagatctgatttctgggtgagcctgccctggtttgagatgtcctatgacatcaccagagaacaacacacagtgacctgggcttgttcctggtgacatggaaagttccagaagtggggttggggtggggaaggtgggtcaagcttgctctgaatgccaccaacatctctggagatgagtgtccttccgagagcaaaggtcagcagtattcactcggagaataaagaaaaggaaaccagaggtggcaacagcaacggtggattgttcttggagccactgctgtgaggtggcgcactcatcggactgagccatggtggactggtaccacctccctcacttccttctcactttcttcttatatcccttctttagtctcagtgccctgaaggcagtggagcaggtgagggcaggcagggataaggggaggaacccccaccatgtctgttcttagtaggacaaatggcagaaagcaaggtcactgctgggaactggagcagcaggtgtctacccagggagtgaggaagaggcccaagaacccaatgaagaagagggaatgggggctggagacaggacctggatggcccagctaccatgagagcatcaaagacgctttgactcgaagagcagagtgaagataggaaacttaactctagcttgaggctctgttaagacaagaccctaaagccacagcttgccaagtttccatggtggtgagtagaggagaaatccagagatgggtagagactgtgctgagtcttcaggctgaatggagttggggccaagagccttgcaggacagatgtcgtaagaagacagtgggtgtatgagctcagggagtggtcgggccaggtctcagtgttgacctgaggggtcactgagggggaaaggaggtatgggaaagggaaatggaggctggcctagcaaggaaggtggtcctttcaaaaggaaggcacagtaaggacaatagtgtcacggcgagcaggctggggaggtggctcagtccagaaagtgggccctgcaaacccttgaaggcctaagttccacaccgggaacccagataaaaagctgggcacggtggcacatacttttagtccctgtgctaggaagttgaggggacatgaggacccctgaggctccagagatcttgaaaaaggaaaaggagggtcaaggcaagcgaggacgatgcccaggtggaggggacagtaaggaggaggcgtcctaagagaataagatcaaggagttcacagccagcgatgatgcgccccgtaagctctatccacaacctgcaccatggcgtagggcatcctccactggctcagcctgagcgcgaacgcacgccagagcttttccttttctggcaatctgttgggttgaggggtaggagaaaagagagcccagtctcacctgattataagaggaggaaggagggtggctggcgggctttcagcaggagcagacagggctctagagcctcccagctaggcacagccctgtagattcccttcctcctggcaaccagactttttctcctggtcccctctcagagcctgggtcacgtttcccattgctcagctctagattttttttttgtctacattttgttttcttaaggtcattcctaagatagctgacccagacggacggggcaaggcaaggtacaggcaactcttccagactcaaggaacctctcacagacacactgtcacaggctatatccctcaccccctcagggatgttcctagcactgagaccctgacatggggtctcctgaccccacatcaacacacacagacagccaggtgcacaggcacttgccgaaacattctctctctctctctctctctctctctctctctctcacacacacacacacacacacacacacacacacacacacacacacacatgacccatacaatcacacatataaacactgccacaagcactgtacttttcccctacaaggttacataccaggagattcccattcacccaccgggctgttatatacaatcccataccttcccaaaagcacagtataacaggtaggatatcaaggcacacacacacacatgcaagtacacacaagcgcacgaactgttggacgtgtgattatatgctaatacattgctgcatacatggtgacaccgatccactgtgacacaaagggtcccaaacaaacacaaaaagaaatggagcctcttatatcttggacacctatctccaatctatctcatatgcatctctgtgtaacacacacacacacacacacaacacacacacacacacacacacacacacacacacacacacacacacaagaatttgccgaggacaggtgcaccagacactagaagacaggatgtggtttcttggctgctcctggacagccctatgctgggtctgtgtctggaaggaagcccagctagggacaaagtctacccagaccaagccgaagcctcagcccccactgccctttgttggagtacagaggccaggggcttgcaacaatcctgcaccaggctgtactctgcagcctggggacacaccaggttccaaaggacatttctcccagaggcctcaagctgccatttcagaaatgggtccccttagggaccctccatccctccatgtcagaccctatgatccctgttttactgatagagaaactgggtttaggatcatcgagggtcctgctaaagagttccagcaaagatcagacctgacctcagaacccagttccacccggttggaacgtcaagtgtcaaatgcttgcttagcttctcagtagcccagctccctcatagagggtctatgggtagaagggaacagggtgagaggagtggtccttcccagaaagcacactggaacagcctaggtcacgtttggcacaagttagctcaaccatcccttaatttgcagggaagcaacttctgccctcaccagacctgctcccttggccttcatgcccaccgggcaggaggaaggcatgggccaagagctggggtcccactctctttgctcccccatccctaagctgctgtaccctaccacctagggaaccctgtttctgagtactcaccctaccacgaatgacaggaaggtgatctcacagacagaaagtaaaatacaaaatttattcttgagtctttccagggtccatgcggttgtgctgtaattattgcaatctaacgttaaagctgcctgtcacacacacacacacacacacacacacacacacacacacacacacctctgcaggcggctaccggagacattagtactcgccataacaagggcaccccatcaaagctccagtgtgtctcttcagcacctgcatttctgctcttatgaaccagggctggagtaagggtcaagatgcttgacattagaggagggagtcttgcagggagaagaaaggaaggcctcaagcttggctctgtcccctcactctcaacctaatctgcaaatgtgacccacagcagcctaggaccagaaggctcaaatccccaccatcctgcctcacaagaaggaactgagcagcgaatctgcggttgtggctggaaagatcccaatgtcaccaggaaagccatggcctgcaggggaacagagaggcagtgccagagactgggaaggtatctcttggggacagttggccctggagaacagggagaggattaatctgggaaagggtttgggagctgagacagtgcacttcctggggaggcacctctgtccacaactcggttctcagccagggctgaggtctgtgccctcctatgtcagaccaagctcaaacggatgcaggcccactccccaacggttaagccctttagctctggaggtggacacaagacatgatgtgtaaagtactcccttctataggaacactgcccagccttgggcctcttctatgcaagggtatcctggcacatttgaacaaccgccctccatacaagcagctggccatcatggccagggcaggagcctggggcaggattcacaggcaggtcagagagagtcagagaagagcccacaagagtccagctgcgacctagtctttggcgacaccaaggaggttggatgttccggtgaccctcggtattctttctggtgggttattaatccaagggggtctaggatgggtattagccgagtgtatgagagggcctggctgatccagaagaaacagggaacctgctgcatgtttgctgcagaggctggggtggaggtggcaagtcagtgccacctgggaggtcatcaggaaggacaacaggctgcagggtccctggggctatgagtcaaagactgtgatgaggtgatgggaggaagctgcatttctacaaccaggccccttcggtcctctagagcttcctgggtaccccatacacaaggaagcccaggaggagtgcaggggaaggcaccgcaggggttctgagtacagagggaaggcagagtgccagtgggtttggaaaaggagttgggaaagtaataagggacaaagacgggtcgcagaagtcagagcagggcaaccctggggcagctggtgccctgacagagcagctggagccgagaagtgaggcagctcttcaggatgagggtagtcacctcatgtccaatccccacctggactcctcaactcctctgtctcttcctcgcctgagccttgcacttcccctgtctggggtcccggagtttctgctcaagtccaggagcccctccgctagctcttgtgcccgcagaacaccgcagcgtccccctcccatttgtcaccggggttcccagggctcacctgagggcgggggccggccctgcccaccgccccgagcagcaggagcgccaggcgcaggaggcttggggtgctggccatggctgggcgctcaggactgggtcatagctgccacctgcggaaccgcgcgccgcgactgatccctgccgggctgcggggggaggagctggcgtggggccgccccgcccgtccgcaggagggatcgggcggggtccctgtcctcttccgcctgggtttcaggaggcccggggccagaccggcctccagcgtcccgggccaggagatgttcggcgctgtgctccccgcgggctccactcaggtttaagagccgcaggagcggagcttctagctctgagcgcctgtggtgcctgcgcctggccagctcgctgcgaccagtggagcccgcctcccacccccgcaccccgatctcctcctggctccccctcaactaaggaaagccacgcccccaccgagtcagtgcttccaaaaggaaactgaggccaggaaaggtgtaggattggtacaaggtcatagtgttggtcagacttctggaaagtatcccacaagctgctagttactagggaagaaagatcggactagttgggtgccacctacttccccaatcctctcctcatcccaagcccagccttctgggcctgcacagcagtcaaggtggtagggatcaggacaagagatcccagaagagtccttagggtcctttctatctaaaactttagaaattgcagggtgaagagggttgaggctggattctgtttttctagaactttccaaatgttccctgtccaccccttgctgtccctgggcctgctacaatgtgtgccctgactagcttaccctatgcacttcagtctgtcttcctacaccacacctttgcccttggctgcagtacaggtcgggagagctccagactcctacctcttctgtgagttaataagtgggacaggcaagccgaggtgtaccactaacctcttgaggaaggcaagaggatgcaccccccccccaccatgaactagtataaggaagttgggtgtggctctactcagccctggacctgcctagggctagtctggaccattctggaagagaagagagattggatgcatagctgcaactcttagagattacagaacttcccaaagtcctgcaggaagtgggtctatacatccagtgctcaatcccgcggagggagacagccaagagaggtgcggagcgcgctccactcagagagagaagctcccttctggtgagctctgcctttgagtcccttgttttagccccagcctgaggtcaagcaggttccccctgtgtgccacacaggcttggctgtttagctgtcaggaccatccatccaaataaatgatctaactagggcttttacggaaagcaaagctggaacttcagcccaggttggagtgagtagccattctctgctcatcaaggtctccagatcttttcgcttttctggtaccagcatctacctaaatgacccgaagtggctcgctttagaaccaatcaggacatcaaaagtccagctgcagggaaggaccagctgattgcccagagggacctgtcctgaagacagcaatcatcaattccccacctgctcatcagaatttagtcacatggccatccctagtttcaagagaggctggaaaaggtactttttattttgggctgtcacaggcacagttaagcaatgtacctttcgttattctgctttttatagctaataacaccactccacagactgagcactgtgttttgttgtgttagacaagctctctctacgtagccctggctattctaggactcactctgtagatcaggctggtcttgaactcacagagatccacctgcctctgcctcccaagtactggaattaaaggtgtgcgccaccactgtccagcaagtctaagaacattttgaagaaaattttacttgggctcctgattctgatgtaaaggtaaagaactacagtcagaagcatccttcacagacttctggagtggtgaagggtatcctacatggaccatcagggtttaatatacctaaccatactggctttgagtatgagggctaaccttgtttgtcaacctgaatagaatcagcattcccttcaggggctttcttggtcagattttttgaaatggaaaccccccaccctaaatgttggtggcatcttctggtggcagcctggataaggagcatggcagaaggaaggcttggatttttgcctgcttgtcttcactcttgctggcaagttcgtctactctactgttgctactgccatgttcccttgctgatattagaataaactttaggctttcagcacaaactgaagaccagaagctctccaggaatcctacaggccttcagggtaaacgactaaggccatgactgttgagatacccagtctcatggactgagattccagcatctaccagattctcagcatctctggtgtgagtcagccatatatgtatacatatatgtacacacatatatgtatacattctatacattccattcctctagagaacactagtacagagagagaacccacatcagaagtaatctattaattcatgcaaccctaactgcatccactaacccatttacccctaactgaatctaccaacccattcatgactaattgtgtgttatttccctcattattgtgtctcatgatcctgacaagaagcaactttagaaaggaaggggttatttggctcatagactgagagaatacaatctattgctgccaccccgccccctgggggggggcatgccctcaagagcagcaggtggttggttacattgtatcccaatcaatagaaagaacccttggtggtctgaataagaataaccctcatataggctcatctatttaaatgttttgttatcacgaagtggcagtacttcagaaggattgggaggcttggccttgttagaggaagtaagtcactgggggcaggttttgaggtttcaaaagcccaagccaagcccagtggctggctggctctctctctctctctctctctctctctctctctctctctctctctctctctctctctctctttctctctctctctctcctttctaaggatctgatatagaactctcagctccttctccagcactaagtcataatatactaacactctgaaactgcaagcaagccccagttaaaggctttcttttgcaagagttgccatggttcacagccctttgaatggaacagatgtggaggggggctgcactcgcacggagatccccagattcccacagtggatgtctgctcaaccatgtgcccagtgctgactctttttcctttcttggttcattttctaatagtgtggcttgggggcaagagcttcttggggctcacttctcaaatgaaaataaagcatttgtgttcttgtacatggggtgtcaatatgtctgggtatgtatgggcagggtgcctggtttctcctttagaatctgaggatccagaagtttctctgtgtgctgtgatgctacctctcatctcagtgtgcatcaccctgggacttgttagcaacatcgccctgggacttagcaacatcaccctgggacttagcaaaatcaccctgggacttagcaacatcaccctgggacttaacaacatcaccatgggacttagcaacatctgggaaggtggggtccagatgcaaacttttagcatagcatacttctgcccctaatgtggttccttccagtttctgtctcagaatgataggtgagactctggtcctctgcacttttgcagccatggctatttcccataagagtccatggggcacttgggaggactcatctctgcagctcctaaagtgtcaggtcccctgttcatagcaatctgcctgttgtgattaatcttgtcaacatgtctggcttcagaaacacctagaaataatttcatatgtctgtgaggatgttttcagagaggcagtattataaagatttttgtttgggtgtgtgttgggggggggttgttcaaggacctgctggagccagagttagagataggtgtgagctggctgtcatgggtgctggaaaggaattcctgccctctggaagaacaaaccagtgctcttaaacactgagacatctctctggcccctcccagaatgtctcaccaagatgacaagactcactctgaatgtgggtgggacaggtccatgagcaaactctccccttacctgaagaggacagagtgagctaggcaccagccttcctctctctccttctccctctccctgtccctgtccccctcctcgtgccccctccccctccccccttcctgatcatggacacctctgttcctgccgccacagctagagcactccatccacctagatgagctgtagcctcgcactgggagccagaaaaagccctttggtcctgaacttgctttttaccagtgatttttgtcttatccctgagaaaagcaccaggcctagcctggccttctctcttcattcagggtcctggaggattaactctctcaagccctcctctgatttgtccctaaagccattcatacactgatgttccatccatttccccatcacaagccctccaagctcattagctccccggaggcagctggagcctgccctgcctccctctcccctgctacttctcctgtctcctctggccactctcctgcaaacacagccccctccgaagtttctctattcttatctcctgactgttcctccattcctagctcagacagccccctttccaggagtagttattcacacctgcccctcactcttcaccctgcccctcattcttcacccctgccactcacccatgttccctcattcttcgcccctgcccttcacccctgcccctcactcttcacccctgcccctcactcttcacccctgcccctactcttcacccctgaccctcacttttcacccttgtttcctcactcttcactcctgcccctaacccctgcccctcattcttcacccctgcccctcacccatgttccctcattctttgcccctgcccttcacccctgaccctcactcttcacccctgcccctcactctttatccctgccccttactcttcacccctgaccctcattcttcacccctgaccctcacttttcacccctgaccctcattcttcacccctgcccctcactcttcacccctgccccttactcttacccctgcccctcattctttatccctgccccttactcttcacccctgaccctcattcttcacccctgcccctcactcttcacccctgcccctcactcttcacccctgcccctcactcttcacccctgaccctcactcttcacccctgcccctcactcttcacccctgaccctcacttttcacccttgtttcctcactcttcactcctgcccctaacccctgcccctcattcttcacccctgcccctcacccatgttccctcattctttgcccctgcccttcacccctgcccctcactcttcacccttgcccctcactcttcacccctgcctctcattctttatccctacccctcactcttcacccctgaccctcactcttcacccctgcccctcactctttatccctgccccttactcttcacccctgaccctcattctttatccctgctccttactcttcacccctgcccctcattctttatccctgctccttactcttcacccctgcccctcattcttcacccctgcccctcactcttcacccctgcctctcattctttatccctacccctcactcttcacccctgcccctcactcttcacccctgcccctcactctttatccctgccccttactcttcacccctgaccctcattctttatccctgctccttactcttcacccctgcccctcattcttcatccctgaccctcactcttcacccctgaccctcactcttcacccctgaccctcactcttcacccctgaccctcacttttcacccttgtttcctcactcttcactcctgcccttcacccctgcccctcactcttcacccctgcgcctcactcttcacccctgaccctcactcttcacctctgcccctcactcttcacccctgcccctcacttttcacccttgtttcctcactcttcactcctgcccttcacccctgcccctcactcttcacccctgaccctcactcttcacccctgaccctcacttttcacccttgtttcctcactcttcattcctgcccctaacccctgcccctcattcttcatccctgcccctcacccatgttccctcattctttgcccctgcccttcacccctgcccctcactcttcacccctgcccctcactctttatccctgcccctcactctttatccagtgcccctcactcttcacccctgcccctcatccctgttccctcactctattcctgccccttacccctaaccctcacttttcacccctgccccttactcttcacccctacccctcacccctgcccctcaccactgttccctcactcttcacacttgcccctcacccctgccccccactcttcatccctgcccctcagtgtcctttcagccaacatagatgcttactctgaatggctctggaaggctgcactggaagcctgtcttttctaagatctctgactcagagtcttggaggaagaggggtcattactactttaaggactcatctctccttgtttcccagggctcttggtccctttcattactaccactgtcagggcactgtggaattatatagtgacaaaagtgttatgtcacattccctgtgctgctagtttgtcctctgtggacattacatatcttggtaacagggcatcatctagaccagtggttctcagtcttcctaatgctgtgaccctttaatgcagctccttgtgttataatgacctcacccccaaccataacattaattccgttgctacttcctaactgtaattctgctactgttatgaaaagtaatgtaaatatctgtgttttctgatggtcttaggcaacttctgtgaaagggtcactagacctctgaaggggtcacagtcacaggttgaaaaccaatggtctatgctcacagatccaatctgggagttctgcccttatcggtgtggcttttccataaaactgaacgctcctggagaaatgcaagtctcctcagtcatttcccgtatcagcatagctcctggccgacggtagggtctcagtaggtggctgttgcaaaccatatgtagggatccaagtgctttctagctgcgtgggctatagaaggttagaaggttctgaaatccttattagggatgggctgtgggagagggcagagtgtgccctgagaatgcacaccccttcccttacaaggctagctagcaagccatcctagagcaggagaaaggatgactccctaaggagagagatctgaatggatgaaatattgtctgctaattagcaagaattatgaggggatggggctatggctcagttggtaaagtgcttgccttgcaagaataaggatctgagttcaatccccaggaacccatggaaaaagccaggtacggtggtgcgccctgtggtctcagtgctgaggaggcaaagacagatggatttctggggctcgctggcaggtcagcctacttggtgaactccaggccaataagagtcttttttttttttttttttaaagatggcagagatggctgtatggtttagagaacttgatgctcttgtgtaagacctgagttctcttcccagcacccatatcagatggtgctctggctccagggtgtatggatgctctcttgtggcctatgtggacaactgcacacacatgcacatatacacatccataattaaaatcatagaatagataagtgcctcctaagggacagcacccaagtcttctggtctatacacacacacacacacacacacacacacacacacacacacacgagagagagagagagagagagagagagagagagagagagagagagagaaacgaggcagagacatagggcagagacacacagagagacaatagccataaatgacagtagctaccgcctactgtgtctctaagggttccccaatcttacaaagcatcatgaactgtttttgtcattccccttttatagatgagaagcccagggctcaggtatagagaaccgctgttcatgagatcagaactacgaaactgcagcccatgaacccccaaagttgctgtagcaagcagcttgatgccttgcagcctggaggattcaggctccctccccaccagcggggctagtgagcgcctccccaggagggttcctcttccataggccagagtgaaaacatctgctcctaccctcatgccaggggcttcttcccaggcgcttgaaggggtctcactttctgtgaggacagcttcactctcagcttgtcctcagaaatacgaatgagagcctcagccagtgaacctggggaaaagacgctggcaaacacttcagggatgcagactaagagcaggccacctctctgtccctacccaggaaagccccaccctctgcaggaagagctggacaggagttggggcagacctctctacttgggaaaaggctggagaaaaaagaacacacacacacacacatacacacacacacacacacacacacacgcacgcacagagagagagagagagagagagagagagagagagagaggagacactagacatgtcgtcccaagctacttctcaaagaaattcacctacaaagaaattcaagatcacattctactcctgagggacaagatgggatgggagctttgtctctgagcctgctatcagcacacaaacatacagatcttagagactgacagtcacgggttcagattcagaccagccacttcctgtgcagctgtcatagctaattctgacacagtgtctgtgaagtgtaggtatgatgagagcatttgctggcctcaggcttagcagtgttcaccccctgcctgtcaccaagaacatgaagcctgccccctagaggacacagagacttcagagttccaaatccacctgcctggaaagcctgcactctgcagctcctgtgtacaaaatcttgtcacatgggaggcccctgcaggcaaggtcttcgatcttcaacctccttcaagaataaaccccaccctaggcactatcatcccaccccatcccctggccagaaagacactggcttctaaccagaggttacttttattgcagttttacaaatgagtaaagctggaaagaaagaaagaaagaaagaaagaaagaaagaaagaaagaaagaaagaaagaaagaaagaaagaaaggaaggaaagaaagaaaagagaaggaaaggaaaggagaaagaaatgtaacatggcttgagatagcccatgtaacatggcttgagatagcccattcaaggttggatgcaaacccacccagcctgcacccccacagaccccacaagccacactgatcacgctgcaggagggttgacaagcagaagcagcccctgcccaacacctggcaccaattaagtcttcagtcagttgcagctttagctctgcagtgaaacccacaacccagtgggggctcagcaaggcagcaggtgtggctcctgaggcccatgtgccattgcacataactctatctgtccaggtggctgctgccaggacccccagttctagcagacaaggaggcttgccctaaggaccctttgccccatgctctctcactgcaggctaccctctttgttccccattcacagagtcagccaagcttaccaggtactgggtcctgtccagctccaggcagtcagcagggaagatttaccacctcttgagctaccgtgattattgctctcttgaggggttgcagcaggctgtattttcaaagtgtcagagcatcgtttgcaaagggacttctgtgtcgagagaagtcagtgagatcacaacccctttacgggggtggggggttgtggggggtggggggagactcgagatccacacgcatggggatttgcctgaggtcacttaggaagatgcaggcagagttcttggaactctggaccaagagagaggaaccaggagattcctgacagcagaagaactgtcccttttccacgtggatgcactagccagaaatgtttcaggcctttgcctgttcccagagtgcaaagaaggtgacggaaagccctagggacaaatggggcctggttgatgagccataaagcatcccctggggagatgcaaaagtgcctttattaggacccatttcttcctctggacaaaaagaaagtcctgcagagctggctggatgctccccagatctgggcatggcctggtgtgtttcagcttcctggggcagccataaatgcagcccactgtgtgcagcttaacaacagacatttcatctcagaattcaagtggcagcgaggctgaggtcgaggtcttgcatgtgtgggttcttctgagaactggggagaaagagtccactccagatctcaccagtttctcgaagcctctggcagccctttgattgtggatagccttctgtgtctttgcatgctttctgcatgtaccgtgtggtctttcctaagcgtgtgtctctctgtgtccagacatccttgacataagaattctggtctgtgggcacatgatagagaggtttcctggcatgtgcaaagggcctggggtccatctccactggagaaaaaagagaaggaggaggaagaggaagaagaaggagaaagaaggagaggaagaagaggaagaaggaggaggaagaggaagaaaggaaagagagagagagagagagagagagagagagagagagagagagagaaaggaagaaagaaagaagatggcttacctaggcataatggcatgtacctattaaccccaccacttgggaggtggaagcaggaggatcagaagttcaaagtcatcctcagctatgtaaaaaaatcgagttcagcagcctaggctgtgtgataccctgtcccaagagaaagggagaagaggaaggaggaagaggcaactccgttagattccagcccacctaaggatctgactcaaacttgattacctctgtaaggactttatctccaaatcaggccacactctagggtcccaggagttaagacttcaagagacctttttagagtgagaccatttgatccagaaagctccgggacactaccccctctctcccttcggtgtttcctgtgaaccatgggaaggggaagaaagtaagatggctgcccacagacctggcccacaagactgcttgctctccacattctggtccctcctcttctgctctgtgcagtatgcatgatcatcaaagagtgccaaggccctagagggtggcagaaccacagagcaggagactgggtccctgcatgcctgcatggagcagagcctcctggcaaatctgcattggtatcatggtgatcccctgggatttggaggctagacagcctggaatgtgcccttagatacaggaccgaggtctgttagtccagaccaagggcccttctgaagatcccttcagagtagccgccattaaatggagggtttcctcacttcctcctaaggtcctctcagttatgtctcaggatgacagaatcagaaagaggatttgggtctgtgtcaatgtggctcctcctgtgtagctcacctccagagttcttcacacatatgactctctgtggagcgagaggatcctgggagggtgcccctgaattgaagctgttatgggaagagagagcctatcacgttttacacacccagaagacaaagggaaagaatgtcacaaggggtgagccttctcctcagagcttttcgtcttcctcacagctgagaaactcaccgtgaccaaaacgagaaatgaaaccaatgttaatctgagtcaaaaagaaggggtctcctcagaccgtcattctggcctactggcaagccctttgcagagacccgcaagtgtgtactctcttcagagtgtccctggcgtcagggagagaggaagtagggac

SEQ ID NO: 33 - DNA, 31980 bp, Homo sapiens
tcttcatctttaaaatggaaaactgggtgtggtggctcacgcctataatcccagcactttgggagcccaacgtgggcagatcacctgaggccaggagttcgagaccagcctgatcaacatggtgaaaccccatctctactaaaaatgcaaaaattagctgggcgtggtggtgcacacctgtaatcccagctacttgggaggctgaggcacaagaatcgcttgaacctgagaggcagagggtgcagtgagctgaaatcacaccactgcactccaacctgggcaacagagcgattctctgtctcaaaaataaataaataaccaaattaaaataaaaaataaaataaaattgaaaggatagtactcctggccccacttccttcctagggctgccaaggtctaagctgagagatgaggggtgtggcaacagtgcatgacagggaaagctggcctggggcgggccgctccttctcccttcctgtcctccgtgcagctgacttctccctgcccttctctgggttctggagatgactctgacccaacctctctgagctctctgagtggggcagcttcctcacctaggccctggcctattgcttcagagacaggtccccaccgggttaacaagaggaacccctttgatgtcctaaaaagaattcctcctgtttttaatgtgccagtttacaagatctcttcacatccatcatcccgtttgaacctcacatgactgtgtggagggcaagcgggggttattgtgtacacattttacagatgaggaaaccgagtcttggaggagttgagtaatccattcaagtcagttggagcagacatctcctgactcacagggggcccacctggagaaaggccaggggcactcaggtgggctggcagggctgggagggctgggagggaggatcagggccgtgagctgagctggcatcggcatccagtggagctggtgaggtgggcaaaactctgggctctgattgatttgcactcagacaccaacaccactgcatcctagctaatgactggataagactttagcatctcatatgcctgtgaatggagatcattctctggagtgttacaggaactctgcatttgaaacacaggcctgattcttgccatctctactcctgctcccagctctcacagccagagtcaacagtgcccgcctgtccttccactgccaccacccaaactgtctacctgctgcccttaacaacagataggatccaactcctagagtccccaagcaattcagggaccactcagaggtgaaacaaccccaaccattctcaaccttagcaaaaggaacagggtggtgaagggtactccccatgcccatagggacacaggacactggccagaccaccaagtggcgcctggccccccatgggccttcctgacccggtagccacccctcccaggggaaggacacagtgttctcagatgtgggcccaggggctgtgtcatggaggagctgggaagggtttagaggacctgggtttctgtctttggtttttttttttctttccactctagtaaaatcaaattttatatcattgattttgtaaagtttaattggaaaatgaatttctttgtgttgaataagtgcaatttgctggtcaaaattcattcaaacataggagtgagagaggaggaagtgactgtttattgaggaactgtgatgtgccaggcactccacaagatgttttgctcattcaggcctcctgagcaccctgggagacaggcattccaatgagcccatttcacagatgaaggcatttagggtcaaaacaataagccaaagtcacccagctggcaggaggccacgctggaatccaagctcagcagacagtgaagaggcccgtttgctctgctcccagcctgtctgctaggcttgcagaaaagcactgactcttgtcctctggcacctgccacctgcctgtctggggtgggaaaggcgagaggacaagggtgctgctttttgttataatttgattaaaatgcatttgtggccgggcgcggtggctcatgcctgtgatcccagcactttgggaggctgaggcaggcggatcgcttgagctcaagagtttgagacctgcctgggcaacatagtgaaaccctgtctctaccaaaaatacaaaaaagtagccaggcgtgttggtgtgtacctgtggtcccagctacttaggaagctgaggcagggggatcgcttgaacctggaaggtggaggttgcagtgagctgagatcgcgccactgcactccagcctgggtgagcgagaccgtgtctcaaaaaaaaaaaaaaaaagtatttgcatatgacactttgttaaaacagtgccatggctcacgcttgtaatcccagcattttaggaggatcacttgagcccaggagttcgagaccagcttgggcaatacaaccagaccccatctctaccaaaaaataaaataaaattagtcggacacggtggtgtgcacctgtagtcccagctactctggggacttaagtgggaggatcaattgagctcaggagttcaaggctgcagtgagccatgatcataccactgtactccagcttaggtgacagagtaagaccctgtgtctaaaaagcaaacaaacaaaaaacaaacagttattgagtgaaaaacaaaacagagaagtggcttatccactgtcactgggcaagttcacggcttatgctgggatgggaacatgggtctcctgactgtggtcagtacttctgttcccaaataccctgccacagcctctagcctgggcactgggctgttcctgcttctcctccctcattacccccccatagcccagtaaccccccacccctagctctggtttccctttctgcctaaagggagacgctctgtcctgatatggagcattccccccaggacccccagccctaccactcatgagttggaatagttccgaaaggacatagcctgtctgctcctgctatctctgcctgccgtgtggggagctggtccagaatgatggagcccctggggagcaaggggtcgtgtccagcttgggagggcttctggagacctggcccgagtcccagatccttcttgaactagaaaaatgcctgctgtttttagtgcattctcagttgacaaagcattttcttacctctaatcccattggatctttataatgaagaaggaattccctgtcaatctgcattgtattttatttaattaatttatttattggttttgagacagagtctcgctctgttgcccaggctggagtgcggtggcatgatctcgcctcactgcaacctccgcctcctggttcaagcaattctagtgcctcagcctctcaagtagctgggattataggggtgtgccaccacacctggctaatttttttaaaaaatttacttatttattttgagacggaatcttgctctgtcgcccagactagagtgcagtggcgtgatctcagctcactgtaacctccatctcctgggttcaactgattctctcacctcagcttcccgagtagctgggattacaggcgcccgccaccatgcccggctaatttttgtatttttagtagagatgaggtttcaccatgttagccaggctgctatcgaactcctgacctcaaatgatctggctgcctcagcccccctgcattgcattttaaatctgagagacagaggctgagagtggcctgtgtctagcaccaggacaggctacacagtttggaggtccagtgcaaatgaaaatgtgggtctccttgttcaaaagtattaggactctggccaggtgcgatggctcacgcctgtaatctcagcactttgggaggctgaggcggatggatcacctgagatcaggagtttgagaccagcctggccaatgtggtgaaagcccgtctctactaaaaatacaaaaattagctgggcatggtggcagatgcctgtaatctcagctactcaggaggctgaggcaggagaagcacttgaacccaggaggcggaggttgcagtgaaccgagatcacgccattgcactccagcctgggtgacatataaggtccagccctacggggcttagcaggtgttctccccgtgtgcggagatgagagatcataagaaataaagacacaagacaaagagataaagagaaaacagctggaccctggggaccactaccaccaagacgcggagaccggtagtggccccgaatggctgggggcactgacatctattgcatacaagacaaggggggcagggtaaggagggtgagtcgtccaagcgattgataaggtcaagcaagtcaagtgatcatgggatagggggcccttcccttttaggtagccaaagcagagagggaaggcagcatatgtcagcgttttcttctatgcatgtatcaaaaagatcaaagactttaaggctttcactatttcttctaccactatctactacgaacttcaaagaggaatccaggagtatgggaggaacatgaaagtggacaaggagcgtgaccactgaagcacagcaccacagaaaggggtttaggccttgggatgactgcgggcaggcctggataatatccagcctcccacaagaagctggcggagcagagtgtttcctgactcctcgaaggaaaggagactccctttcttggtctgctaagtagcgggtgccttcccaggcactggcgttaccgcttgaccaaggagccctcaagcggcccttatgagggcgtgacagagggctcacctcttgccttcttggtcacttctcataatgtcccttcagcacctgaccctataccctccggttattccttggttatattagtaatacaacaaagagtcatattaaaggctaataattaataatgtctatactaatgattgataatgcccatgaccatctctatatctaatttgtattataactattctcattctaactattttctttattatactgaaacagtctgtgccttcaatctcttgcctcggcacctgggtaatcctccgcccacagtgacaagagtgaaactctgtcttaaaaaaaaaaattaagaatttcaagataggacagcagagctttaaattttttttttttcctagaggcagagtcttgctctcttgcccaggctggggtgcattgttgcaatcacatatcactgcagccttgagctcccgggctcaagtggtcatcctgctttggcctcccaaagtcctgggattacaggcgtgagccactgcacccggcctgtagagctttaaacaaagcacaggctgcttctgagcacagggccctcgtcacatggctatgaagccagccctgcctggacccagaaccctggtgtgggcactttatagcttataagccctccagtcaagaggcctcagcctgagcctccctgagcctcagtttcctctcctgtaatctgtgaaagcactgagcactaatctcccttccgggctagctttctgcaatagcttaaagctcccatcccaagatctctccaagaatcctcttaccaagtccctgctcccagcctggctccctggtccccatccctctcccctctcacaccctttcaaagcccagaaaggacaggtgaccgagtgactgtctctgggctcatacagtggggtggtctcctgtgacaggctagggcttcagggtatggcttagcctatccctcacacttccttggggcctcttggggcagacagcccaggcggggcccagcaggcacactagtcaggtgcctgatgatgagggcaggcgcctggaactgggtcaacaatcgctcacacggaggtgactcaagcagcaaggggaaaaagaggtgggggtggggaggtggctgtttctgtgccctcacttgagcctcagcttttagggttgccagatttatttttatttttatttttgagagtctcactctgtctcccaggctggagtgcagtggcgcaatcttggctcactgcaacctctgcctcccaggttcaagcaattctcgtgcctcagcctcccaagtagctgggattacagatgtgcaccaccacccctggctaatttttgtatttttagtagagatggggtttcaccatgttggccagtctggttttgaactcctaacctcaggtgatccacccacctcagcctcccaaagtgctgggattataggcgtgagccaccattcctggcagcctgaaaattttttaatttttttttaatttttttttttttttagtgatggggtctccatatgttgcccaggctggtctcaaactcctaggctcaagtgatcctttcaccttggccttggcctcctaaagtgctgggattacaggcgtgacccactgtgcctgcctgctggtatgtaacttgttgttttttttttttttttagacaaagtctcacttgccctggctcaagtgcagtggtgccatcttggctcactgcagtctccgcctcccaggttcaagtgattctcctccctcagcctcctgagtagctgggattacaggcatgtgccaccatgcccagctaatttttgtatttttagtagagacagggtttcaccatgctggccaggctggtcttgaactcctaaccttgagtgatctacccacctctgcctcccaaagtgctggattacaggccaataggcctggccccctgtaacttttttttttttttttaatttttgagacagagtcttgctctgtcgcccaggctggagtgcagtggtgccatctcggctcactgcaagctccgcctccctggttcacgccattctcctgcctcagcctcccgagtagctgggactacaggcgcctaccaccacgcctggctaattttttggatttttagtagagatggagtttcaccgtgttagccaggatggtctccatttcctgaccttgtgatccacccgcctcagcctcccaaagtgctgggattacaggcgtgagccaccacgcccggcccctgtaacttcttaagcgaaggaaaataaaaaaaaaaaaaaagcagaagccacaaaggaaaagattgaccaatatatttcagatgacataacaacaacacaaaagacaaatgacagattgggaggaagcatctgaaacatacaaaatacccagaatatataaacagctcctacagttcaacaagaaagaaaatactgcaaaaacaatcagcaaataatactgtgatggtagaacaatgtatctacttggatggtgctcctggattagattaacatttaaatcagtgaactttggttaaagcaaattgctctccattgtagggagaccccctgaaactattgctacggaataaaagatgaaatgctcctgattattgtaaatacgaaattgcatgcaggattgtgtaaagacaatgccaggttggactgccagtataagccaacagctcgtgatgtgcttccccctgaagagagcctatgaacagacgtgcagtcagggaggtttcacatcaccaatattcctatcccagaaaagcagatgttcatagccctgggaatggaatgtgacccttgtggagggcctataaatggacgcatgagcggcacctgttcatatggataagatagggctataaatgccctcatcttgccatggctcttctaggcctctttaaggttaaggcatactcccttctgataatttctggtctaactggttatctagcttcacgtcctgtttctatggattgtttgtaaccagcttttgctgcaactcttactgctgattaatatcttgctaatcataggttatggaaagactgtgtttctgttttaaggctctgttagaaattactgatgcacacactatattgtaaattcttatctctgtatactgtacttctgcatacagatgttatgttaaagaattacttcatccccatgtgaccatctcacctcataatcaaacgaccctaaatccctcactaacctaccctcgccctcactaaacttaataataaatgctggtatatccagtgcattggcagcatcgcaggaccagaaggcggtgacccccttggacccagctttcactatcttgtgtgtgtctattatttcccgacctgccgatccacctggggacaaagagagagccccattgccttgtgggctgctggccagatcccgcgatactccataatgtggatggacctgaataaaacagaaagacgggcctcgccgaactagagggaattctcctgcaggctaccctcagacttaaccatcagctctcctgggtcgccagcccaccagctcacactaaaggcttaggatggttatgataagaaagacagatgataacagaagttaaccatggatgaggctaaagagaaattgaaaccctcatacatcgctggtgggaatgtaaaatagtgcagctgctttggaaaacaggctggtagttacacaaaaggctaaacagaattattatgtaatccactaattctactcctaggtatatacccaagagaaatgaaaacatgtccacacaaaaacttgtatgggccgggcgtggtggctcactcctgtaatcccagccctttgggaggctgaagtgggaggatccctggagttcaggagtttgagactagctgaccaacatggcaagaccctgtctctacaaaaaccacacaaaaattagctggacatggtgataagcacctgtagtcccagctacttgggaggcggaggtgggaggattacttgagcccaggaggcagaggttgcagtgagcagagatgacaccactgcactccaacctgggtaacagagcaataccctgtctcaaaaaaaaaaaaaaaaatgctggggggatgatgaagataggcacagtggctcaagcctgtaatctgtaatctcagcattttgggaggctgaggcagcaggatcacttgaggccaggagcttgagaccagactaggcaacatattaagacaaaaaaatacaaaatatagctgggagtggtggcatgtgtctgtattcccagctactcaggaggctgaggtgggagggtctgaggctgcagtacaaggtggcaccactgtaatccagcttgggcggcagaggaaggctctgtctcaaaaacaaagaaacaaacaaaaatgggccacgcgtggtggctcacgcctgtaatcccagcagtctgggagattgaggtgggtggatcacttgaggtcaggagttcgagaccagcctggtcaacatggcggaaccctgtctctactaaaatacaaaaattagctgggcatcatggcacatgcttgtaatcccagctatccgggaggctgagacaggagaattgcttgaacccaggaggcagaggttgcagtgagccaagatcgtgccactgcactccagcttgagtgttggagtgagactctgtctcaaacaaatgaaaagaaacaaacaaaaaagaaatgagatactgatacctgctatgtgataagctttgaaaacattatgctaagtgaaagaagccagttgcagatcacatattataaaatttcatttatatggaatatccaaatctatagaggtagaaagtagatcagtggttgcctagggttagggagggtgactgctaaaggacataaggctgccttctgtggtgataaaaatggtcttaaactgattgtaatgatgctgcataactctcttaagacactaaaaaccattgagttgtacactttaatttttttgtgttggcgggggtggatggagtctcgctctgttgtccaggctggaatgcagtggcacgatctcggtttactgcaacctctgcatcccgggttcaagcgattctcctgcctcggcctcctgagtagggaattacagacctcgttatcgtggcaccttacccttctgatgttaaaaaaaaaaaaaaaaagagcgagagagagagagagaaacatttgtgaagtaggttgttgagtctcagcactattgaccttttgggcaggatacttctttgttgtgggggattgttctgtgtgtcgtgtgatgtttagtgggattgctggcccttacctaccagatgccagtgtccctccaccctgagttgtgacaacccagattgtctccagacactcctaaatgtccctggccggcaaaattgccgctgctcaagaatcacggctttgacgattagactttgtgatatttgtttcagtctgtttaggttttttttcttctacctgtatttttttctggttctgggtggttgtaattagtaggttattgatcgattcacctaacatttcatgaaagtttcatgtgtgtgtgtgtttcaatagaagcataaactatactccctagtctcaagatacacaggaaggaaaataagcacaaatgtgtcaccagggcacagactagtactaggtcctcagcaggccaggtgtcttatccgctgtctgggtctgctctagctccaggcttagaacccctgccacacgactccacagctcggttggcaccctttccctcctccgacttctgctgcctcgagcttggttagccatccccctgcccctgcctcatcctcagctccagttccttgctcaggctgcagcagtctccatcccctgtgcagacactgccgttcctccacggcccagtatcaggctttccctgggcctctcctctctcctggcccatctcccatcatccatctctgcctggcccaggccctttggcaccaagcaggctgactcttgtcactggctaatctgttctgtggtacattttctctcctcaccctcccatatcaattcctcgaaggcagggccgatctggagactaggaagccacttctctttcgacagcccccaccacagcccagcccgtgccaggcacccagcagctcctgaagcccactggcattgaacatggcattcaatccctgccaagcctgcccttcccatctggtttcccagggctcttcccaacacctcctcctccacctgccagttaaaatcttcccagactcagctcaaggagatgctcctaaggtggaatgaaatctcttcttccccacctggagacaatctacttcctctccctacacctggcaactggcgcacaaccttgtatcttaaattagattcagcctgagactgtctcccaccaatccctgctccctgtcctgctgagcaccttgaggaaagggctttggggctgtttatctttgtcctggaaaccatccttcaactcactctggggcctgcctagcatgtcaaccgagtttggagaatagggcagaatagggcaggacaggacaggacaagacagggcaggataggataggagcgagccagctcagtagctcacatttgtaatcccagcgccttggggggctgcggtaggagaatcgctttgggagcaggagttgcaggccgcagtgagctatgatcagcttgggcgactgagcgagaccctgtctctaaaacaaacacacaagtccgggcgcggtggctcatgcctgtaatcttagcactttgggaggccgaggtgggcggatcacgaggtcaagaaatcgagaccatcctggccaacatggtgaaaccccgtctctactaaaaatacaaaaattagctgggcgtggtggtgcgcgcctgtagtcccagctactcgggaggctgaggcaggagaatcgcttgaacccgggaggcagaggttgcagtgagccgagatcgtgccactgcactccagcctggcgacagagtgagactccgtctcagaacaaacaaacaaaaggatagaaaggcgagcacaaatattcccaattcataacactccctcgcactgtcaatgccccagacacgcgctatcatctctagcaaactcccccaggcgcctgcaggatgggttaaggaaggcgacgagcaccagctgccctgctgaggctgtcccgacgtcacatgattctccaatcacatgatccctagaaatggggtgtggggcgagaggaagcagggaggagagtgatttgagtagaaaagaaacacagcattccaggctggccccacctctatattgataagtagccaatgggagcgggtagccctgatccctggccaatggaaactgaggtaggcgggtcatcgcgctggggtctgtagtctgagcgctacccggttgctgctgcccaaggaccgcggagtcggacgcaggtaggagagcggccgcgcagacctctcgcctgctcctgcccaggggcccgccagggccatgtgagcttgaggttcccctggagtctcagccggagacaacagaagaaccgcttactgaaactccttgggggttctgatacactagggggagttttatgggaaagaggaagcagtaattgcagtgacgccccgttagaaggggctttctacctccccagcattcccccaaagcagggaccacaccattcttgacccagctccacccctgtcggtaggtgctggcttcttcccctctcctggtggtggtgggtggttcccgcggcggcctggagccggaggggcgcgcgaccctgggctgggagctccgagggcctgggaacgagacctgagaccttggcttctcgaaggtagtagggacttgggagtggtgactgaacctggtctggctcctccttacttcctcttgttgcgggtgggacgagctagcttccgcctctcccagccactttttcctgctcatttgcagctaggttggctccccttttgggaatttcctctccccttggcactcggagttggggggtgccacctagtggaagataacggagctagggtcttgaagaggctgctgtcccctctggctgttttggcggtgtagggtggcatgagagactgcgactcgcctcctcatccctgtttctgtatgcgagtgcttgtattcagtagaagcatacactatactccctcaatttagggtaaacaggaggggccacatgcacaggtaattcaccagggagccgaacactcctgtgcagacagactccccttcccagcaagccatggcagcggacagcctgctgagaacacccaggaagcaggcggtgccagctgcaggtgctttgcctgggagctgtggggctgaggagagggtccactgtccaggaccagtgaacttcatccttatctgtccaggaggtggcctcttggggatgctgagttaggggaggggcacttgaggaaagccaggtggagcagagaggatgtgagtgactgggtgggtgagatttcctgcccctccccccgcagtggtatccacacctagactcgtggggtaactgaggcacagacagagagcaacttctcaggccctcacagttggcaattctaggattaggacccaagtgcgattttcaggcagtccctgtaccctgtttctgttgtacctgttgcaccattcccaggcactgcccatcgtgccactagtgatatgaacccaggtccaatacgctctggggccatcaaagcctgacgtcaccatgacctgatgtgtgacgtgttataggtgtcccttggtatcttcacggaactggttccaggaccccaaaatctgtgggtgctcaagcccctgagataaaatggtgtaatatttgcatataacctatacatactttaaatcatttctagattacttatacctaatacaatggaaatgacatgtcggctgggcgtggtggctcatgcctgtaatcccaccactttgggaggccgtggcaggtggatcacctgaggtctggagtttgagaccagcctgaccaacatggtgaaacccccatctctactaaaaatacaaaaattagccaggtgtggtagcgcacacctataatcccacctacttgggaggctgaggcaggagaattgcttgaacctgggaggcggagttcgcagtaagctgagatcgcgccactgtactacagcctgggtgacagagcaggactccatctcaaaaaaaaaagagaaaaagaaaaagaaatgccatgtaaatagttgtgatcctgaattgtttagggaataataagaaagaactatctgtagatgttcagtatagatgcacccatcgtaagcctaactacattgtataactcagcaacgatgtaacattttcaggggtttttttgttttgttttttgagacagaatctcagtctcactctgtcacccaggctggagtatgttggcgtgatctctgctcactgcaacctccacctcctgggctcaagcgattctcctgcctcagcctcttgagtagctgggattgcaggtgtgcgctaccacgcatggctaatttttgtatttttaatagagatggggttttaccacgttggtcaggctggtcttgaactcctgaccttgggatccgcccacctgggcctcccaaagtgctgggattacaggcgttagccaccgcgcccaatatattttgatccctggttggatatggagggctgactgtacttaacatctctaagcttcagtttcctcctttaaaataaaggtgtggctgggtgtggtggttcaagcctgtaatcccagcacttagggaggctgaggtgggtggatcagctgaggtcaggagttcaagaccagcctgaccaatatggtgaaaccccctctctgctaaaaatacaaaaattagccaggcgtggtggcgagcgcctgtagtcccagctacttgcttgaacttgggaggcagaggttgcagtgagctgagatcgtgccactgaactcgagcatgggcaacagagcaagactgtctcaaaaaaaaaaaaaaaaagggggtgagcagacgtggtggcacgctcccacagtcccagctacttagtaggaggccaaggttggaggattgcttgatcccaggagtctgagtccagcctgggcaacatggcaatacctcatctctaaaaataaaataaaagtaaaggtattaattactactttggatggttgttgcaaagaaatatatataaaataatggagagtcttgtaactggctcccaagaggctcaacagacattactgtttttgcttcttcattatgagttacctctctggccaccccactgaactagctgggctagctgagcctgggagaagagttgtttaggaagtgagaggctgctctccacagagactcaaggctcagttcctcctggtgactcagatgggcagcccagtgggcacacgtggtctctctccacatgtggctgagtttcacttccagaatagatggagaggcaagggcagggtttagcatgcttgaggaatctcagagggccctggtggtgtgggggaccctcagaacacaggtgtctcaagggctgacccagcttctgtgtccttttctctgggtgaggaggggacattcatgggcagatggtgacctctggggaaggcagcccagactccactggccaccatatttcctttttcacaactttctcacccctgtggtttcccatgtcatcatgtggccgcttcccgcaaggccttagcggggtgcaggtatgaacatagtgtcaggcaaggaggcatctggaggggaaccctggcttttcctggggggactccctccctgcaccctagccctgtcctctcccatggctactgatgccttcccctcaccccagaggtggcccacatctgcacagatcagacccacaaaaatcacgtcttcctgactctcataagcctgcccagtgaggcccaggcattaggccatgtgctggggactcagacccacacatatacgcatgtcagcattcatgcttacaggtccgcacatgctggggcaagtgtcacacacggggcgctgtaggaagctgactctcagcccctgcagatttctgcctgcctggacagggaggtgttgagaaggctcaggcagtcctgggccaggaccttggcctggggctagggtactgagtgaccctagaatcaagggtggcgtgggcttaagcagttgccagacgttccttggtactttgcaggcagaccatgtggaccctggtgagctgggtggccttaacagcagggctggtggctggaacgcggtgcccagatggtcagttctgccctgtggcctgctgcctggaccccggaggagccagctacagctgctgccgtccccttctggtgagtgcccctcagcctaggcaagagctggcagcctgggttttcccaaagggtcatcttggattggccagaggaggacgccaggcacaagtctgtggtttatcattttccctgtctttctaggacaaatggcccacaacactgagcaggcatctgggtggcccctgccaggttgatgcccactgctctgccggccactcctgcatctttaccgtctcagggacttccagttgctgccccttcccagaggtgagcgtgccatcagcccagtggaggggcttaggtctgcatttatgcttttcctgcactctaccacctgcagataaaagggccctgccaatgcaggtttctctgtgttccacaggccgtggcatgcggggatggccatcactgctgcccacggggcttccactgcagtgcagacgggcgatcctgcttccaaagatcaggtgcagctggggtgtgggtgcagggcaggcagacgggcagcatgtggagtctggaacccaggagcccagctggcgggggcagccctgattcctgcccttgtgccctcattcatgtggcatctgtactaagcaacagccctgctgtggacagaggggcagcactggggataggagggtgcgggagaaagtgcaagactccaggtccaggcgttgtgggggtggggagaggtcgagctgggccggtctaataccaacccatggtcagtgggtgccccttccccatgccatcttgctgagggagggactggattgtgaggagggtgagttaggcctgcctaggagatcactgagccttagtgtcaccctcaaaccccagtagctgggcttgcaggccctggtgccaccagctccttgtgtgatgggggagtcaccttccctgagtgggctggtagtatcctgggtcatcttgtccacaggtaacaactccgtgggtgccatccagtgccctgatagtcagttcgaatgcccggacttctccacgtgctgtgttatggtcgatggctcctgggggtgctgccccatgccccaggtacaaatctgggggagatgggggtatgtggagggaagtgggggcagagttgggggccaggggcagggggtgaagacggagtcaggaccattttttctcaggcttcctgctgtgaagacagggtgcactgctgtccgcacggtgccttctgcgacctggttcacacccgctgcatcacacccacgggcacccaccccctggcaaagaagctccctgcccagaggactaacagggcaggtgaggaggtgggagagcatcaggccaggggctggggcggggcctcattgactccaagtgtaggaaaaagtttcctccatcctggctgcccctcacgtttgctcctcttccagtggccttgtccagctcggtcatgtgtccggacgcacggtcccggtgccctgatggttctacctgctgtgagctgcccagtgggaagtatggctgctgcccaatgcccaacgtgagtgaggggctggagccagcttggctgtgtgcccccagccacctggccctgacacgcaccttacaggggctctgtggcatggggctggctggctgcttgctgggagcctggctgatgcagggttcatgctaccccctagtgggggattggggcagtgccagccatcagcctggctgctccctgtgtgctactgagcctggaagtgacaaagacccacccctgtccccactcaggccacctgctgctccgatcacctgcactgctgcccccaagacactgtgtgtgacctgatccagagtaagtgcctctccaaggagaacgctaccacggacctcctcactaagctgcctgcgcacacaggtaccagaggcagggtgcagatacaggggtggggccccctttcctcccttttaggcctggccttaggatcactgcaaggtggtgtaagcggtaccctccatcttcaacacctggttccagctgtggagccggcaaagggttgatacccctgagggtccccagtgccacttctgacctgtcctctctgcttccctcacagtgggggatgtgaaatgtgacatggaggtgagctgcccagatggctatacctgctgccgtctacagtcgggggcctggggctgctgcccttttacccaggtacccaggggtggcgggtgggtgggctgagcacagtgtggcaggcagccgggccccagtgcccacctgcccttcttcatctgccctaggctgtgtgctgtgaggaccacatacactgctgtcccgcggggtttacgtgtgacacgcagaagggtacctgtgaacaggggccccaccaggtgccctggatggagaaggccccagctcacctcagcctgccagacccacaagccttgaagagagatgtcccctgtgataatgtcagcagctgtccctcctccgatacctgctgccaactcacgtctggggagtggggctgctgtccaatcccagaggtatatgggaggggacagcatcttggcctgggcaggtgggtggccaagctcctattgctttctgccctccgcatagcccataggtgatacccagctctgacagattcgtccccagctggaggtgctgtaagcaggagaggcgggctggagtaggtaggggctcggcactgcgccccacatagtggctacctacaacgccctttcctgcccaccccccaggctgtctgctgctcggaccaccagcactgctgcccccagggctacacgtgtgtagctgaggggcagtgtcagcgaggaagcgagatcgtggctggactggagaagatgcctgcccgccgggcttccttatcccaccccagagacatcggctgtgaccagcacaccagctgcccggtggggcagacctgctgcccgagcctgggtgggagctgggcctgctgccagttgccccatgtgagtgcctccctgcctgcccctggataggggagctaagcccagtgaggggacaggaacataatgccattctgtgctcccttccccgccaggctgtgtgctgcgaggatcgccagcactgctgcccggctggctacacctgcaacgtgaaggctcgatcctgcgagaaggaagtggtctctgcccagcctgccaccttcctggcccgtagccctcacgtgggtgtgaaggacgtggagtgtggggaaggacacttctgccatgataaccagacctgctgccgagacaaccgacagggctgggcctgctgtccctaccgccaggtcagtgccaacccccatcctggggctgggtatggccagggaccaggtcccacctcgtccaaccctctcgcccccctctgaccatccagggcgtctgttgtgctgatcggcgccactgctgtcctgctggcttccgctgcgcagccaggggtaccaagtgtttgcgcagggaggccccgcgctgggacgcccctttgagggacccagccttgagacagctgctgtgagggacagtactgaagactctgcagccctcgggaccccactcggagggtgccctctgctcaggcctccctagcacctccccctaaccaaattctccctggaccccattctgagctccccatcaccatgggaggtggggcctcaatctaaggccttccctgtcagaagggggttgtggcaaaagccacattacaagctgccatcccctccccgtttcagtggaccctgtggccaggtgcttttccctatccacaggggtgtttgtgtgtgtgcgcgtgtgcgtttcaataaagtttgtacactttcttaacagtgtctgatttgccgccctgcctgccctccccagggccccagaacaggggttcacgtccactgccaacactcccctcccctaccccacagaaagacatacacagccttaacctcaccagttttatatttgctgctgcccacatcggctgtatcacattaccccctagtccccagagctgtcccagccaccagccctgtgacatcgtagcccagagatgggctagtcagcaagcagcaccccctcccctcccaggggtccacaaagaacgccccctcccttcccagccctcacactagcagctgaggctgggtcacccctcctgctttcccacaatagagctttctatgtacagccacgtctacacaggcactgcttccccccagccctcctccccggcacctccccgtgggggtctggaccccccctcctccccggcttggaggcagacacagggtcccttgcaagacacgacccagcaccaaccacggaacagctccaaggcccctgggcccctctccggcctggggctgggagctacgcgcgagggcccccgcgggcccccggggcgcgcaccctgggtgcgggcccgcgcgggaggggcggtgccaggccctgcgcgggcgctacttgacgttgaacaccatcagcggccgctcctcccgccgctgccacgggctcttcttgtctcccgcctcgtcgcccacctccgcccccagctcgtcctccgggctggtgagcgagtcgcgccgcagctcgctggcgctgctgcgggagctgtccccgcggctgcggccccgcccccggggtaccgtggccgcccggccctcgggcgccgccacctcgtccagcagcggcgtcagcgagttgtcctccggagagcagaggcccgtgcggctctcgctgctgctgggctccgtgtcctcgctgagcgccaggcgcgggggcgcgggcggcggcggcggcgcggcaggcggggcgcgctcccgctcctccctcgcgggccggcggcgcgcgggccgcgcctcgtggacatctacgcccgagtccaggctggcgtcggtgctgcgtgccccgccgcccgcctgcaggtcgatgtaagagtggcgcacttgcgagttggagcgcccgtcgagggacacgaaccaggcgcgcgggtgcggcttcacgcccagttccagcagcttcttctcggtcagggcctgcagctccccgttgagctgcgccatggtggactcgttgaatagcacagggatggtgactgagccactgacgggcgccgcgcgcccggccccccagccctcgccgccgcccccgccgccctcgccccccgggcccgagtggcccggcatctgcgggcgctgggggtcgggctggggaaaagcgcgcgccgggccgggtgccgtgccctccggcggggccggctcgtcgcccacgccggcggcgcccgcctcgccgccgaggcgcacgtagtgcgcggggatcaccagggtgggcatgacgttgcggtagacgttgtccttgaggtggtcgatggagccgcagaagatgagctgccccgcctggcccagcgacggcggccgcgccagctggtccaccgactgcgacagcaggaagtcgggggtcttgccctcggccgcccccttgtggcccaggtagtggtcgaagggcggcggcggcgagggcggctcgtgcaggaaggccgcagcccccgagggcccccgccggtgctcctctaggccgggctccagcccgccggggccctcggccgagcgagcgcccttgagcccggcgctctcgcccccgcgggcacccgaaggctcggcggccgggcggctggcagagcgcggcttggtgcggaagaagtcatcccgggaggaggccaagtcccgggagctggagaaggccgagtggagggggcctggaggcggagcctcggggtcccccgacggggcgggttccaggggtcccccacagatgaggtggagctgggacatcgaggtggcctggtctcgtttgttaccgtcagagggccccgagagctgcagcttgcggtgctgttgcctcggcttcaggcagcgcctcctggaagggagggagcagaaggggccgctcaggaaagggtgagggccaaagtaggccccgaacccccttagatgcaagacaagagacgaatatagtggaagaggtggggagaatgcctggggcgctcaggagagatggcggggagccgccgtgtccgtttggcgatcccctcagggtcaactctgcactcctctgcatgtaggatgtgctgcgagaaccagggatgagcatctaagctgtctatgggtgtgtccggcctggagtcctctgggagagagagctgggctggtaggggcagtggcagatctctctggaggggccgggctgcaagtccttaagccctgcctcccctcccacctccccgctgtcttcaaccaccagcaccagcccttcaggtcttagcatgtttgcaggaagtcttttcctgtctgccccttgaggaccagaagtggattttatgcatctttggggccccagggcccggtacaagtgcaggggagggtgagggaagccccgtgctcaccggcagtagtagatgagcagacacagcaggataagcaccagcagggccagggctgccaggatggtgagcaagaagatggtgtggtaggtgccgatgtcctggatgcccgacgtgatggtgaccagccctgtgccaggcgagggcttagcgttcaggtgtagacacccttcctgcctttcagaagtctgctctcccagctcccctcctccgcggcctctacgcccactgccccactactcttaccagccgtgggggaggccatggcggccacccagtaccccagctggggggagacgaaggtccagtagagctgccggccttccttccggattacaccagtgccattgcgcacccacagccctgggagaggcaggggttttgtcacacttgagtcgctcccactcaagtcccactttcttctctcaactcaagcacctgcagccccctgaggcacttaccactcttggggtcaaatctccaggctggaatgctggtgcccacggtgagggcacgagtctcggagggcacgggcagggacaggtgaatggggcctgagagcggcacctctgtcccattacctgtcagcaggtgcacgctcacagcagtcaggggcatcagctccagccaggagccattgcctgagggaagagggtacagggctgagggctgatcctgagcctggggagaccccatccgtgctgggcacccagcctacctgagctggaggcctcagtgcccaggaaggcagggaaagcccgcatttcctgctgggtgctggcaggcgtaagtgacgcccagagctggctgtaggtggagctgacaggcaggcgggcagcccggcgctggaactgcaccaagggctgggagcgggcacctggagggaaagaggggctgcagtggcttgaccatggacagggatccccagggaccagagcagaaacccattatctaaggaaaagggggacatgaggtcaggccactttggaaggccagggagggtgatgccttggggagaaagctgggcagtcatggaatgttaacctggaagggacatggacctgaaatctctgtgtgaccctcagcaatttacttgttttagtagaaagtttccttatagaacctataaaatgttgcgatccagatcctcaaacagtattgtctactatgtggcaggcaccaggttagacactgggggcccaaagatgaacgtctgctgtgatgggaatgttttctaggtgtgctgcccattatggtacccactggacacacgtggctgttaagcatttgaaatgtggctagtgtgactgaggaactggatttttaatttttaaaaatgtaatgatttttttctaggtgggtgcagtggctcatgcctataatcccagcactttgggaagccaaggtgggtggatcacctgaggtcaggagttggagaccagcctgaccaacatggagaaaccctgactctcttaaaaatacaaaattagctgggtgtggtggtgcattcctgtaatcccagctgctcgtgaggctgaggcaggagaatcacttgaaactgggagggggaggttgcggtgagctgagattgtgccattgcactcctgtctgggcatcaagagcgaaactccatctcaaaagaaaaaaaaaaaaaaggccgagcgcggtggctcacgcctgtaatcccagcactttgggattccaaggcaggtggatcacgaggtcaggagttcaagaccagcctggccaagatggtgaaaccccatctctactaaaactacaaaaattagccaggtgcggtggcaggcgcctgtaatcccagctactcgggaggctgaggcaggagaatcgcttgaacccaggcagcagaggttgcagtgagccaagatcatgccattgtactccagcctgggcaacagagtgagaatccatctcaaaaaaaaaaattaatgaatttttaatttaatttacttcaatttaatatgtagctagtggctactgcattagacagtttaggtcgtgtgtgtgtgtgtgtgtgtgtgtgtgttggggtggaggggacagacatacaaacaattccaatacaatatggtcacagctaacatttattaatctttaagctatgctgggcactgttctaagcaggttacctatattaacccctgcaattaggaaaatagcccctgagctaggtatctattatcaacctcattttagaggtgcagaaatggaggcacaggggttcagtaacttgcacgaggtcacaatcctcgagcccggatagaagcccaggccatcgggctccaggcccatcctctgccatgccattcctcctgccttgctatccaaatagagggatgcagaggactaggggagctggtctcactcagctcaggggaggccctgtggagtcttggaggatgtggaagactcagccaggaaagaaagagggaaaggacatccaggaggcctggcatgagaaaggcccagaggcgtggggcagagggcggcccgggctctggagggtgcagtcagctctgagatggcacctgggcttggtactgaaagcagtaggcgccatgcaggggcttcaagctagggggccacaaagggtccactggtattttagaaacctgcaggggcacttagaagcttgggatcagagtgacgaaggtgagcaaacaagagcagcttggtgaggccgggtgaagtgactcgcgcctgtaatcccagcactttgagaggcagaggcgggtggatcacctgaggtcaggagttcgagactagcctggccaacatggcaaaaccgtctctactaaaaatacaaaaattagtctggcgtggtgatgggtgcctgtaatcccagctactcaggagactaaggcaggagaatcccttgaacccagaaagcaaaggttgcagtgagccgaggttataccacttcagcctgggcaacagagcaatactccatctcaaaaaaaaacccaacaacaacaacaacaaaaactagctccatgacaagggctcaagctgagactacaaactgggatggggttcctcaaactccgaaacccaccatggccctctaagcggaatggagcccccaaaccctcactgtcctctactaccctccacctgatgtctccccctggccttcctctccagtggaggtgcctctgcttccccttcactcctgagtcgagggctgactgctccgttcgacaagctctcacccagccaggtcccctcgcaggttagggccgtctcagcactgaaagcagctgccctccactccactgccctgcctgctctggaactatttcagggcttgcaatgatctgtcttcctacttgtctgtgaacgtccaaaggcaaagagcgggtcttcttcctcaccgtggttcccagcaccagccacaatgcctggcacagcctaggagttgaagtaagtactagctgagcgagaccaaaagcctgggggtagaccaggaactgcaggcttgctctgggccttgcacttcctgtgcacctgtgcatccagcaggtgcacaacaaatctgtgtagacccattgaagataaaggtggcagggaaggtaggaatagatggagaatagaaaccacgagaagccccgataactgtaaacatttattgaacaccttctgtactgtgttttttcactttgtgatttcttactccaatttgatgatgtaggcactaaccttccacgtcttacaaatgagcaaattatggctcagagaggtgaagtgacttgcccaaggacacccagctaatataggacagtggaggtctctacacctaggtcaggggaaggaagaagagttggcgtgggtgagggggagccttaccgggagagcctaggagaatgtgcaccaggtcctcatagaggatgagcgtggccggccgctcagggagcaggtagaggctgacagacgcatacactgcgggagggatggccggtcagctccaggaaaacccaccccctaccccccagccaggcaccccctccatctgagtcccagaggcttcaccctccctcagccccctctgtgtaccccagcccaggcagcagctgctggaaagcctccccctccacccccaaggagactattttgggaaggggctgatggagggtcagctgctgtcccccccctccacctgcccctgcactcacagggcagcttgtcaacacgccagggcacagagttggtgaggaagccagggcgggcagcagtgaccagcacccaggtgcccaagcgataactgaggggcagggtggccacaccctctgagtctgtggtgccagctgccagcagagtccggttcccaaacacatccactgaggcccgggccaggggcaccagctccccgctcacatacacctgcaccttgatcaggatctctgtgggcaagatggggcaaagggagtgaggacgagggagggggaaagagaactggggggagccccaagatcagaggaaggagctgtgtttgagagagtcttttgggctgaggctagagaaggcatgatttaagacccagcattcacagagcactcactgaaacctcctatcagcccatgccggaggtgggactattcctgtatttcatcgtctaacacatgcgctgtgtcacattttcacaattctaaactcgggctatgcctatgattgatgatgccatcgttataactggcagcatttcttcctttcttactggtacctgaaatcatggtgcatcttacagtcagtggtgtattggatttgataatatatgctcttagtccattttacagataaggaaactgaggcttagagagtttagatacttggactacagctaagtggagatctgggatccagacctggcagtctgcctctagaagcgacattcttaaccccgggcctggggagaggagaaggacaggagggctgagaaaggctaagtaaagctgggtccgcaggcggagaggagaagggtcaagattcagcagtttgaaagggaggatggaggctagggcagagtttggggtcttgggaaaaaattgacaggggacactaggaaactggtcattcccatcattcatccttttcccagaatcctttgcacaagcctgtttcccttcagatttagggactcaccccaaccccatgcccaaacaaattacttctgcctcctccccctcacatgaaccgcctgccccctcccagctggtcagctacagtcagtcaccatggcaacgccctcattcctcccaggagatcaggcagggagctggggccctggtaagggaaaggagatctaggggggagcaacccaggcccaagagaactattgtggagggggctggggagggaagcccaagtcttttgctttccagggatgcctctgcccacagcccgtggagaatctggccaggccatcaggcaggcgtcctgccctcagatggcgtgatgggaaggaaccaagccttgagttgttcccatggattctccaggcagtctctctgatccagggcaccccttcccatcagcacagcccctccctcaagaacacacttcgcccctaccttcctgctaacaaggtgtgtcatgcatgtatggacacctcagtggggggcccaggagacaggtgggaagtgggctgagtgctggatgcaaatctagtgggggttgggtatggaaggaagagtctggagctgagagcagcagggcctggggaggtcagggtgctgtggagacttcaaggagagggaaggccttagagtggagcctgacactcagcagtgacaggtgtcttagctcaggctcccaatccgcagccagcgccacgcctgccctaggcatcccatccagctgttcccctgagcccacctcccctcccaggccagagcccaaccctgcagggtgggtgcacactccactcactctcgctctctgctcctccaggaagctggcacccctttactgtttttttgcacatttgatgtgatttaattcttacttcaatttgatgatgtaggcactatccttccatgtcttacaaatgaacaaattatggctcagagaggttaagtggcatggggtggggggaggtagagcctaggaggacgtgtgcaaggtcctcatccatccccctgccaacacccattaggaattcggagaagctagaaggtcctggctactcccacctccatcccgggcttaggaacagctggatagagcagctggggagagggatcccgagtctgagatatggtcatttgagggaatgccttgggttcaagagtcagagtttcagaagagggagggggctggggaaacaaaactggggtgggctggtaaggatctgtgccaaccttgcgggtgggggagaagggagggggcaggtgcctagcagattcccttccccctttccctcaacctgggctccccgccagctgccccagagaacccccaatcctggctctattccagccaattccctgggccccttcccctgaggtgcagggacttgaggggaggggcgtcctaagaaactagggcttcttcctactaagaaaagcctgatctcctccccgagagagctgggggagactgaggcagagggtgaaccctacccattcctcgaagcctgacattccatatagtatccacctctcccggctctaggcctgcctcagtccaggaggaaatccgaccccctcccttcatccggaccccacttccctcatccagacccccccactctgcttttcctgccagctccttagtgtggggggtgaggagtgaatactgcttcaggcagggatggggcccacaggcaggagagggagagcaggacccgggaggtggactcaggactggagtgggcggaggcccccaagcgtccaggcctgcctgtgggatgtgttgtcagggtcttgctcccccaccctttcctgctgcaggagccggccccacccccacctcacacacccacctgcgcccggtgagtcgctgggaagggtctcctccactgcgaagatgtgagatgaggagggggtgatatgggggcgggcaggggacaggaatgccaggaggcctgctgaatggggggggacccaggcacctgccctcccagccggcactgcccacagccagctagctcagcatggctccacgaccacaagcctgccatgctccctcagctgggaatcacaatgtacccccttttcttagaggcccacaactgcggctcgtcctccatcataggctcacaagcatttatttggtgcaccccaaactctaaaccaggggggctggctgggagctgtcaggctccagggcaaagaaccccattagagcagtcaatcccgcccacagcctcacccactcccccttctcccctccccccttcaaacccagctccaggctcccagcctccggtcccggcctagggtggcagcggatgccggcgcccccaccccgccagggtcgggagcgagcaacccgcagggggctgcggagcaggcgcccgccccagcccgcccctgggcgggtgtcttcggtagacaatggctcaggcagcagcgcctcgcggaccaggagggagaaaaacaaatagggagagggcggcggcgcagatcctggggaccctcgcactacccattgtgtctccccaagacccccgccccggacggcctccctctccccgcctccactttcccccagaagcgccaaccccagatcgcttagctccccccacccgaatccagggaacagaataccactcaattcacgaacgccgcgaagagggggctgacgggcgggagcctgatcagggggcgcaggcccgcgatcgcggcccctcccggctgagactcaccctgcgggctggggggctccggcggcgacttgccgggagcccgggaggcgctgccgagcagcagccccagcagcggcaacagccgcgcgaggacgctggggccactcgccggcggcatcgcggggctaggccgggccctagcggtccatggctcccgcctggtcccgctcgcccggccccgcgcagccccagctctgcgccgcgcctcgcagctccggctcccgctcccgctgcggcgcccgctcagcgcgattgtctccgaccggagccgccgcaagcgccccctgcaggcggcgcgccacaccgctggccctccggcaccgccccctcccggccccgctccgcccgccgccccccggtactgcccaccttcagcccaccccgcagcccccgcgctctgcgctcccagactctgcgctgcaaaggagtgtcgggattagggtcccatcacccgggttcttgggtttcgagagtccccaaaatttggtgcaaaatttgtgtgtgtgtaggtggggagtggatattgcctacaacactctcaaggggtacggtcatgaaagtctcagaaaactgtaagaactccctgctcgatggcccccttctcccggtagaacacctaggcagtgctggggtgatagcagggaaggccccctagacccccctaagtctctcttttttttttttttgagacagatttttttttttcagagacaagtgaacatttatttttgggcctttcttcctatttcaagtctttttcaaaacaaggccccaagaatctccaaattcaattatgtccctgggcttggccgactggtgcaggagtcttagggagccttgtacaaatgctagagttactcacttaccgacattaaactaaaacgctggaatttttccttggaaactggactgtgattagaggtgcttgccatgaacataagctactgtttcttctccttctttttttttttttttttttttttgagagagagtcttgctctgttgcccaggctggagtgcagtggcgtgatcttggctcactgcaacctctgcctcccgggttcaagtgattctcctgcctcagcctcccaagtagctgggactacaggtgcacgccaccatgcccggctaatttttgtatttttagtagagacagcgtttcactatgttggccaggctggtctcgaactcctgatctcaagtgatctacccgcctcggcctcccaaagtgctgggattacaggcgtgagcttctgtcttttctttgacccttcctttccagtttttgaagataaagctggaaataatcttctctgaagatacttgataaaaattcccaaaaaaacaaaaacacatgcttctactacccatgcttccacttcattaataaaaatttactgcagtttggcacctgggtctagttcagctggcggatgagctgactgatgcgttcaccctgatagccaggtgtgcccatctccttgaggaagcccactgtatttttgg

SEQ ID NO: 34 - DNA, 31980 bp, Homo sapiens
ccaaaaatacagtgggcttcctcaaggagatgggcacacctggctatcagggtgaacgcatcagtcagctcatccgccagctgaactagacccaggtgccaaactgcagtaaatttttattaatgaagtggaagcatgggtagtagaagcatgtgtttttgtttttttgggaatttttatcaagtatcttcagagaagattatttccagctttatcttcaaaaactggaaaggaagggtcaaagaaaagacagaagctcacgcctgtaatcccagcactttgggaggccgaggcgggtagatcacttgagatcaggagttcgagaccagcctggccaacatagtgaaacgctgtctctactaaaaatacaaaaattagccgggcatggtggcgtgcacctgtagtcccagctacttgggaggctgaggcaggagaatcacttgaacccgggaggcagaggttgcagtgagccaagatcacgccactgcactccagcctgggcaacagagcaagactctctctcaaaaaaaaaaaaaaaaaaaaaaagaaggagaagaaacagtagcttatgttcatggcaagcacctctaatcacagtccagtttccaaggaaaaattccagcgttttagtttaatgtcggtaagtgagtaactctagcatttgtacaaggctccctaagactcctgcaccagtcggccaagcccagggacataattgaatttggagattcttggggccttgttttgaaaaagacttgaaataggaagaaaggcccaaaaataaatgttcacttgtctctgaaaaaaaaaaatctgtctcaaaaaaaaaaaaaagagagacttaggggggtctagggggccttccctgctatcaccccagcactgcctaggtgttctaccgggagaagggggccatcgagcagggagttcttacagttttctgagactttcatgaccgtaccccttgagagtgttgtaggcaatatccactccccacctacacacacacaaattttgcaccaaattttggggactctcgaaacccaagaacccgggtgatgggaccctaatcccgacactcctttgcagcgcagagtctgggagcgcagagcgcgggggctgcggggtgggctgaaggtgggcagtaccggggggcggcgggcggagcggggccgggagggggcggtgccggagggccagcggtgtggcgcgccgcctgcagggggcgcttgcggcggctccggtcggagacaatcgcgctgagcgggcgccgcagcgggagcgggagccggagctgcgaggcgcggcgcagagctggggctgcgcggggccgggcgagcgggaccaggcgggagccatggaccgctagggcccggcctagccccgcgatgccgccggcgagtggccccagcgtcctcgcgcggctgttgccgctgctggggctgctgctcggcagcgcctcccgggctcccggcaagtcgccgccggagccccccagcccgcagggtgagtctcagccgggaggggccgcgatcgcgggcctgcgccccctgatcaggctcccgcccgtcagccccctcttcgcggcgttcgtgaattgagtggtattctgttccctggattcgggtggggggagctaagcgatctggggttggcgcttctgggggaaagtggaggcggggagagggaggccgtccggggcgggggtcttggggagacacaatgggtagtgcgagggtccccaggatctgcgccgccgccctctccctatttgtttttctccctcctggtccgcgaggcgctgctgcctgagccattgtctaccgaagacacccgcccaggggcgggctggggcgggcgcctgctccgcagccccctgcgggttgctcgctcccgaccctggcggggtgggggcgccggcatccgctgccaccctaggccgggaccggaggctgggagcctggagctgggtttgaaggggggaggggagaagggggagtgggtgaggctgtgggcgggattgactgctctaatggggttctttgccctggagcctgacagctcccagccagcccccctggtttagagtttggggtgcaccaaataaatgcttgtgagcctatgatggaggacgagccgcagttgtgggcctctaagaaaagggggtacattgtgattcccagctgagggagcatggcaggcttgtggtcgtggagccatgctgagctagctggctgtgggcagtgccggctgggagggcaggtgcctgggtccccccccattcagcaggcctcctggcattcctgtcccctgcccgcccccatatcaccccctcctcatctcacatcttcgcagtggaggagacccttcccagcgactcaccgggcgcaggtgggtgtgtgaggtgggggtggggccggctcctgcagcaggaaagggtgggggagcaagaccctgacaacacatcccacaggcaggcctggacgcttgggggcctccgcccactccagtcctgagtccacctcccgggtcctgctctccctctcctgcctgtgggccccatccctgcctgaagcagtattcactcctcaccccccacactaaggagctggcaggaaaagcagagtgggggggtctggatgagggaagtggggtccggatgaagggagggggtcggatttcctcctggactgaggcaggcctagagccgggagaggtggatactatatggaatgtcaggcttcgaggaatgggtagggttcaccctctgcctcagtctcccccagctctctcggggaggagatcaggcttttcttagtaggaagaagccctagtttcttaggacgcccctcccctcaagtccctgcacctcaggggaaggggcccagggaattggctggaatagagccaggattgggggttctctggggcagctggcggggagcccaggttgagggaaagggggaagggaatctgctaggcacctgccccctcccttctcccccacccgcaaggttggcacagatccttaccagcccaccccagttttgtttccccagccccctccctcttctgaaactctgactcttgaacccaaggcattccctcaaatgaccatatctcagactcgggatccctctccccagctgctctatccagctgttcctaagcccgggatggaggtgggagtagccaggaccttctagcttctccgaattcctaatgggtgttggcagggggatggatgaggaccttgcacacgtcctcctaggctctacctccccccaccccatgccacttaacctctctgagccataatttgttcatttgtaagacatggaaggatagtgcctacatcatcaaattgaagtaagaattaaatcacatcaaatgtgcaaaaaaacagtaaaggggtgccagcttcctggaggagcagagagcgagagtgagtggagtgtgcacccaccctgcagggttgggctctggcctgggaggggaggtgggctcaggggaacagctggatgggatgcctagggcaggcgtggcgctggctgcggattgggagcctgagctaagacacctgtcactgctgagtgtcaggctccactctaaggccttccctctccttgaagtctccacagcaccctgacctccccaggccctgctgctctcagctccagactcttccttccatacccaacccccactagatttgcatccagcactcagcccacttcccacctgtctcctgggccccccactgaggtgtccatacatgcatgacacaccttgttagcaggaaggtaggggcgaagtgtgttcttgagggaggggctgtgctgatgggaaggggtgccctggatcagagagactgcctggagaatccatgggaacaactcaaggcttggttccttcccatcacgccatctgagggcaggacgcctgcctgatggcctggccagattctccacgggctgtgggcagaggcatccctggaaagcaaaagacttgggcttccctccccagccccctccacaatagttctcttgggcctgggttgctcccccctagatctcctttcccttaccagggccccagctccctgcctgatctcctgggaggaatgagggcgttgccatggtgactgactgtagctgaccagctgggagggggcaggcggttcatgtgagggggaggaggcagaagtaatttgtttgggcatggggttggggtgagtccctaaatctgaagggaaacaggcttgtgcaaaggattctgggaaaaggatgaatgatgggaatgaccagtttcctagtgtcccctgtcaattttttcccaagaccccaaactctgccctagcctccatcctccctttcaaactgctgaatcttgacccttctcctctccgcctgcggacccagctttacttagcctttctcagccctcctgtccttctcctctccccaggcccggggttaagaatgtcgcttctagaggcagactgccaggtctggatcccagatctccacttagctgtagtccaagtatctaaactctctaagcctcagtttccttatctgtaaaatggactaagagcatatattatcaaatccaatacaccactgactgtaagatgcaccatgatttcaggtaccagtaagaaaggaagaaatgctgccagttataacgatggcatcatcaatcataggcatagcccgagtttagaattgtgaaaatgtgacacagcgcatgtgttagacgatgaaatacaggaatagtcccacctccggcatgggctgataggaggtttcagtgagtgctctgtgaatgctgggtcttaaatcatgccttctctagcctcagcccaaaagactctctcaaacacagctccttcctctgatcttggggctccccccagttctctttccccctccctcgtcctcactccctttgccccatcttgcccacagagatcctgatcaaggtgcaggtgtatgtgagcggggagctggtgcccctggcccgggcctcagtggatgtgtttgggaaccggactctgctggcagctggcaccacagactcagagggtgtggccaccctgcccctcagttatcgcttgggcacctgggtgctggtcactgctgcccgccctggcttcctcaccaactctgtgccctggcgtgttgacaagctgccctgtgagtgcaggggcaggtggaggggggggacagcagctgaccctccatcagccccttcccaaaatagtctccttgggggtggagggggaggctttccagcagctgctgcctgggctggggtacacagagggggctgagggagggtgaagcctctgggactcagatggagggggtgcctggctggggggtagggggtgggttttcctggagctgaccggccatccctcccgcagtgtatgcgtctgtcagcctctacctgctccctgagcggccggccacgctcatcctctatgaggacctggtgcacattctcctaggctctcccggtaaggctccccctcacccacgccaactcttcttccttcccctgacctaggtgtagagacctccactgtcctatattagctgggtgtccttgggcaagtcacttcacctctctgagccataatttgctcatttgtaagacgtggaaggttagtgcctacatcatcaaattggagtaagaaatcacaaagtgaaaaaacacagtacagaaggtgttcaataaatgtttacagttatcggggcttctcgtggtttctattctccatctattcctaccttccctgccacctttatcttcaatgggtctacacagatttgttgtgcacctgctggatgcacaggtgcacaggaagtgcaaggcccagagcaagcctgcagttcctggtctacccccaggcttttggtctcgctcagctagtacttacttcaactcctaggctgtgccaggcattgtggctggtgctgggaaccacggtgaggaagaagacccgctctttgcctttggacgttcacagacaagtaggaagacagatcattgcaagccctgaaatagttccagagcaggcagggcagtggagtggagggcagctgctttcagtgctgagacggccctaacctgcgaggggacctggctgggtgagagcttgtcgaacggagcagtcagccctcgactcaggagtgaaggggaagcagaggcacctccactggagaggaaggccagggggagacatcaggtggagggtagtagaggacagtgagggtttgggggctccattccgcttagagggccatggtgggtttcggagtttgaggaaccccatcccagtttgtagtctcagcttgagcccttgtcatggagctagtttttgttgttgttgttgttgggtttttttttgagatggagtattgctctgttgcccaggctgaagtggtataacctcggctcactgcaacctttgctttctgggttcaagggattctcctgccttagtctcctgagtagctgggattacaggcacccatcaccacgccagactaatttttgtatttttagtagagacggttttgccatgttggccaggctagtctcgaactcctgacctcaggtgatccacccgcctctgcctctcaaagtgctgggattacaggcgcgagtcacttcacccggcctcaccaagctgctcttgtttgctcaccttcgtcactctgatcccaagcttctaagtgcccctgcaggtttctaaaataccagtggaccctttgtggccccctagcttgaagcccctgcatggcgcctactgctttcagtaccaagcccaggtgccatctcagagctgactgcaccctccagagcccgggccgccctctgccccacgcctctgggcctttctcatgccaggcctcctggatgtcctttccctctttctttcctggctgagtcttccacatcctccaagactccacagggcctcccctgagctgagtgagaccagctcccctagtcctctgcatccctctatttggatagcaaggcaggaggaatggcatggcagaggatgggcctggagcccgatggcctgggcttctatccgggctcgaggattgtgacctcgtgcaagttactgaacccctgtgcctccatttctgcacctctaaaatgaggttgataatagatacctagctcaggggctattttcctaattgcaggggttaatataggtaacctgcttagaacagtgcccagcatagcttaaagattaataaatgttagctgtgaccatattgtattggaattgtttgtatgtctgtcccctccaccccaacacacacacacacacacacacacacacgacctaaactgtctaatgcagtagccactagctacatattaaattgaagtaaattaaattaaaaattcattaatttttttttttgagatggattctcactctgttgcccaggctggagtacaatggcatgatcttggctcactgcaacctctgctgcctgggttcaagcgattctcctgcctcagcctcccgagtagctgggattacaggcgcctgccaccgcacctggctaatttttgtagttttagtagagatggggtttcaccatcttggccaggctggtcttgaactcctgacctcgtgatccacctgccttggaatcccaaagtgctgggattacaggcgtgagccaccgcgctcggccttttttttttttttcttttgagatggagtttcgctcttgatgcccagacaggagtgcaatggcacaatctcagctcaccgcaacctccccctcccagtttcaagtgattctcctgcctcagcctcacgagcagctgggattacaggaatgcaccaccacacccagctaattttgtatttttaagagagtcagggtttctccatgttggtcaggctggtctccaactcctgacctcaggtgatccacccaccttggcttcccaaagtgctgggattataggcatgagccactgcacccacctagaaaaaaatcattacatttttaaaaattaaaaatccagttcctcagtcacactagccacatttcaaatgcttaacagccacgtgtgtccagtgggtaccataatgggcagcacacctagaaaacattcccatcacagcagacgttcatctttgggcccccagtgtctaacctggtgcctgccacatagtagacaatactgtttgaggatctggatcgcaacattttataggttctataaggaaactttctactaaaacaagtaaattgctgagggtcacacagagatttcaggtccatgtcccttccaggttaacattccatgactgcccagctttctccccaaggcatcaccctccctggccttccaaagtggcctgacctcatgtcccccttttccttagataatgggtttctgctctggtccctggggatccctgtccatggtcaagccactgcagcccctctttccctccaggtgcccgctcccagcccttggtgcagttccagcgccgggctgcccgcctgcctgtcagctccacctacagccagctctgggcgtcacttacgcctgccagcacccagcaggaaatgcgggctttccctgccttcctgggcactgaggcctccagctcaggtaggctgggtgcccagcacggatggggtctccccaggctcaggatcagccctcagccctgtaccctcttccctcaggcaatggctcctggctggagctgatgcccctgactgctgtgagcgtgcacctgctgacaggtaatgggacagaggtgccgctctcaggccccattcacctgtccctgcccgtgccctccgagactcgtgccctcaccgtgggcaccagcattccagcctggagatttgaccccaagagtggtaagtgcctcagggggctgcaggtgcttgagttgagagaagaaagtgggacttgagtgggagcgactcaagtgtgacaaaacccctgcctctcccagggctgtgggtgcgcaatggcactggtgtaatccggaaggaaggccggcagctctactggaccttcgtctccccccagctggggtactgggtggccgccatggcctcccccacggctggtaagagtagtggggcagtgggcgtagaggccgcggaggaggggagctgggagagcagacttctgaaaggcaggaagggtgtctacacctgaacgctaagccctcgcctggcacagggctggtcaccatcacgtcgggcatccaggacatcggcacctaccacaccatcttcttgctcaccatcctggcagccctggccctgctggtgcttatcctgctgtgtctgctcatctactactgccggtgagcacggggcttccctcaccctcccctgcacttgtaccgggccctggggccccaaagatgcataaaatccacttctggtcctcaaggggcagacaggaaaagacttcctgcaaacatgctaagacctgaagggctggtgctggtggttgaagacagcggggaggtgggaggggaggcagggcttaaggacttgcagcccggcccctccagagagatctgccactgcccctaccagcccagctctctctcccagaggactccaggccggacacacccatagacagcttagatgctcatccctggttctcgcagcacatcctacatgcagaggagtgcagagttgaccctgaggggatcgccaaacggacacggcggctccccgccatctctcctgagcgccccaggcattctccccacctcttccactatattcgtctcttgtcttgcatctaagggggttcggggcctactttggccctcaccctttcctgagcggccccttctgctccctcccttccaggaggcgctgcctgaagccgaggcaacagcaccgcaagctgcagctctcggggccctctgacggtaacaaacgagaccaggccacctcgatgtcccagctccacctcatctgtgggggacccctggaacccgccccgtcgggggaccccgaggctccgcctccaggccccctccactcggccttctccagctcccgggacttggcctcctcccgggatgacttcttccgcaccaagccgcgctctgccagccgcccggccgccgagccttcgggtgcccgcgggggcgagagcgccgggctcaagggcgctcgctcggccgagggccccggcgggctggagcccggcctagaggagcaccggcgggggccctcgggggctgcggccttcctgcacgagccgccctcgccgccgccgcccttcgaccactacctgggccacaagggggcggccgagggcaagacccccgacttcctgctgtcgcagtcggtggaccagctggcgcggccgccgtcgctgggccaggcggggcagctcatcttctgcggctccatcgaccacctcaaggacaacgtctaccgcaacgtcatgcccaccctggtgatccccgcgcactacgtgcgcctcggcggcgaggcgggcgccgccggcgtgggcgacgagccggccccgccggagggcacggcacccggcccggcgcgcgcttttccccagcccgacccccagcgcccgcagatgccgggccactcgggcccggggggcgagggcggcgggggcggcggcgagggctggggggccgggcgcgcggcgcccgtcagtggctcagtcaccatccctgtgctattcaacgagtccaccatggcgcagctcaacggggagctgcaggccctgaccgagaagaagctgctggaactgggcgtgaagccgcacccgcgcgcctggttcgtgtccctcgacgggcgctccaactcgcaagtgcgccactcttacatcgacctgcaggcgggcggcggggcacgcagcaccgacgccagcctggactcgggcgtagatgtccacgaggcgcggcccgcgcgccgccggcccgcgagggaggagcgggagcgcgccccgcctgccgcgccgccgccgccgcccgcgcccccgcgcctggcgctcagcgaggacacggagcccagcagcagcgagagccgcacgggcctctgctctccggaggacaactcgctgacgccgctgctggacgaggtggcggcgcccgagggccgggcggccacggtaccccgggggcggggccgcagccgcggggacagctcccgcagcagcgccagcgagctgcggcgcgactcgctcaccagcccggaggacgagctgggggcggaggtgggcgacgaggcgggagacaagaagagcccgtggcagcggcgggaggagcggccgctgatggtgttcaacgtcaagtagcgcccgcgcagggcctggcaccgcccctcccgcgcgggcccgcacccagggtgcgcgccccgggggcccgcgggggccctcgcgcgtagctcccagccccaggccggagaggggcccaggggccttggagctgttccgtggttggtgctgggtcgtgtcttgcaagggaccctgtgtctgcctccaagccggggaggagggggggtccagacccccacggggaggtgccggggaggagggctggggggaagcagtgcctgtgtagacgtggctgtacatagaaagctctattgtgggaaagcaggaggggtgacccagcctcagctgctagtgtgagggctgggaagggagggggcgttctttgtggacccctgggaggggagggggtgctgcttgctgactagcccatctctgggctacgatgtcacagggctggtggctgggacagctctggggactagggggtaatgtgatacagccgatgtgggcagcagcaaatataaaactggtgaggttaaggctgtgtatgtctttctgtggggtaggggaggggagtgttggcagtggacgtgaacccctgttctggggccctggggagggcaggcagggcggcaaatcagacactgttaagaaagtgtacaaactttattgaaacgcacacgcgcacacacacaaacacccctgtggatagggaaaagcacctggccacagggtccactgaaacggggaggggatggcagcttgtaatgtggcttttgccacaacccccttctgacagggaaggccttagattgaggccccacctcccatggtgatggggagctcagaatggggtccagggagaatttggttagggggaggtgctagggaggcctgagcagagggcaccctccgagtggggtcccgagggctgcagagtcttcagtactgtccctcacagcagctgtctcaaggctgggtccctcaaaggggcgtcccagcgcggggcctccctgcgcaaacacttggtacccctggctgcgcagcggaagccagcaggacagcagtggcgccgatcagcacaacagacgccctggatggtcagaggggggcgagagggttggacgaggtgggacctggtccctggccatacccagccccaggatgggggttggcactgacctggcggtagggacagcaggcccagccctgtcggttgtctcggcagcaggtctggttatcatggcagaagtgtccttccccacactccacgtccttcacacccacgtgagggctacgggccaggaaggtggcaggctgggcagagaccacttccttctcgcaggatcgagccttcacgttgcaggtgtagccagccgggcagcagtgctggcgatcctcgcagcacacagcctggcggggaagggagcacagaatggcattatgttcctgtcccctcactgggcttagctcccctatccaggggcaggcagggaggcactcacatggggcaactggcagcaggcccagctcccacccaggctcgggcagcaggtctgccccaccgggcagctggtgtgctggtcacagccgatgtctctggggtgggataaggaagcccggcgggcaggcatcttctccagtccagccacgatctcgcttcctcgctgacactgcccctcagctacacacgtgtagccctgggggcagcagtgctggtggtccgagcagcagacagcctggggggtgggcaggaaagggcgttgtaggtagccactatgtggggcgcagtgccgagcccctacctactccagcccgcctctcctgcttacagcacctccagctggggacgaatctgtcagagctgggtatcacctatgggctatgcggagggcagaaagcaataggagcttggccacccacctgcccaggccaagatgctgtcccctcccatatacctctgggattggacagcagccccactccccagacgtgagttggcagcaggtatcggaggagggacagctgctgacattatcacaggggacatctctcttcaaggcttgtgggtctggcaggctgaggtgagctggggccttctccatccagggcacctggtggggcccctgttcacaggtacccttctgcgtgtcacacgtaaaccccgcgggacagcagtgtatgtggtcctcacagcacacagcctagggcagatgaagaagggcaggtgggcactggggcccggctgcctgccacactgtgctcagcccacccacccgccacccctgggtacctgggtaaaagggcagcagccccaggcccccgactgtagacggcagcaggtatagccatctgggcagctcacctccatgtcacatttcacatcccccactgtgagggaagcagagaggacaggtcagaagtggcactggggaccctcaggggtatcaaccctttgccggctccacagctggaaccaggtgttgaagatggagggtaccgcttacaccaccttgcagtgatcctaaggccaggcctaaaagggaggaaagggggccccacccctgtatctgcaccctgcctctggtacctgtgtgcgcaggcagcttagtgaggaggtccgtggtagcgttctccttggagaggcacttactctggatcaggtcacacacagtgtcttgggggcagcagtgcaggtgatcggagcagcaggtggcctgagtggggacaggggtgggtctttgtcacttccaggctcagtagcacacagggagcagccaggctgatggctggcactgccccaatcccccactagggggtagcatgaaccctgcatcagccaggctcccagcaagcagccagccagccccatgccacagagcccctgtaaggtgcgtgtcagggccaggtggctgggggcacacagccaagctggctccagcccctcactcacgttgggcattgggcagcagccatacttcccactgggcagctcacagcaggtagaaccatcagggcaccgggaccgtgcgtccggacacatgaccgagctggacaaggccactggaagaggagcaaacgtgaggggcagccaggatggaggaaactttttcctacacttggagtcaatgaggccccgccccagcccctggcctgatgctctcccacctcctcacctgccctgttagtcctctgggcagggagcttctttgccagggggtgggtgcccgtgggtgtgatgcagcgggtgtgaaccaggtcgcagaaggcaccgtgcggacagcagtgcaccctgtcttcacagcaggaagcctgagaaaaaatggtcctgactccgtcttcaccccctgcccctggcccccaactctgcccccacttccctccacatacccccatctcccccagatttgtacctggggcatggggcagcacccccaggagccatcgaccataacacagcacgtggagaagtccgggcattcgaactgactatcagggcactggatggcacccacggagttgttacctgtggacaagatgacccaggatactaccagcccactcagggaaggtgactcccccatcacacaaggagctggtggcaccagggcctgcaagcccagctactggggtttgagggtgacactaaggctcagtgatctcctaggcaggcctaactcaccctcctcacaatccagtccctccctcagcaagatggcatggggaaggggcacccactgaccatgggttggtattagaccggcccagctcgacctctccccacccccacaacgcctggacctggagtcttgcactttctcccgcaccctcctatccccagtgctgcccctctgtccacagcagggctgttgcttagtacagatgccacatgaatgagggcacaagggcaggaatcagggctgcccccgccagctgggctcctgggttccagactccacatgctgcccgtctgcctgccctgcacccacaccccagctgcacctgatctttggaagcaggatcgcccgtctgcactgcagtggaagccccgtgggcagcagtgatggccatccccgcatgccacggcctgtggaacacagagaaacctgcattggcagggcccttttatctgcaggtggtagagtgcaggaaaagcataaatgcagacctaagcccctccactgggctgatggcacgctcacctctgggaaggggcagcaactggaagtccctgagacggtaaagatgcaggagtggccggcagagcagtgggcatcaacctggcaggggccacccagatgcctgctcagtgttgtgggccatttgtcctagaaagacagggaaaatgataaaccacagacttgtgcctggcgtcctcctctggccaatccaagatgaccctttgggaaaacccaggctgccagctcttgcctaggctgaggggcactcaccagaaggggacggcagcagctgtagctggctcctccggggtccaggcagcaggccacagggcagaactgaccatctgggcaccgcgttccagccaccagccctgctgttaaggccacccagctcaccagggtccacatggtctgcctgcaaagtaccaaggaacgtctggcaactgcttaagcccacgccacccttgattctagggtcactcagtaccctagccccaggccaaggtcctggcccaggactgcctgagccttctcaacacctccctgtccaggcaggcagaaatctgcaggggctgagagtcagcttcctacagcgccccgtgtgtgacacttgccccagcatgtgcggacctgtaagcatgaatgctgacatgcgtatatgtgtgggtctgagtccccagcacatggcctaatgcctgggcctcactgggcaggcttatgagagtcaggaagacgtgatttttgtgggtctgatctgtgcagatgtgggccacctctggggtgaggggaaggcatcagtagccatgggagaggacagggctagggtgcagggagggagtccccccaggaaaagccagggttcccctccagatgcctccttgcctgacactatgttcatacctgcaccccgctaaggccttgcgggaagcggccacatgatgacatgggaaaccacaggggtgagaaagttgtgaaaaaggaaatatggtggccagtggagtctgggctgccttccccagaggtcaccatctgcccatgaatgtcccctcctcacccagagaaaaggacacagaagctgggtcagcccttgagacacctgtgttctgagggtcccccacaccaccagggccctctgagattcctcaagcatgctaaaccctgcccttgcctctccatctattctggaagtgaaactcagccacatgtggagagagaccacgtgtgcccactgggctgcccatctgagtcaccaggaggaactgagccttgagtctctgtggagagcagcctctcacttcctaaacaactcttctcccaggctcagctagcccagctagttcagtggggtggccagagaggtaactcataatgaagaagcaaaaacagtaatgtctgttgagcctcttgggagccagttacaagactctccattattttatatatatttctttgcaacaaccatccaaagtagtaattaatacctttacttttattttatttttagagatgaggtattgccatgttgcccaggctggactcagactcctgggatcaagcaatcctccaaccttggcctcctactaagtagctgggactgtgggagcgtgccaccacgtctgctcaccccctttttttttttttttttgagacagtcttgctctgttgcccatgctcgagttcagtggcacgatctcagctcactgcaacctctgcctcccaagttcaagcaagtagctgggactacaggcgctcgccaccacgcctggctaatttttgtatttttagcagagagggggtttcaccatattggtcaggctggtcttgaactcctgacctcagctgatccacccacctcagcctccctaagtgctgggattacaggcttgaaccaccacacccagccacacctttattttaaaggaggaaactgaagcttagagatgttaagtacagtcagccctccatatccaaccagggatcaaaatatattgggcgcggtggctaacgcctgtaatcccagcactttgggaggcccaggtgggcggatcccaaggtcaggagttcaagaccagcctgaccaacgtggtaaaaccccatctctattaaaaatacaaaaattagccatgcgtggtagcgcacacctgcaatcccagctactcaagaggctgaggcaggagaatcgcttgagcccaggaggtggaggttgcagtgagcagagatcacgccaacatactccagcctgggtgacagagtgagactgagattctgtctcaaaaaacaaaacaaaaaaacccctgaaaatgttacatcgttgctgagttatacaatgtagttaggcttacgatgggtgcatctatactgaacatctacagatagttctttcttattattccctaaacaattcaggatcacaactatttacatggcatttctttttctttttctcttttttttttgagatggagtcctgctctgtcacccaggctgtagtacagtggcgcgatctcagcttactgcgaactccgcctcccaggttcaagcaattctcctgcctcagcctcccaagtaggtgggattataggtgtgcgctaccacacctggctaatttttgtatttttagtagagatgggggtttcaccatgttggtcaggctggtctcaaactccagacctcaggtgatccacctgccacggcctcccaaagtggtgggattacaggcatgagccaccacgcccagccgacatgtcatttccattgtattaggtataagtaatctagaaatgatttaaagtatgtataggttatatgcaaatattacaccattttatctcaggggcttgagcacccacagattttggggtcctggaaccagttccgtgaagataccaagggacacctataacacgtcacacatcaggtcatggtgacgtcaggctttgatggccccagagcgtattggacctgggttcatatcactagtggcacgatgggcagtgcctgggaatggtgcaacaggtacaacagaaacagggtacagggactgcctgaaaatcgcacttgggtcctaatcctagaattgccaactgtgagggcctgagaagttgctctctgtctgtgcctcagttaccccacgagtctaggtgtggataccactgcggggggaggggcaggaaatctcacccacccagtcactcacatcctctctgctccacctggctttcctcaagtgcccctcccctaactcagcatccccaagaggccacctcctggacagataaggatgaagttcactggtcctggacagtggaccctctcctcagccccacagctcccaggcaaagcacctgcagctggcaccgcctgcttcctgggtgttctcagcaggctgtccgctgccatggcttgctgggaaggggagtctgtctgcacaggagtgttcggctccctggtgaattacctgtgcatgtggcccctcctgtttaccctaaattgagggagtatagtgtatgcttctactgaatacaagcactcgcatacagaaacagggatgaggaggcgagtcgcagtctctcatgccaccctacaccgccaaaacagccagaggggacagcagcctcttcaagaccctagctccgttatcttccactaggtggcaccccccaactccgagtgccaaggggagaggaaattcccaaaaggggagccaacctagctgcaaatgagcaggaaaaagtggctgggagaggcggaagctagctcgtcccacccgcaacaagaggaagtaaggaggagccagaccaggttcagtcaccactcccaagtccctactaccttcgagaagccaaggtctcaggtctcgttcccaggccctcggagctcccagcccagggtcgcgcgcccctccggctccaggccgccgcgggaaccacccaccaccaccaggagaggggaagaagccagcacctaccgacaggggtggagctgggtcaagaatggtgtggtccctgctttgggggaatgctggggaggtagaaagccccttctaacggggcgtcactgcaattactgcttcctctttcccataaaactccccctagtgtatcagaacccccaaggagtttcagtaagcggttcttctgttgtctccggctgagactccaggggaacctcaagctcacatggccctggcgggcccctgggcaggagcaggcgagaggtctgcgcggccgctctcctacctgcgtccgactccgcggtccttgggcagcagcaaccgggtagcgctcagactacagaccccagcgcgatgacccgcctacctcagtttccattggccagggatcagggctacccgctcccattggctacttatcaatatagaggtggggccagcctggaatgctgtgtttcttttctactcaaatcactctcctccctgcttcctctcgccccacaccccatttctagggatcatgtgattggagaatcatgtgacgtcgggacagcctcagcagggcagctggtgctcgtcgccttccttaacccatcctgcaggcgcctgggggagtttgctagagatgatagcgcgtgtctggggcattgacagtgcgagggagtgttatgaattgggaatatttgtgctcgcctttctatccttttgtttgtttgttctgagacggagtctcactctgtcgccaggctggagtgcagtggcacgatctcggctcactgcaacctctgcctcccgggttcaagcgattctcctgcctcagcctcccgagtagctgggactacaggcgcgcaccaccacgcccagctaatttttgtatttttagtagagacggggtttcaccatgttggccaggatggtctcgatttcttgacctcgtgatccgcccacctcggcctcccaaagtgctaagattacaggcatgagccaccgcgcccggacttgtgtgtttgttttagagacagggtctcgctcagtcgcccaagctgatcatagctcactgcggcctgcaactcctgctcccaaagcgattctcctaccgcagccccccaaggcgctgggattacaaatgtgagctactgagctggctcgctcctatcctatcctgccctgtcttgtcctgtcctgtcctgccctattctgccctattctccaaactcggttgacatgctaggcaggccccagagtgagttgaaggatggtttccaggacaaagataaacagccccaaagccctttcctcaaggtgctcagcaggacagggagcagggattggtgggagacagtctcaggctgaatctaatttaagatacaaggttgtgcgccagttgccaggtgtagggagaggaagtagattgtctccaggtggggaagaagagatttcattccaccttaggagcatctccttgagctgagtctgggaagattttaactggcaggtggaggaggaggtgttgggaagagccctgggaaaccagatgggaagggcaggcttggcagggattgaatgccatgttcaatgccagtgggcttcaggagctgctgggtgcctggcacgggctgggctgtggtgggggctgtcgaaagagaagtggcttcctagtctccagatcggccctgccttcgaggaattgatatgggagggtgaggagagaaaatgtaccacagaacagattagccagtgacaagagtcagcctgcttggtgccaaagggcctgggccaggcagagatggatgatgggagatgggccaggagagaggagaggcccagggaaagcctgatactgggccgtggaggaacggcagtgtctgcacaggggatggagactgctgcagcctgagcaaggaactggagctgaggatgaggcaggggcagggggatggctaaccaagctcgaggcagcagaagtcggaggagggaaagggtgccaaccgagctgtggagtcgtgtggcaggggttctaagcctggagctagagcagacccagacagcggataagacacctggcctgctgaggacctagtactagtctgtgccctggtgacacatttgtgcttattttccttcctgtgtatcttgagactagggagtatagtttatgcttctattgaaacacacacacacatgaaactttcatgaaatgttaggtgaatcgatcaataacctactaattacaaccacccagaaccagaaaaaaatacaggtagaagaaaaaaaacctaaacagactgaaacaaatatcacaaagtctaatcgtcaaagccgtgattcttgagcagcggcaattttgccggccagggacatttaggagtgtctggagacaatctgggttgtcacaactcagggtggagggacactggcatctggtaggtaagggccagcaatcccactaaacatcacacgacacacagaacaatcccccacaacaaagaagtatcctgcccaaaaggtcaatagtgctgagactcaacaacctacttcacaaatgtttctctctctctctctcgctctttttttttttttttttaacatcagaagggtaaggtgccacgataacgaggtctgtaattccctactcaggaggccgaggcaggagaatcgcttgaacccgggatgcagaggttgcagtaaaccgagatcgtgccactgcattccagcctggacaacagagcgagactccatccacccccgccaacacaaaaaaattaaagtgtacaactcaatggtttttagtgtcttaagagagttatgcagcatcattacaatcagtttaagaccatttttatcaccacagaaggcagccttatgtcctttagcagtcaccctccctaaccctaggcaaccactgatctactttctacctctatagatttggatattccatataaatgaaattttataatatgtgatctgcaactggcttctttcacttagcataatgttttcaaagcttatcacatagcaggtatcagtatctcatttcttttttgtttgtttcttttcatttgtttgagacagagtctcactccaacactcaagctggagtgcagtggcacgatcttggctcactgcaacctctgcctcctgggttcaagcaattctcctgtctcagcctcccggatagctgggattacaagcatgtgccatgatgcccagctaatttttgtattttagtagagacagggttccgccatgttgaccaggctggtctcgaactcctgacctcaagtgatccacccacctcaatctcccagactgctgggattacaggcgtgagccaccacgcgtggcccatttttgtttgtttctttgtttttgagacagagccttcctctgccgcccaagctggattacagtggtgccaccttgtactgcagcctcagaccctcccacctcagcctcctgagtagctgggaatacagacacatgccaccactcccagctatattttgtatttttttgtcttaatatgttgcctagtctggtctcaagctcctggcctcaagtgatcctgctgcctcagcctcccaaaatgctgagattacagattacaggcttgagccactgtgcctatcttcatcatccccccagcatttttttttttttttttgagacagggtattgctctgttacccaggttggagtgcagtggtgtcatctctgctcactgcaacctctgcctcctgggctcaagtaatcctcccacctccgcctcccaagtagctgggactacaggtgcttatcaccatgtccagctaatttttgtgtggtttttgtagagacagggtcttgccatgttggtcagctagtctcaaactcctgaactccagggatcctcccacttcagcctcccaaagggctgggattacaggagtgagccaccacgcccggcccatacaagtttttgtgtggacatgttttcatttctcttgggtatatacctaggagtagaattagtggattacataataattctgtttagccttttgtgtaactaccagcctgttttccaaagcagctgcactattttacattcccaccagcgatgtatgagggtttcaatttctctttagcctcatccatggttaacttctgttatcatctgtctttcttatcataaccatcctaagcctttagtgtgagctggtgggctggcgacccaggagagctgatggttaagtctgagggtagcctgcaggagaattccctctagttcggcgaggcccgtctttctgttttattcaggtccatccacattatggagtatcgcgggatctggccagcagcccacaaggcaatggggctctctctttgtccccaggtggatcggcaggtcgggaaataatagacacacacaagatagtgaaagctgggtccaagggggtcaccgccttctggtcctgcgatgctgccaatgcactggatataccagcatttattattaagtttagtgagggcgagggtaggttagtgagggatttagggtcgtttgattatgaggtgagatggtcacatggggatgaagtaattctttaacataacatctgtatgcagaagtacagtatacagagataagaatttacaatatagtgtgtgcatcagtaatttctaacagagccttaaaacagaaacacagtctttccataacctatgattagcaagatattaatcagcagtaagagttgcagcaaaagctggttacaaacaatccatagaaacaggacgtgaagctagataaccagttagaccagaaattatcagaagggagtatgccttaaccttaaagaggcctagaagagccatggcaagatgagggcatttatagccctatcttatccatatgaacaggtgccgctcatgcgtccatttataggccctccacaagggtcacattccattcccagggctatgaacatctgcttttctgggataggaatattggtgatgtgaaacctccctgactgcacgtctgttcataggctctcttcagggggaagcacatcacgagctgttggcttatactggcagtccaacctggcattgtctttacacaatcctgcatgcaatttcgtatttacaataatcaggagcatttcatcttttattccgtagcaatagtttcagggggtctccctacaatggagagcaatttgctttaaccaaagttcactgatttaaatgttaatctaatccaggagcaccatccaagtagatacattgttctaccatcacagtattatttgctgattgtttttgcagtattttctttcttgttgaactgtaggagctgtttatatattctgggtattttgtatgtttcagatgcttcctcccaatctgtcatttgtcttttgtgttgttgttatgtcatctgaaatatattggtcaatcttttcctttgtggcttctgctttttttttttttttattttccttcgcttaagaagttacaggggccgggcgtggtggctcacgcctgtaatcccagcactttgggaggctgaggcgggtggatcacaaggtcaggaaatggagaccatcctggctaacacggtgaaactccatctctactaaaaatccaaaaaattagccaggcgtggtggtaggcgcctgtagtcccagctactcgggaggctgaggcaggagaatggcgtgaaccagggaggcggagcttgcagtgagccgagatggcaccactgcactccagcctgggcgacagagcaagactctgtctcaaaaattaaaaaaaaaaaaaaaagttacagggggccaggcctattggcctgtaatccagcactttgggaggcagaggtgggtagatcactcaaggttaggagttcaagaccagcctggccagcatggtgaaaccctgtctctactaaaaatacaaaaattagctgggcatggtggcacatgcctgtaatcccagctactcaggaggctgagggaggagaatcacttgaacctgggaggcggagactgcagtgagccaagatggcaccactgcacttgagccagggcaagtgagactttgtctaaaaaaaaaaaaaaaacaacaagttacataccagcaggcaggcacagtgggtcacgcctgtaatcccagcactttaggaggccaaggccaaggtgaaaggatcacttgagcctaggagtttgagaccagcctgggcaacatatggagaccccatcactaaaaaaaaaaaaaaattaaaaaaaaattaaaaaattttcaggctgccaggaatggtggctcacgcctataatcccagcactttgggaggctgaggtgggtggatcacctgaggttaggagttcaaaaccagactggccaacatggtgaaaccccatctctactaaaaatacaaaaattagccaggggtggtggtgcacatctgtaatcccagctacttgggaggctgaggcacgagaattgcttgaacctgggaggcagaggttgcagtgagccaagattgcgccactgcactccagcctgggagacagagtgagactctcaaaaataaaaataaaaataaatctggcaaccctaaaagctgaggctcaagtgagggcacagaaacagccacctccccacccccacctctttttccccttgctgcttgagtcacctccgtgtgagcgattgttgacccagttccaggcgcctgccctcatcatcaggcacctgactagtgtgcctgctgggccccgcctgggctgtctgccccaagaggccccaaggaagtgtgagggataggctaagccataccctgaagccctagcctgtcacaggagaccaccccactgtatgagcccagagacagtcactcggtcacctgtcctttctgggctttgaaagggtgtgagaggggagagggatggggaccagggagccaggctgggagcagggacttggtaagaggattcttggagagatcttgggatgggagctttaagctattgcagaaagctagcccggaagggagattagtgctcagtgctttcacagattacaggagaggaaactgaggctcagggaggctcaggctgaggcctcttgactggagggcttataagctataaagtgcccacaccagggttctgggtccaggcagggctggcttcatagccatgtgacgagggccctgtgctcagaagcagcctgtgctttgtttaaagctctacaggccgggtgcagtggctcacgcctgtaatcccaggactttgggaggccaaagcaggatgaccacttgagcccgggagctcaaggctgcagtgatatgtgattgcaacaatgcaccccagcctgggcaagagagcaagactctgcctctaggaaaaaaaaaaaatttaaagctctgctgtcctatcttgaaattcttaatttttttttttaagacagagtttcactcttgtcactgtgggcggaggattacccaggtgccgaggcaagagattgaaggcacagactgtttcagtataataaagaaaatagttagaatgagaatagttataatacaaattagatatagagatggtcatgggcattatcaatcattagtatagacattattaattattagcctttaatatgactctttgttgtattactaatataaccaaggaataaccggagggtatagggtcaggtgctgaagggacattatgagaagtgaccaagaaggcaagaggtgagccctctgtcacgccctcataagggccgcttgagggctccttggtcaagcggtaacgccagtgcctgggaaggcacccgctacttagcagaccaagaaagggagtctcctttccttcgaggagtcaggaaacactctgctccgccagcttcttgtgggaggctggatattatccaggcctgcccgcagtcatcccaaggcctaaacccctttctgtggtgctgtgcttcagtggtcacgctccttgtccactttcatgttcctcccatactcctggattcctctttgaagttcgtagtagatagtggtagaagaaatagtgaaagccttaaagtctttgatctttttgatacatgcatagaagaaaacgctgacatatgctgccttccctctctgctttggctacctaaaagggaagggccccctatcccatgatcacttgacttgcttgaccttatcaatcgcttggacgactcaccctccttaccctgccccccttgtcttgtatgcaatagatgtcagtgcccccagccattcggggccactaccggtctccgcgtcttggtggtagtggtccccagggtccagctgttttctctttatctctttgtcttgtgtctttatttcttatgatctctcatctccgcacacggggagaacacctgctaagccccgtagggctggaccttatatgtcacccaggctggagtgcaatggcgtgatctcggttcactgcaacctccgcctcctgggttcaagtgcttctcctgcctcagcctcctgagtagctgagattacaggcatctgccaccatgcccagctaatttttgtatttttagtagagacgggctttcaccacattggccaggctggtctcaaactcctgatctcaggtgatccatccgcctcagcctcccaaagtgctgagattacaggcgtgagccatcgcacctggccagagtcctaatacttttgaacaaggagacccacattttcatttgcactggacctccaaactgtgtagcctgtcctggtgctagacacaggccactctcagcctctgtctctcagatttaaaatgcaatgcaggggggctgaggcagccagatcatttgaggtcaggagttcgatagcagcctggctaacatggtgaaacctcatctctactaaaaatacaaaaattagccgggcatggtggcgggcgcctgtaatcccagctactcgggaagctgaggtgagagaatcagttgaacccaggagatggaggttacagtgagctgagatcacgccactgcactctagtctgggcgacagagcaagattccgtctcaaaataaataagtaaattttttaaaaaaattagccaggtgtggtggcacacccctataatcccagctacttgagaggctgaggcactagaattgcttgaaccaggaggcggaggttgcagtgaggcgagatcatgccaccgcactccagcctgggcaacagagcgagactctgtctcaaaaccaataaataaattaattaaataaaatacaatgcagattgacagggaattccttcttcattataaagatccaatgggattagaggtaagaaaatgctttgtcaactgagaatgcactaaaaacagcaggcatttttctagttcaagaaggatctgggactcgggccaggtctccagaagccctcccaagctggacacgaccccttgctccccaggggctccatcattctggaccagctccccacacggcaggcagagatagcaggagcagacaggctatgtcctttcggaactattccaactcatgagtggtagggctgggggtcctggggggaatgctccatatcaggacagagcgtctccctttaggcagaaagggaaaccagagctaggggtggggggttactgggctatgggggggtaatgagggaggagaagcaggaacagcccagtgcccaggctagaggctgtggcagggtatttgggaacagaagtactgaccacagtcaggagacccatgttcccatcccagcataagccgtgaacttgcccagtgacagtggataagccacttctctgttttgtttttcactcaataactgtttgttttttgtttgtttgctttttagacacagggtcttactctgtcacctaagctggagtacagtggtatgatcatggctcactgcagccttgaactcctgagctcaattgatcctcccacttaagtccccagagtagctgggactacaggtgcacaccaccgtgtccgactaattttattttattttttggtagagatggggtctggttgtattgcccaagctggtctcgaactcctgggctcaagtgatcctcctaaaatgctgggattacaagcgtgagccatggcactgttttaacaaagtgtcatatgcaaatactttttttttttttttttgagacacggtctcgctcacccaggctggagtgcagtggcgcgatctcagctcactgcaacctccaccttccaggttcaagcgatccccctgcctcagcttcctaagtagctgggaccacaggtacacaccaacacgcctggctacttttttgtatttttggtagagacagggtttcactatgttgcccaggcaggtctcaaactcttgagctcaagcgatccgcctgcctcagcctcccaaagtgctgggatcacaggcatgagccaccgcgcccggccacaaatgcattttaatcaaattataacaaaaagcagcacccttgtcctctcgcctttcccaccccagacaggcaggtggcaggtgccagaggacaagagtcagtgcttttctgcaagcctagcagacaggctgggagcagagcaaacgggcctcttcactgtctgctgagcttggattccagcgtggcctcctgccagctgggtgactttggcttattgttttgaccctaaatgccttcatctgtgaaatgggctcattggaatgcctgtctcccagggtgctcaggaggcctgaatgagcaaaacatcttgtggagtgcctggcacatcacagttcctcaataaacagtcacttcctcctctctcactcctatgtttgaatgaattttgaccagcaaattgcacttattcaacacaaagaaattcattttccaattaaactttacaaaatcaatgatataaaatttgattttactagagtggaaagaaaaaaaaaaaccaaagacagaaacccaggtcctctaaacccttcccagctcctccatgacacagcccctgggcccacatctgagaacactgtgtccttcccctgggaggggtggctaccgggtcaggaaggcccatggggggccaggcgccacttggtggtctggccagtgtcctgtgtccctatgggcatggggagtacccttcaccaccctgttccttttgctaaggttgagaatggttggggttgtttcacctctgagtggtccctgaattgcttggggactctaggagttggatcctatctgttgttaagggcagcaggtagacagtttgggtggtggcagtggaaggacaggcgggcactgttgactctggctgtgagagctgggagcaggagtagagatggcaagaatcaggcctgtgtttcaaatgcagagttcctgtaacactccagagaatgatctccattcacaggcatatgagatgctaaagtcttatccagtcattagctaggatgcagtggtgttggtgtctgagtgcaaatcaatcagagcccagagttttgcccacctcaccagctccactggatgccgatgccagctcagctcacggccctgatcctccctcccagccctcccagccctgccagcccacctgagtgcccctggcctttctccaggtgggccccctgtgagtcaggagatgtctgctccaactgacttgaatggattactcaactcctccaagactcggtttcctcatctgtaaaatgtgtacacaataacccccgcttgccctccacacagtcatgtgaggttcaaacgggatgatggatgtgaagagatcttgtaaactggcacattaaaaacaggaggaattctttttaggacatcaaaggggttcctcttgttaacccggtggggacctgtctctgaagcaataggccagggcctaggtgaggaagctgccccactcagagagctcagagaggttgggtcagagtcatctccagaacccagagaagggcagggagaagtcagctgcacggaggacaggaagggagaaggagcggcccgccccaggccagctttccctgtcatgcactgttgccacacccctcatctctcagcttagaccttggcagccctaggaaggaagtggggccaggagtactatcctttcaattttattttattttttattttaatttggttatttatttatttttgagacagagaatcgctctgttgcccaggttggagtgcagtggtgtgatttcagctcactgcaccctctgcctctcaggttcaagcgattcttgtgcctcagcctcccaagtagctgggattacaggtgtgcaccaccacgcccagctaatttttgcatttttagtagagatggggtttcaccatgttgatcaggctggtctcgaactcctggcctcaggtgatctgcccacgttgggctcccaaagtgctgggattataggcgtgagccaccacacccagttttccattttaaagatgaaga

SEQ ID NO: 35 - DNA, 30488 bp, Mus musculus
agtaagaactctggcaagcctctgcaatgcaggccgacatggaaagcagatttgtgaaatacgaaaggggataaaaggacaagaagacagagaaaggggtcagaatcagctactcacaggcagatgtgacaagatccctgcagaactggctactttaaaaagttgacaaactgggcgcagaccttcaaacccagcactcgggaggcagaggcaggcagatctctgtgtgttcaaggtcaacctggtctatgtagagagcctcaggacagccagggctacatggtaagagtttgtctcaaaacaaaatgaatccctttaatcccagcacttgggaggcagaggcaggcagatttctgagttcgaggccagcctggtctacagagtgagttccaggacagccagggctatacagagaaaccttgtctcaaaaaaccaaaataaataaataaataaataaagaatgaatgaatgaatcaacagaaagccaaaggctatagtagaaagcttctggaagactttaaaacctaatcagccattcataaacgacattcgcctgtcctaaggggtggaaaacactttccctggagtatgtggtacacagtactgagggtgggggtagagatttttaagcccaggcaggccctttcagcagtctgctatgcaagggaaaggcaaggctacagtgttgggcaggagcctgtctgacaagggagctggctcctgcagcaggcatgacaggttactgtgcagcccttgagcccatgccagactagttgggcaagctggctctgctgatgtcatcagagtaaccctgcagcaacagcagtacccaggatgcagaggcaggatggctcaaaggaaatatccatagattctggaggaagtgtctcccatccatgacactgtattcaatgttactcttttgatgaaaacactaattcaggtgatgaaaatctttccacacagggttgaaacttctttctatttctctggtggtctcctatccccttagccactcaagtccaactagcacatacctgggacaaatgatgctggccactcaaggaccctatccatcctctataacgggattttgttacataatcctaagttttgagggtcttaaagatttagatacatattgtaaaaggagcagcaaatattttaaaaagtgtatccttcatggggaaagacaccatgaccaccaccaaaaccataataaataaaaaccccaatgcctagctggagagagggctcagaggttaagagcactggctgctcttccagaggtcctgagttcaattcccagcaacatggtggcttataaccacctataatgtgatctcgagccctcttctagcctgcagatatacatgcaggcagaatgctgaatacataataaatctttaaaacaaaacaaaacaaaacccaatggcagaggtggtctacagctctatgaactgttggcgagagtttggccatggtccctgcatgggacatgatcaggaaggtgtggctacagatgcaatagcggcactaagtgttttcagtgcaaccaacaacattcctgattcagtttacacctgtgccacgggagggaaatcctgtttagtagtgtttgtcaggacaaaaaacaaaacaaaacaaaacaaacaaaaaaaaaaaccctgtgtctggggaggtcagagactccagtgggaaaggaactgctgttgttttgttaaacagatgcaatgtgagtgcctatgctctgtggattgctgttgctgccagcctcaattaagggaattttcttttgctaattttttaaattacatgaattgtgtgtgtgtttggtttttttttttgtttgtttgtttgtttgttttttgtttttgttttttgagacagggtttctctgtatagccctggcccctggctgtcctggaactcactttgtagaccaggctggcctcgaactcagaaatctgcctgcctctgcctcacaagtgctgggattaaaggcatgtgccaccatgcctggctgtgtgtgtgttttggaggtaagagaaagactggtaagagttatttctcttccactgtgtgggtcctggggatgaaattcaggtcattattcttaatagtaaggacatgtattcctgagccatctcactggcctctgtaaaacaactttttttatgtatataaagtgtacctcagagactcctaaccactagtgaagctcctgaaaacaattggctgccactgtaacatagtggcccaaagcttagccttgggtgaacacctatatgattcttttggaggttcagtgaacatcatggcaaatggagcagaaagaatgtaagaactaggggaaggggtagagggttgtatggtattttcctccaagtgaaaacagtctatcctgtaggaaggctccttaagactcaggaaggaaacaacccacaagtctcaggaagtccttgaaacttaccagattcataaagcccctcccctgccaatcttgtattaagcagtaagggtttctgagaagaggagactctcctatctgtaaagttgcctgtaagttgtgatcagagctccagtgttcgaattttcatgagttgtcctcttgtgctagagcaggctttcagcacaattgtcatccatgcccttgtaagcagcctgtagccatcctcctgtaagagtccctgagaaacccattggctcaccagtttggactttgatggtattgtaactctgttgtattgttgcttcactgtcttgggtgaatgaatattggctccctaggaacagtgtcacacaagtggcctctccacgtggcgacagaggggctctaagcatagagttcacagtaattcagagacatggggctgcctagctccccacaatgaccttcacagtcagatgaaagtccacaatggggaaagtgccccacatgcccgcaggactcatgacacagggagggacctccatcaccacctaggtcactgatcttgtagtgaccactttctggagaagactcccagtgtccttagacatgatatgagggacagcatcaagaggagctgagccctgtgatttgcttggttggagtttgggtttttctttttttcccctcctaactttagtggaatcagattttatatcactaagcttttaatcagagcatttaattagagaatgaatctctctgtcctaaataagtgcaatttgattataaaaattcttgcagctaaatgtgtgatggagaaagagctgacagcttattgagaaattactccctgggtttgtttgcatgtctattacctcccaggcttcctggacgccggggcagtgccctataaacaatcaggatcagacgggtaagagagccggtgggaggcagggcaggggccacggctcattgggcaagagagacatctggctgtcttacctcaacacacctccaggctttcgagaaagggctgtgtcctttgaccctgacctgctgcaatggaagaacaagagtgcagcgttgggtcccactagagttccaacctggggttcatacacaccagcaagaaatccatcacttagccatggtgggcgcagtgataggcaaaaagtcaacatggctgccactcatacagtccaagagagacaacagcttatgctgggacaggaatattgatctcctgaccctgttaagtggttacttttccaaaggtcttttgtggcagctcctagcctggctgctaagctactcctcacctctctccagcccagggtaccactccagttccaatatccctttcttcctaaagaaggatactctatctgaagcaggactcaaggccagagatcttggtcaagctaggcttggatctgacaagaggctgcagtgtggaaggtttggtctgcagttggtagtgccatggagagtgctatggtcctgaagagttaatccacatcactgatgcgaaggctggcgatctctgagttgaaggccaacctggtgtacagagagttccaggatagacagagaaatgggatcatagcctaatgggctattagcaggtagggccttttggaaggatgtatcttttgttttgttttgtttttgtttttttgagacagggtttctctgtgtatccctggctgtcctggaactcactttgtagaccaggctggcctcgaactcagaaatctgcctgcctctgcctcccaagtgctggaattaaaggcatgcaccaccacgtccagcttggaaggatgtaacttatccccaacatactctgttcccttgctttttgtctgtcctgaatgccaaggggttcagcctcctccaggtcctaaaacaatggagctagcccaacttttaatcccaaaatgttggaaactgagccaaaacaaaatttttttcttttcagtgatgtctctgtgtgtgtctgtgtctgtgtgtgtgtctgtgtgtgtgtatgtataagcttgcgtggatgtggatgctaatgcttggaagcatgaaagtagaatgaggttcatgtatgtggtagtcataagacaacatactagactcagttctatcctcccacatattggctcccagggattgaactcaggtcattgggcatgatgctaaactccattagccatttgtattagtcagggttctctagagtcacagaacttatagctagtttctatatagtaaaggaatttattgatgacttacagtctgtagtccaattcccaacaatggtcagcagcagctgtgagtggaagtccaaggatctagcacttgctcattcccgcagggtaagagagacaagagacaagagagagagagagagagagagagagacagagagagacagagacagagacagagagagagagagacagagacacggagacagagacagagacaggcagagagagactcccttcttccaatgtccttatatggtctccaaaagaaggtgtagcccagattaaaggtgtgtgccaccacacctttaatctcagatgaccttgaactcaaggagatctccctgtcttaatcttctggaatccatagccactatgcctcaagatctccataccaagatccagatcagaaacttctatctcccagcctccagattagggtcactggtgagccttccaattctggattatagttcattccaaatagtcaagttgacaaccaggaatagccactacaccattaaactctctcaccagcccggggtttgtttttgttgttttgagtctaactagactaacaagggaggccctggagacctgctcaaacctcagtcccaccttcttttctttgtatggctgtgggtctttttttctgcatgtatgtctatgcatcacgtgtgtgacttcttcttcttctttcttcttcttcttcttcttcttcttcttcttcttcttcttcttcttcttcttcttcttcttcttcttcttcttcttcttcttcttcttctccttcttcttcttcttctccttcttcttcttcttcttcttcttcttcttcttcttcttcttcttcttcttcttcttcttcttcttcttcttcgttaattagctattttctttatttacatttcaaatgctatcccctttcctggttcccctcaaccctctggaagccccctatcccgtcccccttccccctgcttcaatgaaggtgttcccccacactcacccacccactccacctccccaccctggcatctgcctcagccttctgaatgctggaatcatagactctccctagcacacttggctggcactgcattttaaatcagagaagctggaggctgagaggaacccaggcttgggattcatggcaggctctatcgttttcagggtccagagcaaatgaaaatgcagggtccctttgtttgaaaagtattaggaacttcacgggcaggggtgaagttagggatggggtgcttgtattgtgtacatggatgaggacaaagctttcatcctcactacagtggggaaaatggaatttcaagaaccctcttagagcccagtgtgcttgcaagtatgtttggtcctggcactcgggaggaggcagagtcaagtggatctctgtgactttgaggcctgcttggtctgcatagtgagctccaagtcagagagggctgcatagtgagattcactcaaaacaaacaaacaaacaaacaaacaaacaaacaacaaaacccccatggctctggtcacttccttgtgaaggcgcccctgcctcagtctatctccttagctcaccaggcctcagccttagtgtttctgggcctcagtttccctctctgtgaagtgaggggactgttggaccccagtcttccttccaagctaactttctgggtccaccctcctccatcctagccccccaacccccatcccgtccatggaagaacggtgagtgtgtgactcagtttacacaggaggtccagggtcccctgtcaagctagtcttttgtgctgtgattcatcctaccttgtgtgtcctggggccagggctggaaggcctgtctcaccaggaagacagaggcctgggaaaggagagtaagaactgctcgtgaccagtgtgactcaggcaagagaggcaaagtgggggatgggaggctgggttgcttctgtgctctctctccagccttggctttgcgtggttaagcagatacagcaggtaaaaccacaaatccaccaggaagatctcagcttcagatccacggtgaccgctttctgagtgcgtcccaagtgccgcatgggtcgtgtttttgttactattgtctttatctttatttcagtgcatgagacatacttatgctaaggaaaacttaacctttagagtttggtgtggcatcacatgccttccatcccagccctcagaaggcagaggcagggttcactgtggagaccagcttagtgtccatagtaagttccaggccagccaaggctatgtacatagtgagaccctgtctcagaaacaatcaaatgaatgcgaaattcaatttaaacaggcattctatagttttatctggcatgccaagatcctgggggttggggaacttccactctggtatagtcacagcccttctattgggacagagcgttaaccctgactaaaagaagccctgagggacagttgaaaaaaaaatgagggggaggctgggagaaggagaaggtcaccggagggcgagcccttacttggccatgtgctctgaaggctgcactgggctggcctacagaaagagggggggtgtataactttcctggggacacctacccttccgtcagccaaagcaggatatcctggcatttgtgcagcctcacgccagcgccagcataggtttggcatctgggcatcaggctggaaatggacaggatgcgttaataataatgacagagtcaggacttgacatacaagtgtgcacatgacacggggccacacccaggccctatttataaatcctgatcaggcaaggggaaagattaaaaaaaaaaaaaaaagcagaagccacaaaggaaagattgatcagtagattttagatgacgcaatgtcacaaaacacaagtgacaggctgggagacaatggctgcaaaatatgtaatacccaggacatccaaacactttgtgagtaaaaggaaaactcagaaaaacaaattagagggtaactgggcgcatccctccatgtgtgtgttgaacaatattaagtttaggtcagtggtttctcaggagaataaattgacctttatcatgggagtggggccctcctaatccacggaaggcctgaatcatacaagatgggcctggaccttctctctaccattagctttcctggggcttaagcctcccagagtactctaagctttaagacagggacttggtgtgtgtgtgtgtggggggggctggagagatggctcagcagttaagagcactggctgctcttctgaaggtcctgagttcaaatcccagcagccacatggaggctcacaaccatctgtaatgagatctgatgtcctcttctgatgcatctgaagacagctacactgtacttagacataataataaataaatcttaaaaaaaaaaaaaaaaggtagaccacttgccagacataccctagcactacacaaaaaataaacaaacagaggctaggaatggaggcatggctcagcaggtcaagtgtgctcgtggtgtgaggactatgcacagccattgcaatgagggagggagcagagacaggtatgtataccccccgggggtccagggcaaccagtctggttgagatggcggtctaccggttctgtgggtgatcagggatataaagctgagcacagtaccacgcgcctttaatcctagcacttgtgaggcagaggcaggtggatccctgtgaattctaggccaggctggtcaacagaagtttacacagtgagcctctatctcaaaaagtgtgatggaaagaaccgaaatcctcatgtgtttgttgctggtggggatacaaaatggtacagccactttggaaaaacattctcacagtcactcaaaaagttcagcacagaattggggtcactcttatgtgacctcagattttcacagctttgtaagaagaatggaaacgtggacacacgaaaatgaatatcagtgatgctgtttgcaatagccgaaacaaccaagatggccatcacttaatgagtgacatccaggagggaccagtgccctgacatacagccaacagtccttagcatggtgaagcgctcgcctggaggctgtggttagccggcagacacaaagggctgcggccagaccgctcacggctacttctaggcagcacctggatcaggttttgatgtggcacaggggcactttcatcgaaactgtgggcttcctgggatccatgcttgggttttctagaaccaagttatttataaaggacctttttgtatgctgtgtgacttttgagacttcaacaaatatctgctctctcctgatagaggacactgatgtcagaccaaaagcacccaattctagcttagtgaacacctgtgtttaatgggactacttacgggcgtgtagatgatttgaagacagctgtatcaccaaaaaggctacccaagctcaggaaagctgtatctctagagctccctggtaacatgacactatgagttactatgagtgttaccctatgagtcttgtaagtttccagattttcctgggccttctaagttgacctttcctctgtactttctttttccctctaagaggtttcatttcaggggaactagctacataacacaccaatatttctgctttatagcaaaaatgttatgctatcttattatgatcacttcattataaatatgttttttagtagccccagaatataattttccatttttcacaagcactttcaaaactaagttctagggctggagagacagcttaggaatgcttattgctctggtagaggatttggtttgcaatactcacgtggggctgtaactccagctccagtgattcagtaccctctggcccccaaaggctcctgcacacatatgatacatataaattcatgcatgcatacatacatatatacatacatctaacttaaaaatttttttacgaagcttacaaaacctatctaagttctaaaatagtaaccgagaagacggcaaactggataaaggagctcaaatctgtaatcccagcacttaagaagcagaggcaccaggatcaaggtcaggaagttcaaggttagtctagggtacaaagtgagcctgagaccagacagactctgtctctaaagtggggtcgggggaggaggaggaggcagagcctgctggttcatgtctataatcccagctaaagagtccaagttcaaggtctatgtgggttatatagtgagttcaaggctagcctggaaaacttagggagactccatctcaaaataaaaagtaaaaaaaaaaataaaaataaaaatgaagaggctgatcttctatggcaagatgggaggcagagtcaagaaaatcatttggaggcttaagggccaggtatcatgaagcacacagcgcgcagaggcaaaaacagagaccttgccttaaaaacaaggtaaacgccgggcgtggtggcgcatgcctttagtcccagcactggggaggcagaggcaggcggatttctgagttcgaggccagcctggtctacaaagtgagttccaggacagccagggctatacagagaaaccctgtctcgaaaaaaaccaaaaccaaaaccaaaacaaacaaacaaacaaacaagataaacaaggtagggtggtggtggtggtatgtggctttgaaccccagcactgaggaggcagaggcaggtggatctctctgtgtttgagtccagcctggtctatagagtgagttccaggctagccagaactccacagagaaaccctttcttgataaacaaaaccaggtggacagatcgactgtccaaatgttgttctgtgaaatatgcgctccctccttcagacggaaaccagaacctctcgtgttagattagagcaatgccattaagctgtagccccagaagtttgttctacctttttattatttatttcaagcgattgcgtatgtaagtctgggggtgcgctaatgctatggtgtgtgtgcagaagtcagaagtcgtggtttctgggagtcatttctgtcttgtgaaacaaaggaagcaggtttgttaagcttttacctgctccccattttatttccccttgaggcagtgctgcgtctaggatgtagctcagttggtagcacttgtagctcagcatgctcaaggccctaggtctaatcccagcagcacagaaactaaacacggcaatctgcacttgcaatcgtggcgcttgggagatgggggcagaaaactgagaagttctgtgtcagctatctatcaagctgaagctcgtctggaacacaggaaaccctgactcagagggtgagctgcaatgttgctgagtctggtttccaactcctggggttcagcagcaccccttcctcagcctccgcagatggctgtgtctcactagaagcataagcaatggtctgttctggggacacctgtatgaatgtcatggaacacctatgctaacaccatcaggatgcagaatgatgcaccagtcttacacactttctgggactccagtgtaagaagccctcacggaattccacaaccctgcatgcactcctctctatgtaagactcccactgtcctgaactgtatggctgacccccatggtctctattcacccaccataacaattcctcgaaggtggggacagctgaaacaaggaaaccccttccatctcgacagccaccagcctactccacaggcagtgccacacacttggctaatgcccttatcttgaacgtggctttcaacccttgctagaggctgtctgtaaagaacaagatataaactacccaaggaaaggattcactgtctttcccaatctagtttcaagttcctctgtcccaccttatcagcctcttaaaattctttcagcttcaatttaatgcagtgctatcaatatggatttaaatctcttcttccccccagtttgagccaatctcctgcctcctccctacacacatctacagtgcccggtactcgcccttgaacctttattagatttagtctaagccactctccccattcaaacctggggactatttatcttcaccctcacaaccatcttccaactggtttcgagtccttgtctgccaggcgtgaagagacaggaatgtacaaaagtcccgatccagaagcagacaccctccagtaaacgaccttgaacgcgtgccctcagggcagctctcctaactgtgggtgcccttaggcatgaggtgtctcatctctgcaacactctgccgccagaacccaaaccagcaagctctgccctgggggaggcgggctatgttgtcatatgattctctaatcacatgatccctagaaatggggtgtggggagaaagaggaaagggaggaggaatgtgaactgagtagaaaagaaacacagcattccaggagagtcccgcctctacgtagacaagtaaccaatggaagccctggatctccgagcaatggctaatggaaattgaggtgggcgggccatcgtgcggccaagccctagtcctggagctgaccgccagatgcctcccagggagcccggaccccgacgcaggtaggaggaccctctgcagacaatctccccggctactgtccagaggtccagaggcctgaccaggctgcctgtgcaattgagggtcctctggagtctcagctcagagacaagagaagacctgcctcttgaaactcccctaggggtttctgatgcactaacgaggttgtttttttcttttcttttttggaggggtgggggcagttgttgtagagacacctccccgcaccccctcccccccaataagaggcttctcttgcccagcatgtcggaaagctgcaggcctttctccaggacaggaaccaccccactcttgggccagctcctctcttgtccgtacttcccacctctgtctccaggtccggctctttctctttcggacgctgcaagtgttctctgcggcggcgtgcattgggtggggatctccggcccttggcccccagagctcaaaggggttgcgagcaggaccagggcgtgatggctgagtccctgggttgtgtcagctttatttcctttcttggggggcgagagagctaatttccgcctctccccgccacttttcccccgctgcctctcatctggattggctcaccttttaggaaattcatttcccctcgacactcagagttggggggtgccacctagtggaagatgtcggagctagggctttgaaaggctccagttctccctagctgtgtagtgtagaggtggccaggggctcaccactccctagccccgttgagaggaactgggtcttccctaccccttcctggttaggagatggcctctgggatgttctttgaattaggtgaaagggcacttgaaaagacctagagaaggaaagagaaagatggcagatccttctatgtagcccaggctggcctgggattcaccttatagcccaagttggcctggcacttgcaaccctcctacctcagcctcccaaatgctgggatcaaaagcatgcctgccatgtgtgggtggcatttcctgtctttcatagccaccagtgtccaggcagagaagaattgagacacagggagcaatttctgacatagagtgtcacttccaggactaaaacccaagtctctgtacctactttttaaatattttattattattattattattattattattattttttttttttttttttttttttggtttttcgagacagggtttctctgtgtagccctggctgtcctggaactcactctgtagaccaggctggcctcaaaaccagaaatctgtctgcctctgtctcccaagtgctgggattaaaggtgtgcaccaccaccgcccggctcccaccctgtttctatcctgcttgggtcacctgccagaaaaatgctctgtcctgtcctgtttggacctctggcctctgggattcagggtccttctctgacaatattcagggagaccagttggcatatgaacccagtcccatatcccgtcttttttccctgacttgatccttaggcatggatttgaaaagtgaaagtaatattataattactgttttgcatagttgttgcagagaaatacagtaaggagagggagaaagactccctagagggtctttgaatattgttgggtcattctgggttgctgggtaggccagctgggctggggaaaggcttattagggaagtgagaggctcggttcctcctgctgaggcagtgaggcactgtgctgggtcttcccacttgcagctgagtttcggtttctgaggggggagagacggaggcggtccgtttgaggtgccctggtgatgtcgggaagggctcaccatgaagttagctttaaggctgatccagtctctgtgtccccttcccttgggtggggtggggggacagttgtgggtaggcggtggctggcccatagggaagccagaccagaccccactgaccactgcacttctgtttttacaactttctccactgctcggtttcccatatgatcatgtgactgatgactgtccctctccatcccccaaggcttttgaaagctacaggtggcagttcagtgccggcagtggggctggccatcctcctgtgtctgctgaggtctcctctgcctcccagttagcccacagtcccatagataaagccacaaaagccacatgccttcctgactgccataccccgtgccccccccccccacttacccagagtctcagccgtatgtgaggccatgaatccacacgtgttcatgcccacagtgtgtgccagctgacgcatgtgcgcttgctgcacactggtaggacgctgacacaagcgacacatctgcttgctttcctgttggcttgttgagaagactcaatgaagccagggccttggtcagagcacaggggagtgcgtggcctcagagtagaaggtggcacagagtttaaggtggctgccaaactttgcttggcatttgtaggcagaccatgtgggtcctgatgagctggctggccttcgcggcagggctggtagccggaacacagtgtccagatgggcagttctgccctgttgcctgctgccttgaccagggaggagccaactacagctgctgtaaccctcttctggtgagtgcctcctgccccagttggcaccccgggccttttgaagggctggctaccttggattgaccagagcaaggctggcacagaccctttggttgatgtcatctcttctttccaggacacatggcctagaataacgagccatcatctagatggctcctgccagacccatggccactgtcctgctggctattcttgtcttctcactgtgtctgggacttccagctgctgcccgttctctaaggtgacagtgccattggcttggggagttggggtgtgtgtgtgtgtgtgtgcttaaaatctgtgtttacctctttccttcactctaatagtcccaagcaaaagcgtcttgctcacacagacctctctgtgtccatagggtgtgtcttgtggtgatggctaccactgctgcccccagggcttccactgtagtgcagatgggaaatcctgcttccagatgtcaggtgctgtggggcacaggggaggggggcatgtggggagggacatcgggtggcacctgaagggcccaggagcccaaccgcctgggtggccctgattccagaacagaggggcagttctgagagaagaaggtgacagataaggatgccgaattaggggtctggggacacggagaggccatgctggagtggtttaacaccactggatgccttagttgtctctctgcagtaggggctacctgggagatcacctaagccctgggactggccactaaacctcctgtagctggaccagcagttccttcttgacggtcctggtgaatggcctttgctgactagattaatggaattctgggttcttctatttgcagataaccccttgggtgctgtccagtgtcctgggagccagtttgaatgtcctgactctgccacctgctgcattatggttgatggttcgtggggatgttgtcccatgccccaggtacaggtgtagggaaatggtgactagcgggtagcggggtggaactgggacctggggctgatgcagatggattgaggattatctgtctcttctcaggcctcttgctgtgaagacagagtgcattgctgtccccatggggcctcctgtgacctggttcacacacgatgcgtttcacccacgggcacccacaccctactaaagaagttccctgcacaaaagaccaacagggcaggtgaggaggctgggagccacccagccagcagcacctggggggtgaagccacatttgactcttggatgggaaaaagtccccaccatcctggcaacccctccacatgcctcattgctctttcagtgtctttgcctttttctgtcgtgtgccctgatgctaagacccagtgtcccgatgattctacctgctgtgagctacccactgggaagtatggctgctgtccaatgcccaatgtgagtgaatggctggattcccctgagcccatatatagtcttacaaggaggctccaagcactgggctgatccctgagagctctaaggctcatgctgccccctagtggcggtttgaaatagtgtacgctatcagcctggctcgctccctgtcctcactactggagttcagagacttatacttgtcccaacctaggccatctgctgttccgaccacctgcactgctgcccccaggacactgtatgtgacctgatccagagtaagtgcctatccaagaactacaccacggatctcctgaccaagctgcctggatacccaggtacaggaccaaactagaccccatttcattccctcaataaagaggggttcttgtcagttatggaatggctatcagctgggtgggttttgatggccgcatggagggacctggcagttgtagaccctctccactggccttgcatgaggctcactgtgactgggttagctgtgtgctccgttctccgcacctggtcccactgcctttgatgatttggtctctgcccacctcacagtgaaggaggtgaagtgcgacatggaggtgagctgccctgaaggatatacctgctgccgcctcaacactggggcctggggctgctgtccatttgccaaggtacctgggagcagtgggcactgcagtccaagcggaaggggcagccagcttggtaccagtgcttattggctttgccctgtctaccttaggccgtgtgttgtgaggatcacattcattgctgcccggcagggtttcagtgtcacacagagaaaggaacctgcgaaatgggtatcctccaagtaccctggatgaagaaggtcatagcccccctccgcctgccagacccacagatcttgaagagtgatacaccttgtgatgacttcactaggtgtcctacaaacaatacctgctgcaaactcaattctggggactggggctgctgtcccatcccagaggtaacatagaaagggaggcagccctgagggggtagagatagcatcttggcctgggcaggtgggtggcaagagtcccgtggctttatttcttctgcactctgtctagtccagggtgggtacccagtgctgtgacctgtccccagcaggagaagctatgagctagagaggtagactcccatggtcctctgtagggacattcttctctgcccacccctaggctgtctgctgctcagacaaccagcattgctgccctcagggcttcacatgtctggctcaggggtactgtcagaagggagacacaatggtggctggcctggagaagatacctgcccgccagacaaccccgctccaaattggagatatcggttgtgaccagcataccagctgcccagtagggcaaacctgctgcccaagcctcaagggaagttgggcctgctgccagctgccccatgtgagtctccaccccaccgccctgggggaagggagctgtgttcttgggatatgagtgtgatcccatcccctcgctccacaggctgtgtgctgtgaggaccggcagcactgttgcccggccgggtacacctgcaatgtgaaggcgaggacctgtgagaaggatgtcgattttatccagcctcccgtgctcctgaccctcggccctaaggttgggaatgtggagtgtggagaagggcatttctgccatgataaccagacctgttgtaaagacagtgcaggagtctgggcctgctgtccctacctaaaggtcagtgtgaccctgactctggggctgggtgtggccatgggctgtattctgccctgtctagtacttactctcctttgactatccagggtgtctgctgtagagatggacgtcactgttgccccggtggcttccactgttcagccaggggaaccaagtgtttgcgaaagaagattcctcgctgggacatgtttttgagggatccggtcccaagaccgctactgtaaggaagggctacagacttaaggaactccacagtcctgggaaccctgttccgagggtacccactactcaggcctccctagcgcctcctcccctaacgtctccccggcctactcatcctgagtcaccctatcaccatgggaggtggagcctcaaactaaaaccttcttttatggaaagaaggctgtggccaaaagccccgtatcaaactgccatttcttccggtttctgtggaccttgtggccaggtgctcttcccgagccacaggtgttctgtgagcttgcttgtgtgtgtgtgcgcgtgtgcgtgtgttgctccaataaagtttgtacactttctgaatagtatctgatttgttgcgccagggccctctgataccagcattccccataggaaaaaaaaaatcacacatacacatacacatacacacacacacacacacacacacacacacacacacacacacacacacacagagagagagagagagagagagagagagaaagacagagctttaacctcaccagctttgtattttttttgttgtcaagagtgttatcacattatcctctagtctccaggatcgccccagccaccagccctgtgacatccaagcagcacccctcccctcccaagggtccacagagattgcccctcccttcccagccctcaccctagcagctgaggctggctcgcccctcctgctctcccacaatagatctttctatgtacagccacgtttatacaggcactgctcccccaccccagccctcttccccagcccctcccatgggggaccgggtccctcccacctccctctgtttggaggccaatccagggtcccttcccaagacactcccccagcacataccacagatgagctctgccgacccctgagctcttctccgggataagagcgcatgcccctccgccatagcatcccggggcgcgcactctgggaacctgcaggggcggtgggtgacccccgggccgcactacttgacgttgaacaccattagcggccgctcctcccgccgctgccacgggctcttcttgtcgccagcctcgtcgcccacctccgcccccagctcgtcctccgggctggtgagcgaatcgcgccgcagctcactggcgctgctgcgggaactgtccccacggctgcggccccgacccctgggtaccgtggctgcccggccttcgggtgccaccacctcgtccagcaggggcgttagcgagttgtcctccggcgagcagaggccggtgcggctctcgctgctgctgggctctgtgtcttcgctgagcgccaggcgcgggggcgcgggcggcggcggcgcgggcagctgcgcgcgctcccgctcttccctcgggagccggcggcgcgcaggtcgagcctcgtgcacgtcgacgcctgagtccaggctggcatcggtgctgcggccgccgctgcccgcctgcaggtcgatgtaggagtggcgcacttgtgaattggaacgtccgtccagggatacgaaccaggcgcgcgggtgaggcttcactcccagttccagcagcttcttctcggttagagcctgcagctcgccgttgagctgcgccatggtggactcgttgaacagcaccggaatggtgaccgagccgctgaccggtgcggagcgcccgccgccccagccctcgccgccaccgctgtcgcctcccgcacccgcgtggccctgcatcagggggcgctgggggtcgggttgagggaaggggcgcgcggggccggcggccgagccctccggcggggtggcttcgtcgcccactcccgcggcgcccgcctctccgcccaggcgcacatagtgtgcggggatcaccagggtgggcatgacattgcggtacacgttgtccttgaggtggtcgatggaaccgcagaaaatgagctggcccggttggctgagggacggcggccgcgccagctggtctaccgactgtgacagcagaaagtcgggggtcttgctctcggccgcccccttgtggcccagataatggtcgaaggatggcggcggcgagggaggctcatgcaggaaggccgcggccccggctggaccccgccggtattcgtccaggctgggctccagcccgccaggaccctcgacggagcgggcgctcttgagcccggcaccctcaacggtgcgggcaccaggaggctcggcggccggtcggctggcggagcgcggtttggcacggaagaagtcatcccgcgaggatgctaagtctcgggagctggagaaggccgagtgtagggagcctgggggaggggcctcggggtctcccgacgacgtaggctccaggggtcccccgcagatgagatggagttgagacatcgacgtagcctgatctcgtttgttgtccgaggggccggagagctgcagcttgcggtgctgttgtctaggcttcaagcagcgtcttctgcagaggaggaaagagacaggcgctcagggatgccgaaagtaaaggtatttccgtaaaccgccacagctgctgacataagggatggagacagcagtgaggtggagatgaaggatgcctggaacattcgagagaaatggtgggggacccagatgatgtctagaagctgtttgtagaaagaagatcattcatctaggagctgcacccgttcagcttcatgggggtaaacttggcaacgtttggcatgtacagcagctaggagtgcctgctctgggagtgagagctgggctggttggagccgcgattggagtctctgcagaggcaaggcctgcaggtcctgccatctgtcaccccattctctaaagccaccagtctctggagtcttagcttttgcattggcattctttcctggaagcactttaaggatcttctagaagcatctttgggaccccagtgcagagcacaggagcagggcttgggatgtggtgagagaaggtgggacagggccccaggtgaactcacctgcagtagtagatcagtagacacagcagaatgagcaccagcagcgccagggcagccaggatcgtcagcaggaagattgtgtggtaggtgccaatgtcctgaatgcctgaggtgatggtaaccagccctgtgccaggcaagggcttaggacgcccttctcacctttcacaactctcccacccttcccttccccctactgcccctcccccactgccccaccaatctcaccagatgtaggggaggccatggcagctacccagtaccctagctgcggggagacaaaagtccagtagagctgtcggccttccttccgaatcacaccagtgccatttcgtacccacagtcctagaaagaggccaggggagttcatcagactcaatgttctgccacctccaacagaagccccatcctctagcaccggcaccctgcccctaacacttaccactcttggggtcaaacctccaggctggaatgctggtgcccacagcaagggcacgaggctctgagggcactggcagggacaggtgaatggggcctgagagaggcacctctgtcccattgcctgttagcaggtggacgctcacagcagccagtggtatcagctccagccaggagccattgcctgaaggaagaggacactggtaccaatggccgcgtccttatggaaggaatgtgtctcccctctacattaagtacaggctcacctgagctggaggcctcggtccccaggaaggcagggaaagcccgcatttcctgctgggtgctggccggtgtgagcgaagcccaaagctggctgtaggtggaactgacaggcaggcgggcagctctacgctggaactgcacccagggctgggagcgggcacctggatggaaagcaggcactgtggtagcctgacccagaccaaagcagaaagcaagtatccaaaaaaagagaaccactgggttaggccggggagggtgggaatagagagaggatgggataaccacagattggtaacttgaagggatgtgataacggaacctccagtcctggagactgtgtgaccttccacaaattactcacttcctctgaagtttccttattaacatataaatgatgggggtcatgggactgaagagaaagaagtcaccgcggtctagaggagggtcgcggctcatacagaggctctgggtgctcttcccagtacctacatggcagctcacaaccacctgtaattctagttccaggagccgggcgtggtggcgcacacctttaatcccagcactcgagaggcagaggcaggcggatttctgagttcgaggccagcaagtgagttccaggacagccagggctatacagagaaaccttgtctccaaaaaacaaaaaacaacaaaaaattctagttccaggtgacccaataccttctctgcacatgatacacagaaatacactcaagggtgcatgggtgcgcatgcacacacacccaacacacacacacacacacacacacacacacacacacacacacacacacacacgtcatgtcctgagccaacatctgtgtggtatgcattgagttaggtcatgggatgcagaactaagatcccctgtcttcatgcttaggctactgcctgcctgcctgcatgcctatctgtctgtctgtctgcctgtctgcctgtctcactatttatttatttaggttttatggttttttgaagcagggtctccctatgtggctctggctctgatgacacgcatgctgtagcccaggctgtcctggagctcccagagatctgcctgcctctgctggcctgagtgctggatcaaaggtgtgcgcagacactgttgggcagtgtgtgctgctctttacagtttctctagaaccttctgctgtgatgggaagaagtgttttgtttgggccctcatttagcacccactgaatacatgtggcaagcgagcctggcccggtggcacacatgtgtaacgtcagcacaggagagtctgcggcacaaactggagtctcgggccagagttctcaggctggaactctgaactacagagttctgaaatactgtctcaaaaattatagaaaaagagaaaagtggccaatgaacactttttaaaattccttttcctttatttttatgtgtctgagtgttttgtatgtctgtgtaccacaggtgtgcagtgctcttagagaccagaagagggcgtgagatttcccccagacaagttagtctgtgaggtaccatgtgggttctgggaatccaataggacccacgtacttggaaaagcaacaagtgctcttaagcactgaaccatctctctagccccaaattatttccatttagatagacacacattagcttactgtgctctctctctctctctctctctctctctctctctctctctctctctctctgtgtgtgtgtgtgtgtgtgtgtgtgtgtatgtgtgtgtggtgttgggactgcgggagcagacatataaacagaattccaatcctgtgtggtcataggtaacatttattaagcttcaaaatatgctggatgctgtcctaagcaggctatgtatagtaacccccttaattagcctaatggcccctgaggtatcaactccattttatagatgcagaaatggaaccagaactccagcaacataccagggccaccatccctggagcctggccctgtcaccccacacccctctacacaagtctttcctgctttattactaaatgttgggagcctgggctaccctgtggggtgttatagggtaagggagaaagaaagtgggagttgcctttctgggcatgtaggagagaggcccagcggtcacaggctacagtggtgtggcagctggggcattctgactagtactgccaacgcactgcacttcacaccaacagccacggaagccatgagagggcagcaagctctggggccaccaagatccattcgtcattttagagtccccagggggcattggaggcctccggtatggggttatccagatgcagctggcaaacaatcaatttgccaataactgggtaagaatttaaactggaagccgggcgtggtggtgcacgcctttaatcccagcacttgggaggcagaggcaggaggatttctgagtttgaggccagcctggtctacaaagtgagtgccaggacagccagggctacagagaaactctgtctcgaaaaaccaaaaaaaaaaaaagaatttaaactggagagggctctttcaaactccaaaccccactgtggctctgtagtcctggccaagcaccttatagtatactacgtaccaggccagaaagtaccctgagccctcacagccctcctgcctgcctgcctgccaactccaccccctctctctctagcccccgcccatcctctatccccagcccacctagctccctttattagctccaccgggctcccccctccaaaggtgaggggcacttctgccactgtccacctgctctgtgatgctcccaggatttgcaatggtgtttgtctgtcttcctacttgcccatgagcacaggcaggctgtgggctgttctttttcacccccatgccccagccccagccccagccgtgtgcatggcacagagcaggtgcagaagatgagactgaaggcttctgcagaaggaccactgaggatgtcccaggccactggagagacatccagttgccctagaaagccctcgtgacttcagaacagccaggcacccagtaggtgcacaacaaagacaggtagatccactgaagataaacaggtcagggaagcgggagagaaatcacaaagcccccaaggaaactaaatatttattaaatacctgtggtttttttctcttagcacatttgatgcaattttttaaaccttaatttgatgaagtaagtattaaccttccacatctttttttctttcttttgtttttttggttttgttttttttttttccgagacagggtttctctatgtagccctggctgtcctggaactcactctgtagaccaggctggcctcgaacttagaaatctgcctgcctctgcctcccaagtactgggattaaatactcttccacatcttctacacaagttaagtatggctcagagagaggtaaagtggcttgccctggacacccagctactgtgtgaagaagcagaggtttctgcatacaggtcaaggatggaagaggagctaaggaatggagggggtggggcttacctggcgagcctaggaggatgtgcacaaggtcctcatagaggatgagggtggctggcctctctgggagcaggtagaggctgacggatgcgtacactgtaaaacaggcagcctgtcagctctagaagcatttcctaggtacccccttgtcttcatcccagtggcttcatcctcccacgacccagtatgccccagcccaggagcagctgctgggaaactgcccttccacccgcaaggactattttgggaaggggctgatggtgggtcagctgctgtccaacccgctcctccccccctccccctgcccctgcactcacacggcagcttgtcaacacgccagggcactgagttggtgaggaaaccggggcgggcagcagtgaccaagacccaggtacccaggcggtaactgaggggtagtgtggccacgccctctgagtccgtagtaccagcagccagaagagtgcggttcccaaagacgtctactgaggccctggccaggggcaccagctccccgctcacatatacctgtaccttgatcaggatctctgtgggaagacggggtgaggggatgaggagtgagggagggggctgctgggggagagaggcttgggggctgactcctggggatcaaatgtagggcctctgtctgtgagttgtgctctctgccaaaatcagcagaggaggagagagggctatttatcccctttttaccagcgctagcccatgcatactttcacaattctaaacttgggcaatgcctgtgatgggtgatgtcatcgttataattgacagcattccccactccccacccccattcttaatggctcacaaaataggaatatactttgcagccagtgaaatgctatatttgctaaaatatgccctcagcccattttacagataaagaaagtgaggcttagaaggcgttaagtccttgtactgcagttaagtgagaaatctgagctctgaacctagtagtctacttctagagttaaaaaatgttagccagtctaccctaaaagaacaatggtctgaagaggagaagagagaccaagaaagaatgagccctgggagaatggggagcctcaggtggagggggagagggcaagatcgagtaacctagaggaaagatggaagcttgagttctcaaggaacaaaaaaaaaaaaaaaaaaaaaaaaatcaagtcaagccaccaaggaacctgtcactctgtcacttcttacacacaccctctacccaggatcctatccaaaaacccttcaaatttagggacctgccccagctcctaagctcaaaggagtatcttgatccctcccatcacagtctgtagctggtcagcgacagtcactcaccatggcaacgccctcattcctcccgggagatcaagcaaaggagctggggcactgatggggatgggctacacggaaagcagacccaggcccaagggaaagagtgtgcagggactgggacgcataaacatttaaatttccaggctatctgtgaaaccccccccccgtcccccacctcccttcctccagggtaacctggccactctggccctgaaggcgaggtgcttgggtttgggtgggtgatgaggacttaaattactctcatggatttccacaggtcgcctctgccatctaaccctttccactcagcacccgcttctccctcaagactaggccccgcccccgccttcctaatgagcatcatagattgggagacaagtggaggatgcactggatgctgggggaaatcccaggtagagagggagcctggagcctggagcggagagaagaaggggcggggctggggggcgtgggcagcctcagaacctcaaggcctttcaccgacttgacactccacagtgacaggtgtctcttctcaggcttccaaagcaggataccacgcctggtcctggcatcccatccagctattcccagagcccacctccctctccaggataggccagagtctagcttgttagggtggggcacccactctgcccactcccacgctggctctccaaggagtggcagtctcctgccccagtaggaattctgagaagctaaaagagtctgactgctcccagccccattctaggcttaggaacagctggagaaagcagctgggaagagaggatcctggagtctgaaattttgtcacttgagggaagccttttggctcaagggccaaagcctcaaaagaggtagaggagggacctgggaaacaaaacagaggtgggcaggtaaggccggaaggaaagtcagcaccaagctgggaggtggggcaggtgtctagcagactcctttccctgcttccccacagcctgggctccccgccagctgcctgagagagccccttattctggctgtattccagccaattccctgggcccttcctccctcccctgggccttggaggaggagaagcttcttagcttgggcctcttctctgggagattaggggagactgaggcacaggaagatccctccccaccctcaaagcttggcattccatacagtatctgcatctctccacttggctagccctgccttgttccaggaggaaatccgacctccttccttcatccggaccctacttccctcaaccagacccccgccttccgcctttcctgctagcttctggtgtgtgtgtgtgtggggggggggtggcataaggagcaaagaacactgtttcaggatggaaccgcaggcagggaaggaagagcaattgtggggtggtggcgcaggaaccagaaaggtgggagagggaagcagggatgaggagaagagaggcccagagcacccacgagtgagctgtggagtcagggtgtccagctcccaatgcaggggccagctctaccttcacctcacacacccatgtgggccaggttaggcgttaggagggtcagggtctcctttgggggcgggggaatgagtgaaatgaagaagggaagctggtagaagagagtagtagcaagagacaggctggacaaggacccagacacctgccctctcagctggtactgcccacagctagccagccagctcagcatggctccgtgaccacagccctgccatgcgccttgagccgggaatcacaataacgcctgtactcgcccccccccttccaaatgcatcccctccctctagcatgagctgatcagtgtttattcggtgagccccaaattctaaacctggggggggattggctagaagctgtcaggctcctgggtgaaaaccccattcgagcagtcaatcccgcctacagcctcacccactccccctctcccctcccccctcgcagcccagctctaagctcccagccccagtccggccagggtggcagccgatgtctgcgcccccacccagcctgggtcgcagctagggacccgcggggggctgcggagccggcgcccgccccagcccgcccctgggcgggtgtcttccgcagacaatagctctggctgcagtgcctcgcggaccaggagggagaaaaacaagtcggaggaggcggcagcgccgagcctggagaccctcgccctctccattgtgtctccccaagacccccgcagcaaacagtcccccaatctctcccccagaagcaccgatctcaggtcgccttccccccgccatcctgggagcagaatgcatcccaagtcactagcaccgtgaagagggggccagcggtggcagccgatcacagggtacaggcccacgatcgccgcccctcgaggccgatactcaccctgcgggctggggggctccggcggagacttgccgggagcccgggaggcgccgccgagcagcagccccagcagcggcagcagccgcgcgaggacgccggggccactcggcggcggcatcgcggggctcggccgggccctagcggtccatcgttgccgcccggccctgatcggccggccccgctcagccccagttctgcaccgctctgtgcagctccgggttgggctcccgctccggctgcggcgcccgctcggcgcgattgtctctgcccggagcggccgccagcgccccctgcagtcgacacccggcacggcgggccagcgggcaccgccccctcgaggcccggctctgcctgcagcccacccggcagcccccacccggtaacccaagattccagacagcaatggagtgcagcgattagggggcaattacccgggttggggttggagagctcttgagatgtggtgtaaaattgaggggtaggagaatggctattgcctactcctaagggctgtagttggaaagagtgagaattttcttctcccacaccgagagctccgtagtgttgaggaggctgcggtctccatccaacattgggaagctgacctgtggtcatgtcagcctcctcccccgccccccatgacttccattcagaaacaggcaagacaagttccttacagccttcttagcctctcttgctttaaagaggatggtctgaagttcagaatgacctcgaactcatggcccttttcctgcctccgcttccagagtgttgggatttcaaatgcaagccgctatattcagcctcacttatcctttaaagtgacaatcataataatctctacctagtaacgtggttgagataccaaggtgtgtgtgaggggtggttcggggtgatggtggaggaatgccaggcaccttttatcccaacaggaagagctctgtgagttcaaggccactttgctctacatagccagttcctggtcctctgacacaagtctgacaggtgcaccggtgcagtaagtggtgctattgttggccggggaggggcttgcctcccttggagtaataagacctccttctggaggagacatctggctagagaggttttgtagaagtggaagcagacgcctccccccacaaaagaatcccattggttccggcatcctgattgacaaactggatcttccttcgctgaaccccatgtttgaagacaagctcccaaacaacctttctctccttatcgtttctggctgtcactatcccttagcttctgttttgcgtcgttctctctgcccagtcacctcttcagcacagcctgctacccaggagacctatgacaaggatggcttcccctaggggacgcagcaggcttccctctgactaagtctctctacttaagggggcaaagtc

SEQ ID NO: 36 - DNA, 30488 bp, Mus musculus
gactttgcccccttaagtagagagacttagtcagagggaagcctgctgcgtcccctaggggaagccatccttgtcataggtctcctgggtagcaggctgtgctgaagaggtgactgggcagagagaacgacgcaaaacagaagctaagggatagtgacagccagaaacgataaggagagaaaggttgtttgggagcttgtcttcaaacatggggttcagcgaaggaagatccagtttgtcaatcaggatgccggaaccaatgggattcttttgtggggggaggcgtctgcttccacttctacaaaacctctctagccagatgtctcctccagaaggaggtcttattactccaagggaggcaagcccctccccggccaacaatagcaccacttactgcaccggtgcacctgtcagacttgtgtcagaggaccaggaactggctatgtagagcaaagtggccttgaactcacagagctcttcctgttgggataaaaggtgcctggcattcctccaccatcaccccgaaccacccctcacacacaccttggtatctcaaccacgttactaggtagagattattatgattgtcactttaaaggataagtgaggctgaatatagcggcttgcatttgaaatcccaacactctggaagcggaggcaggaaaagggccatgagttcgaggtcattctgaacttcagaccatcctctttaaagcaagagaggctaagaaggctgtaaggaacttgtcttgcctgtttctgaatggaagtcatggggggcgggggaggaggctgacatgaccacaggtcagcttcccaatgttggatggagaccgcagcctcctcaacactacggagctctcggtgtgggagaagaaaattctcactctttccaactacagcccttaggagtaggcaatagccattctcctacccctcaattttacaccacatctcaagagctctccaaccccaacccgggtaattgccccctaatcgctgcactccattgctgtctggaatcttgggttaccgggtgggggctgccgggtgggctgcaggcagagccgggcctcgagggggcggtgcccgctggcccgccgtgccgggtgtcgactgcagggggcgctggcggccgctccgggcagagacaatcgcgccgagcgggcgccgcagccggagcgggagcccaacccggagctgcacagagcggtgcagaactggggctgagcggggccggccgatcagggccgggcggcaacgatggaccgctagggcccggccgagccccgcgatgccgccgccgagtggccccggcgtcctcgcgcggctgctgccgctgctggggctgctgctcggcggcgcctcccgggctcccggcaagtctccgccggagccccccagcccgcagggtgagtatcggcctcgaggggcggcgatcgtgggcctgtaccctgtgatcggctgccaccgctggccccctcttcacggtgctagtgacttgggatgcattctgctcccaggatggcggggggaaggcgacctgagatcggtgcttctgggggagagattgggggactgtttgctgcgggggtcttggggagacacaatggagagggcgagggtctccaggctcggcgctgccgcctcctccgacttgtttttctccctcctggtccgcgaggcactgcagccagagctattgtctgcggaagacacccgcccaggggcgggctggggcgggcgccggctccgcagccccccgcgggtccctagctgcgacccaggctgggtgggggcgcagacatcggctgccaccctggccggactggggctgggagcttagagctgggctgcgaggggggaggggagagggggagtgggtgaggctgtaggcgggattgactgctcgaatggggttttcacccaggagcctgacagcttctagccaatccccccccaggtttagaatttggggctcaccgaataaacactgatcagctcatgctagagggaggggatgcatttggaagggggggggcgagtacaggcgttattgtgattcccggctcaaggcgcatggcagggctgtggtcacggagccatgctgagctggctggctagctgtgggcagtaccagctgagagggcaggtgtctgggtccttgtccagcctgtctcttgctactactctcttctaccagcttcccttcttcatttcactcattcccccgcccccaaaggagaccctgaccctcctaacgcctaacctggcccacatgggtgtgtgaggtgaaggtagagctggcccctgcattgggagctggacaccctgactccacagctcactcgtgggtgctctgggcctctcttctcctcatccctgcttccctctcccacctttctggttcctgcgccaccaccccacaattgctcttccttccctgcctgcggttccatcctgaaacagtgttctttgctccttatgccaccccccccccacacacacacacaccagaagctagcaggaaaggcggaaggcgggggtctggttgagggaagtagggtccggatgaaggaaggaggtcggatttcctcctggaacaaggcagggctagccaagtggagagatgcagatactgtatggaatgccaagctttgagggtggggagggatcttcctgtgcctcagtctcccctaatctcccagagaagaggcccaagctaagaagcttctcctcctccaaggcccaggggagggaggaagggcccagggaattggctggaatacagccagaataaggggctctctcaggcagctggcggggagcccaggctgtggggaagcagggaaaggagtctgctagacacctgccccacctcccagcttggtgctgactttccttccggccttacctgcccacctctgttttgtttcccaggtccctcctctacctcttttgaggctttggcccttgagccaaaaggcttccctcaagtgacaaaatttcagactccaggatcctctcttcccagctgctttctccagctgttcctaagcctagaatggggctgggagcagtcagactcttttagcttctcagaattcctactggggcaggagactgccactccttggagagccagcgtgggagtgggcagagtgggtgccccaccctaacaagctagactctggcctatcctggagagggaggtgggctctgggaatagctggatgggatgccaggaccaggcgtggtatcctgctttggaagcctgagaagagacacctgtcactgtggagtgtcaagtcggtgaaaggccttgaggttctgaggctgcccacgccccccagccccgccccttcttctctccgctccaggctccaggctccctctctacctgggatttcccccagcatccagtgcatcctccacttgtctcccaatctatgatgctcattaggaaggcgggggcggggcctagtcttgagggagaagcgggtgctgagtggaaagggttagatggcagaggcgacctgtggaaatccatgagagtaatttaagtcctcatcacccacccaaacccaagcacctcgccttcagggccagagtggccaggttaccctggaggaagggaggtgggggacggggggggggtttcacagatagcctggaaatttaaatgtttatgcgtcccagtccctgcacactctttcccttgggcctgggtctgctttccgtgtagcccatccccatcagtgccccagctcctttgcttgatctcccgggaggaatgagggcgttgccatggtgagtgactgtcgctgaccagctacagactgtgatgggagggatcaagatactcctttgagcttaggagctggggcaggtccctaaatttgaagggtttttggataggatcctgggtagagggtgtgtgtaagaagtgacagagtgacaggttccttggtggcttgacttgatttttttttttttttttttttttttgttccttgagaactcaagcttccatctttcctctaggttactcgatcttgccctctccccctccacctgaggctccccattctcccagggctcattctttcttggtctctcttctcctcttcagaccattgttcttttagggtagactggctaacattttttaactctagaagtagactactaggttcagagctcagatttctcacttaactgcagtacaaggacttaacgccttctaagcctcactttctttatctgtaaaatgggctgagggcatattttagcaaatatagcatttcactggctgcaaagtatattcctattttgtgagccattaagaatgggggtggggagtggggaatgctgtcaattataacgatgacatcacccatcacaggcattgcccaagtttagaattgtgaaagtatgcatgggctagcgctggtaaaaaggggataaatagccctctctcctcctctgctgattttggcagagagcacaactcacagacagaggccctacatttgatccccaggagtcagcccccaagcctctctcccccagcagccccctccctcactcctcatcccctcaccccgtcttcccacagagatcctgatcaaggtacaggtatatgtgagcggggagctggtgcccctggccagggcctcagtagacgtctttgggaaccgcactcttctggctgctggtactacggactcagagggcgtggccacactacccctcagttaccgcctgggtacctgggtcttggtcactgctgcccgccccggtttcctcaccaactcagtgccctggcgtgttgacaagctgccgtgtgagtgcaggggcagggggagggggggaggagcgggttggacagcagctgacccaccatcagccccttcccaaaatagtccttgcgggtggaagggcagtttcccagcagctgctcctgggctggggcatactgggtcgtgggaggatgaagccactgggatgaagacaagggggtacctaggaaatgcttctagagctgacaggctgcctgttttacagtgtacgcatccgtcagcctctacctgctcccagagaggccagccaccctcatcctctatgaggaccttgtgcacatcctcctaggctcgccaggtaagccccaccccctccattccttagctcctcttccatccttgacctgtatgcagaaacctctgcttcttcacacagtagctgggtgtccagggcaagccactttacctctctctgagccatacttaacttgtgtagaagatgtggaagagtatttaatcccagtacttgggaggcagaggcaggcagatttctaagttcgaggccagcctggtctacagagtgagttccaggacagccagggctacatagagaaaccctgtctcggaaaaaaaaaaaacaaaaccaaaaaaacaaaagaaagaaaaaaagatgtggaaggttaatacttacttcatcaaattaaggtttaaaaaattgcatcaaatgtgctaagagaaaaaaaccacaggtatttaataaatatttagtttccttgggggctttgtgatttctctcccgcttccctgacctgtttatcttcagtggatctacctgtctttgttgtgcacctactgggtgcctggctgttctgaagtcacgagggctttctagggcaactggatgtctctccagtggcctgggacatcctcagtggtccttctgcagaagccttcagtctcatcttctgcacctgctctgtgccatgcacacggctggggctggggctggggcatgggggtgaaaaagaacagcccacagcctgcctgtgctcatgggcaagtaggaagacagacaaacaccattgcaaatcctgggagcatcacagagcaggtggacagtggcagaagtgcccctcacctttggaggggggagcccggtggagctaataaagggagctaggtgggctggggatagaggatgggcgggggctagagagagagggggtggagttggcaggcaggcaggcaggagggctgtgagggctcagggtactttctggcctggtacgtagtatactataaggtgcttggccaggactacagagccacagtggggtttggagtttgaaagagccctctccagtttaaattctttttttttttttggtttttcgagacagagtttctctgtagccctggctgtcctggcactcactttgtagaccaggctggcctcaaactcagaaatcctcctgcctctgcctcccaagtgctgggattaaaggcgtgcaccaccacgcccggcttccagtttaaattcttacccagttattggcaaattgattgtttgccagctgcatctggataaccccataccggaggcctccaatgccccctggggactctaaaatgacgaatggatcttggtggccccagagcttgctgccctctcatggcttccgtggctgttggtgtgaagtgcagtgcgttggcagtactagtcagaatgccccagctgccacaccactgtagcctgtgaccgctgggcctctctcctacatgcccagaaaggcaactcccactttctttctcccttaccctataacaccccacagggtagcccaggctcccaacatttagtaataaagcaggaaagacttgtgtagaggggtgtggggtgacagggccaggctccagggatggtggccctggtatgttgctggagttctggttccatttctgcatctataaaatggagttgatacctcaggggccattaggctaattaagggggttactatacatagcctgcttaggacagcatccagcatattttgaagcttaataaatgttacctatgaccacacaggattggaattctgtttatatgtctgctcccgcagtcccaacaccacacacacatacacacacacacacacacacacacacacagagagagagagagagagagagagagagagagagagagagagagagagagcacagtaagctaatgtgtgtctatctaaatggaaataatttggggctagagagatggttcagtgcttaagagcacttgttgcttttccaagtacgtgggtcctattggattcccagaacccacatggtacctcacagactaacttgtctgggggaaatctcacgccctcttctggtctctaagagcactgcacacctgtggtacacagacatacaaaacactcagacacataaaaataaaggaaaaggaattttaaaaagtgttcattggccacttttctctttttctataatttttgagacagtatttcagaactctgtagttcagagttccagcctgagaactctggcccgagactccagtttgtgccgcagactctcctgtgctgacgttacacatgtgtgccaccgggccaggctcgcttgccacatgtattcagtgggtgctaaatgagggcccaaacaaaacacttcttcccatcacagcagaaggttctagagaaactgtaaagagcagcacacactgcccaacagtgtctgcgcacacctttgatccagcactcaggccagcagaggcaggcagatctctgggagctccaggacagcctgggctacagcatgcgtgtcatcagagccagagccacatagggagaccctgcttcaaaaaaccataaaacctaaataaataaatagtgagacaggcagacaggcagacagacagacagataggcatgcaggcaggcaggcagtagcctaagcatgaagacaggggatcttagttctgcatcccatgacctaactcaatgcataccacacagatgttggctcaggacatgacgtgtgtgtgtgtgtgtgtgtgtgtgtgtgtgtgtgtgtgtgtgtgtgtgtgttgggtgtgtgtgcatgcgcacccatgcacccttgagtgtatttctgtgtatcatgtgcagagaaggtattgggtcacctggaactagaattttttgttgttttttgttttttggagacaaggtttctctgtatagccctggctgtcctggaactcacttgctggcctcgaactcagaaatccgcctgcctctgcctctcgagtgctgggattaaaggtgtgcgccaccacgcccggctcctggaactagaattacaggtggttgtgagctgccatgtaggtactgggaagagcacccagagcctctgtatgagccgcgaccctcctctagaccgcggtgacttctttctcttcagtcccatgacccccatcatttatatgttaataaggaaacttcagaggaagtgagtaatttgtggaaggtcacacagtctccaggactggaggttccgttatcacatcccttcaagttaccaatctgtggttatcccatcctctctctattcccaccctccccggcctaacccagtggttctctttttttggatacttgctttctgctttggtctgggtcaggctaccacagtgcctgctttccatccaggtgcccgctcccagccctgggtgcagttccagcgtagagctgcccgcctgcctgtcagttccacctacagccagctttgggcttcgctcacaccggccagcacccagcaggaaatgcgggctttccctgccttcctggggaccgaggcctccagctcaggtgagcctgtacttaatgtagaggggagacacattccttccataaggacgcggccattggtaccagtgtcctcttccttcaggcaatggctcctggctggagctgataccactggctgctgtgagcgtccacctgctaacaggcaatgggacagaggtgcctctctcaggccccattcacctgtccctgccagtgccctcagagcctcgtgcccttgctgtgggcaccagcattccagcctggaggtttgaccccaagagtggtaagtgttaggggcagggtgccggtgctagaggatggggcttctgttggaggtggcagaacattgagtctgatgaactcccctggcctctttctaggactgtgggtacgaaatggcactggtgtgattcggaaggaaggccgacagctctactggacttttgtctccccgcagctagggtactgggtagctgccatggcctcccctacatctggtgagattggtggggcagtgggggaggggcagtagggggaagggaagggtgggagagttgtgaaaggtgagaagggcgtcctaagcccttgcctggcacagggctggttaccatcacctcaggcattcaggacattggcacctaccacacaatcttcctgctgacgatcctggctgccctggcgctgctggtgctcattctgctgtgtctactgatctactactgcaggtgagttcacctggggccctgtcccaccttctctcaccacatcccaagccctgctcctgtgctctgcactggggtcccaaagatgcttctagaagatccttaaagtgcttccaggaaagaatgccaatgcaaaagctaagactccagagactggtggctttagagaatggggtgacagatggcaggacctgcaggccttgcctctgcagagactccaatcgcggctccaaccagcccagctctcactcccagagcaggcactcctagctgctgtacatgccaaacgttgccaagtttacccccatgaagctgaacgggtgcagctcctagatgaatgatcttctttctacaaacagcttctagacatcatctgggtcccccaccatttctctcgaatgttccaggcatccttcatctccacctcactgctgtctccatcccttatgtcagcagctgtggcggtttacggaaatacctttactttcggcatccctgagcgcctgtctctttcctcctctgcagaagacgctgcttgaagcctagacaacagcaccgcaagctgcagctctccggcccctcggacaacaaacgagatcaggctacgtcgatgtctcaactccatctcatctgcgggggacccctggagcctacgtcgtcgggagaccccgaggcccctcccccaggctccctacactcggccttctccagctcccgagacttagcatcctcgcgggatgacttcttccgtgccaaaccgcgctccgccagccgaccggccgccgagcctcctggtgcccgcaccgttgagggtgccgggctcaagagcgcccgctccgtcgagggtcctggcgggctggagcccagcctggacgaataccggcggggtccagccggggccgcggccttcctgcatgagcctccctcgccgccgccatccttcgaccattatctgggccacaagggggcggccgagagcaagacccccgactttctgctgtcacagtcggtagaccagctggcgcggccgccgtccctcagccaaccgggccagctcattttctgcggttccatcgaccacctcaaggacaacgtgtaccgcaatgtcatgcccaccctggtgatccccgcacactatgtgcgcctgggcggagaggcgggcgccgcgggagtgggcgacgaagccaccccgccggagggctcggccgccggccccgcgcgccccttccctcaacccgacccccagcgccccctgatgcagggccacgcgggtgcgggaggcgacagcggtggcggcgagggctggggcggcgggcgctccgcaccggtcagcggctcggtcaccattccggtgctgttcaacgagtccaccatggcgcagctcaacggcgagctgcaggctctaaccgagaagaagctgctggaactgggagtgaagcctcacccgcgcgcctggttcgtatccctggacggacgttccaattcacaagtgcgccactcctacatcgacctgcaggcgggcagcggcggccgcagcaccgatgccagcctggactcaggcgtcgacgtgcacgaggctcgacctgcgcgccgccggctcccgagggaagagcgggagcgcgcgcagctgcccgcgccgccgccgcccgcgcccccgcgcctggcgctcagcgaagacacagagcccagcagcagcgagagccgcaccggcctctgctcgccggaggacaactcgctaacgcccctgctggacgaggtggtggcacccgaaggccgggcagccacggtacccaggggtcggggccgcagccgtggggacagttcccgcagcagcgccagtgagctgcggcgcgattcgctcaccagcccggaggacgagctgggggcggaggtgggcgacgaggctggcgacaagaagagcccgtggcagcggcgggaggagcggccgctaatggtgttcaacgtcaagtagtgcggcccgggggtcacccaccgcccctgcaggttcccagagtgcgcgccccgggatgctatggcggaggggcatgcgctcttatcccggagaagagctcaggggtcggcagagctcatctgtggtatgtgctgggggagtgtcttgggaagggaccctggattggcctccaaacagagggaggtgggagggacccggtcccccatgggaggggctggggaagagggctggggtgggggagcagtgcctgtataaacgtggctgtacatagaaagatctattgtgggagagcaggaggggcgagccagcctcagctgctagggtgagggctgggaagggaggggcaatctctgtggacccttgggaggggaggggtgctgcttggatgtcacagggctggtggctggggcgatcctggagactagaggataatgtgataacactcttgacaacaaaaaaaatacaaagctggtgaggttaaagctctgtctttctctctctctctctctctctctctctctgtgtgtgtgtgtgtgtgtgtgtgtgtgtgtgtgtgtgtgtgtgtgtgtgtatgtgtatgtgtatgtgtgattttttttttcctatggggaatgctggtatcagagggccctggcgcaacaaatcagatactattcagaaagtgtacaaactttattggagcaacacacgcacacgcgcacacacacacaagcaagctcacagaacacctgtggctcgggaagagcacctggccacaaggtccacagaaaccggaagaaatggcagtttgatacggggcttttggccacagccttctttccataaaagaaggttttagtttgaggctccacctcccatggtgatagggtgactcaggatgagtaggccggggagacgttaggggaggaggcgctagggaggcctgagtagtgggtaccctcggaacagggttcccaggactgtggagttccttaagtctgtagcccttccttacagtagcggtcttgggaccggatccctcaaaaacatgtcccagcgaggaatcttctttcgcaaacacttggttcccctggctgaacagtggaagccaccggggcaacagtgacgtccatctctacagcagacaccctggatagtcaaaggagagtaagtactagacagggcagaatacagcccatggccacacccagccccagagtcagggtcacactgacctttaggtagggacagcaggcccagactcctgcactgtctttacaacaggtctggttatcatggcagaaatgcccttctccacactccacattcccaaccttagggccgagggtcaggagcacgggaggctggataaaatcgacatccttctcacaggtcctcgccttcacattgcaggtgtacccggccgggcaacagtgctgccggtcctcacagcacacagcctgtggagcgaggggatgggatcacactcatatcccaagaacacagctcccttcccccagggcggtggggtggagactcacatggggcagctggcagcaggcccaacttcccttgaggcttgggcagcaggtttgccctactgggcagctggtatgctggtcacaaccgatatctccaatttggagcggggttgtctggcgggcaggtatcttctccaggccagccaccattgtgtctcccttctgacagtacccctgagccagacatgtgaagccctgagggcagcaatgctggttgtctgagcagcagacagcctaggggtgggcagagaagaatgtccctacagaggaccatgggagtctacctctctagctcatagcttctcctgctggggacaggtcacagcactgggtacccaccctggactagacagagtgcagaagaaataaagccacgggactcttgccacccacctgcccaggccaagatgctatctctaccccctcagggctgcctccctttctatgttacctctgggatgggacagcagccccagtccccagaattgagtttgcagcaggtattgtttgtaggacacctagtgaagtcatcacaaggtgtatcactcttcaagatctgtgggtctggcaggcggaggggggctatgaccttcttcatccagggtacttggaggatacccatttcgcaggttcctttctctgtgtgacactgaaaccctgccgggcagcaatgaatgtgatcctcacaacacacggcctaaggtagacagggcaaagccaataagcactggtaccaagctggctgccccttccgcttggactgcagtgcccactgctcccaggtaccttggcaaatggacagcagccccaggccccagtgttgaggcggcagcaggtatatccttcagggcagctcacctccatgtcgcacttcacctccttcactgtgaggtgggcagagaccaaatcatcaaaggcagtgggaccaggtgcggagaacggagcacacagctaacccagtcacagtgagcctcatgcaaggccagtggagagggtctacaactgccaggtccctccatgcggccatcaaaacccacccagctgatagccattccataactgacaagaacccctctttattgagggaatgaaatggggtctagtttggtcctgtacctgggtatccaggcagcttggtcaggagatccgtggtgtagttcttggataggcacttactctggatcaggtcacatacagtgtcctgggggcagcagtgcaggtggtcggaacagcagatggcctaggttgggacaagtataagtctctgaactccagtagtgaggacagggagcgagccaggctgatagcgtacactatttcaaaccgccactagggggcagcatgagccttagagctctcagggatcagcccagtgcttggagcctccttgtaagactatatatgggctcaggggaatccagccattcactcacattgggcattggacagcagccatacttcccagtgggtagctcacagcaggtagaatcatcgggacactgggtcttagcatcagggcacacgacagaaaaaggcaaagacactgaaagagcaatgaggcatgtggaggggttgccaggatggtggggactttttcccatccaagagtcaaatgtggcttcaccccccaggtgctgctggctgggtggctcccagcctcctcacctgccctgttggtcttttgtgcagggaacttctttagtagggtgtgggtgcccgtgggtgaaacgcatcgtgtgtgaaccaggtcacaggaggccccatggggacagcaatgcactctgtcttcacagcaagaggcctgagaagagacagataatcctcaatccatctgcatcagccccaggtcccagttccaccccgctacccgctagtcaccatttccctacacctgtacctggggcatgggacaacatccccacgaaccatcaaccataatgcagcaggtggcagagtcaggacattcaaactggctcccaggacactggacagcacccaaggggttatctgcaaatagaagaacccagaattccattaatctagtcagcaaaggccattcaccaggaccgtcaagaaggaactgctggtccagctacaggaggtttagtggccagtcccagggcttaggtgatctcccaggtagcccctactgcagagagacaactaaggcatccagtggtgttaaaccactccagcatggcctctccgtgtccccagacccctaattcggcatccttatctgtcaccttcttctctcagaactgcccctctgttctggaatcagggccacccaggcggttgggctcctgggcccttcaggtgccacccgatgtccctccccacatgcccccctcccctgtgccccacagcacctgacatctggaagcaggatttcccatctgcactacagtggaagccctgggggcagcagtggtagccatcaccacaagacacaccctatggacacagagaggtctgtgtgagcaagacgcttttgcttgggactattagagtgaaggaaagaggtaaacacagattttaagcacacacacacacacacaccccaactccccaagccaatggcactgtcaccttagagaacgggcagcagctggaagtcccagacacagtgagaagacaagaatagccagcaggacagtggccatgggtctggcaggagccatctagatgatggctcgttattctaggccatgtgtcctggaaagaagagatgacatcaaccaaagggtctgtgccagccttgctctggtcaatccaaggtagccagcccttcaaaaggcccggggtgccaactggggcaggaggcactcaccagaagagggttacagcagctgtagttggctcctccctggtcaaggcagcaggcaacagggcagaactgcccatctggacactgtgttccggctaccagccctgccgcgaaggccagccagctcatcaggacccacatggtctgcctacaaatgccaagcaaagtttggcagccaccttaaactctgtgccaccttctactctgaggccacgcactcccctgtgctctgaccaaggccctggcttcattgagtcttctcaacaagccaacaggaaagcaagcagatgtgtcgcttgtgtcagcgtcctaccagtgtgcagcaagcgcacatgcgtcagctggcacacactgtgggcatgaacacgtgtggattcatggcctcacatacggctgagactctgggtaagtggggggggggggcacggggtatggcagtcaggaaggcatgtggcttttgtggctttatctatgggactgtgggctaactgggaggcagaggagacctcagcagacacaggaggatggccagccccactgccggcactgaactgccacctgtagctttcaaaagccttgggggatggagagggacagtcatcagtcacatgatcatatgggaaaccgagcagtggagaaagttgtaaaaacagaagtgcagtggtcagtggggtctggtctggcttccctatgggccagccaccgcctacccacaactgtccccccaccccacccaagggaaggggacacagagactggatcagccttaaagctaacttcatggtgagcccttcccgacatcaccagggcacctcaaacggaccgcctccgtctctcccccctcagaaaccgaaactcagctgcaagtgggaagacccagcacagtgcctcactgcctcagcaggaggaaccgagcctctcacttccctaataagcctttccccagcccagctggcctacccagcaacccagaatgacccaacaatattcaaagaccctctagggagtctttctccctctccttactgtatttctctgcaacaactatgcaaaacagtaattataatattactttcacttttcaaatccatgcctaaggatcaagtcagggaaaaaagacgggatatgggactgggttcatatgccaactggtctccctgaatattgtcagagaaggaccctgaatcccagaggccagaggtccaaacaggacaggacagagcatttttctggcaggtgacccaagcaggatagaaacagggtgggagccgggcggtggtggtgcacacctttaatcccagcacttgggagacagaggcagacagatttctggttttgaggccagcctggtctacagagtgagttccaggacagccagggctacacagagaaaccctgtctcgaaaaaccaaaaaaaaaaaaaaaaaaaaaaaataataataataataataataataataataaaatatttaaaaagtaggtacagagacttgggttttagtcctggaagtgacactctatgtcagaaattgctccctgtgtctcaattcttctctgcctggacactggtggctatgaaagacaggaaatgccacccacacatggcaggcatgcttttgatcccagcatttgggaggctgaggtaggagggttgcaagtgccaggccaacttgggctataaggtgaatcccaggccagcctgggctacatagaaggatctgccatctttctctttccttctctaggtcttttcaagtgccctttcacctaattcaaagaacatcccagaggccatctcctaaccaggaaggggtagggaagacccagttcctctcaacggggctagggagtggtgagcccctggccacctctacactacacagctagggagaactggagcctttcaaagccctagctccgacatcttccactaggtggcaccccccaactctgagtgtcgaggggaaatgaatttcctaaaaggtgagccaatccagatgagaggcagcgggggaaaagtggcggggagaggcggaaattagctctctcgccccccaagaaaggaaataaagctgacacaacccagggactcagccatcacgccctggtcctgctcgcaacccctttgagctctgggggccaagggccggagatccccacccaatgcacgccgccgcagagaacacttgcagcgtccgaaagagaaagagccggacctggagacagaggtgggaagtacggacaagagaggagctggcccaagagtggggtggttcctgtcctggagaaaggcctgcagctttccgacatgctgggcaagagaagcctcttattgggggggagggggtgcggggaggtgtctctacaacaactgcccccacccctccaaaaaagaaaagaaaaaaacaacctcgttagtgcatcagaaacccctaggggagtttcaagaggcaggtcttctcttgtctctgagctgagactccagaggaccctcaattgcacaggcagcctggtcaggcctctggacctctggacagtagccggggagattgtctgcagagggtcctcctacctgcgtcggggtccgggctccctgggaggcatctggcggtcagctccaggactagggcttggccgcacgatggcccgcccacctcaatttccattagccattgctcggagatccagggcttccattggttacttgtctacgtagaggcgggactctcctggaatgctgtgtttcttttctactcagttcacattcctcctccctttcctctttctccccacaccccatttctagggatcatgtgattagagaatcatatgacaacatagcccgcctcccccagggcagagcttgctggtttgggttctggcggcagagtgttgcagagatgagacacctcatgcctaagggcacccacagttaggagagctgccctgagggcacgcgttcaaggtcgtttactggagggtgtctgcttctggatcgggacttttgtacattcctgtctcttcacgcctggcagacaaggactcgaaaccagttggaagatggttgtgagggtgaagataaatagtccccaggtttgaatggggagagtggcttagactaaatctaataaaggttcaagggcgagtaccgggcactgtagatgtgtgtagggaggaggcaggagattggctcaaactggggggaagaagagatttaaatccatattgatagcactgcattaaattgaagctgaaagaattttaagaggctgataaggtgggacagaggaacttgaaactagattgggaaagacagtgaatcctttccttgggtagtttatatcttgttctttacagacagcctctagcaagggttgaaagccacgttcaagataagggcattagccaagtgtgtggcactgcctgtggagtaggctggtggctgtcgagatggaaggggtttccttgtttcagctgtccccaccttcgaggaattgttatggtgggtgaatagagaccatgggggtcagccatacagttcaggacagtgggagtcttacatagagaggagtgcatgcagggttgtggaattccgtgagggcttcttacactggagtcccagaaagtgtgtaagactggtgcatcattctgcatcctgatggtgttagcataggtgttccatgacattcatacaggtgtccccagaacagaccattgcttatgcttctagtgagacacagccatctgcggaggctgaggaaggggtgctgctgaaccccaggagttggaaaccagactcagcaacattgcagctcaccctctgagtcagggtttcctgtgttccagacgagcttcagcttgatagatagctgacacagaacttctcagttttctgcccccatctcccaagcgccacgattgcaagtgcagattgccgtgtttagtttctgtgctgctgggattagacctagggccttgagcatgctgagctacaagtgctaccaactgagctacatcctagacgcagcactgcctcaaggggaaataaaatggggagcaggtaaaagcttaacaaacctgcttcctttgtttcacaagacagaaatgactcccagaaaccacgacttctgacttctgcacacacaccatagcattagcgcacccccagacttacatacgcaatcgcttgaaataaataataaaaaggtagaacaaacttctggggctacagcttaatggcattgctctaatctaacacgagaggttctggtttccgtctgaaggagggagcgcatatttcacagaacaacatttggacagtcgatctgtccacctggttttgtttatcaagaaagggtttctctgtggagttctggctagcctggaactcactctatagaccaggctggactcaaacacagagagatccacctgcctctgcctcctcagtgctggggttcaaagccacataccaccaccaccaccctaccttgtttatcttgtttgtttgtttgtttgttttggttttggttttggtttttttcgagacagggtttctctgtatagccctggctgtcctggaactcactttgtagaccaggctggcctcgaactcagaaatccgcctgcctctgcctccccagtgctgggactaaaggcatgcgccaccacgcccggcgtttaccttgtttttaaggcaaggtctctgtttttgcctctgcgcgctgtgtgcttcatgatacctggcccttaagcctccaaatgattttcttgactctgcctcccatcttgccatagaagatcagcctcttcatttttatttttatttttttttttactttttattttgagatggagtctccctaagttttccaggctagccttgaactcactatataacccacatagaccttgaacttggactctttagctgggattatagacatgaaccagcaggctctgcctcctcctcctcccccgaccccactttagagacagagtctgtctggtctcaggctcactttgtaccctagactaaccttgaacttcctgaccttgatcctggtgcctctgcttcttaagtgctgggattacagatttgagctcctttatccagtttgccgtcttctcggttactattttagaacttagataggttttgtaagcttcgtaaaaaaatttttaagttagatgtatgtatatatgtatgtatgcatgcatgaatttatatgtatcatatgtgtgcaggagcctttgggggccagagggtactgaatcactggagctggagttacagccccacgtgagtattgcaaaccaaatcctctaccagagcaataagcattcctaagctgtctctccagccctagaacttagttttgaaagtgcttgtgaaaaatggaaaattatattctggggctactaaaaaacatatttataatgaagtgatcataataagatagcataacatttttgctataaagcagaaatattggtgtgttatgtagctagttcccctgaaatgaaacctcttagagggaaaaagaaagtacagaggaaaggtcaacttagaaggcccaggaaaatctggaaacttacaagactcatagggtaacactcatagtaactcatagtgtcatgttaccagggagctctagagatacagctttcctgagcttgggtagcctttttggtgatacagctgtcttcaaatcatctacacgcccgtaagtagtcccattaaacacaggtgttcactaagctagaattgggtgcttttggtctgacatcagtgtcctctatcaggagagagcagatatttgttgaagtctcaaaagtcacacagcatacaaaaaggtcctttataaataacttggttctagaaaacccaagcatggatcccaggaagcccacagtttcgatgaaagtgcccctgtgccacatcaaaacctgatccaggtgctgcctagaagtagccgtgagcggtctggccgcagccctttgtgtctgccggctaaccacagcctccaggcgagcgcttcaccatgctaaggactgttggctgtatgtcagggcactggtccctcctggatgtcactcattaagtgatggccatcttggttgtttcggctattgcaaacagcatcactgatattcattttcgtgtgtccacgtttccattcttcttacaaagctgtgaaaatctgaggtcacataagagtgaccccaattctgtgctgaactttttgagtgactgtgagaatgtttttccaaagtggctgtaccattttgtatccccaccagcaacaaacacatgaggatttcggttctttccatcacactttttgagatagaggctcactgtgtaaacttctgttgaccagcctggcctagaattcacagggatccacctgcctctgcctcacaagtgctaggattaaaggcgcgtggtactgtgctcagctttatatccctgatcacccacagaaccggtagaccgccatctcaaccagactggttgccctggacccccggggggtatacatacctgtctctgctccctccctcattgcaatggctgtgcatagtcctcacaccacgagcacacttgacctgctgagccatgcctccattcctagcctctgtttgtttattttttgtgtagtgctagggtatgtctggcaagtggtctaccttttttttttttttttaagatttatttattattatgtctaagtacagtgtagctgtcttcagatgcatcagaagaggacatcagatctcattacagatggttgtgagcctccatgtggctgctgggatttgaactcaggaccttcagaagagcagccagtgctcttaactgctgagccatctctccagccccccccacacacacacacaccaagtccctgtcttaaagcttagagtactctgggaggcttaagccccaggaaagctaatggtagagagaaggtccaggcccatcttgtatgattcaggccttccgtggattaggagggccccactcccatgataaaggtcaatttattctcctgagaaaccactgacctaaacttaatattgttcaacacacacatggagggatgcgcccagttaccctctaatttgtttttctgagttttccttttactcacaaagtgtttggatgtcctgggtattacatattttgcagccattgtctcccagcctgtcacttgtgttttgtgacattgcgtcatctaaaatctactgatcaatctttcctttgtggcttctgcttttttttttttttttaatctttccccttgcctgatcaggatttataaatagggcctgggtgtggccccgtgtcatgtgcacacttgtatgtcaagtcctgactctgtcattattattaacgcatcctgtccatttccagcctgatgcccagatgccaaacctatgctggcgctggcgtgaggctgcacaaatgccaggatatcctgctttggctgacggaagggtaggtgtccccaggaaagttatacaccccccctctttctgtaggccagcccagtgcagccttcagagcacatggccaagtaagggctcgccctccggtgaccttctccttctcccagcctccccctcatttttttttcaactgtccctcagggcttcttttagtcagggttaacgctctgtcccaatagaagggctgtgactataccagagtggaagttccccaacccccaggatcttggcatgccagataaaactatagaatgcctgtttaaattgaatttcgcattcatttgattgtttctgagacagggtctcactatgtacatagccttggctggcctggaacttactatggacactaagctggtctccacagtgaaccctgcctctgccttctgagggctgggatggaaggcatgtgatgccacaccaaactctaaaggttaagttttccttagcataagtatgtctcatgcactgaaataaagataaagacaatagtaacaaaaacacgacccatgcggcacttgggacgcactcagaaagcggtcaccgtggatctgaagctgagatcttcctggtggatttgtggttttacctgctgtatctgcttaaccacgcaaagccaaggctggagagagagcacagaagcaacccagcctcccatcccccactttgcctctcttgcctgagtcacactggtcacgagcagttcttactctcctttcccaggcctctgtcttcctggtgagacaggccttccagccctggccccaggacacacaaggtaggatgaatcacagcacaaaagactagcttgacaggggaccctggacctcctgtgtaaactgagtcacacactcaccgttcttccatggacgggatgggggttggggggctaggatggaggagggtggacccagaaagttagcttggaaggaagactggggtccaacagtcccctcacttcacagagagggaaactgaggcccagaaacactaaggctgaggcctggtgagctaaggagatagactgaggcaggggcgccttcacaaggaagtgaccagagccatgggggttttgttgtttgtttgtttgtttgtttgtttgtttgttttgagtgaatctcactatgcagccctctctgacttggagctcactatgcagaccaagcaggcctcaaagtcacagagatccacttgactctgcctcctcccgagtgccaggaccaaacatacttgcaagcacactgggctctaagagggttcttgaaattccattttccccactgtagtgaggatgaaagctttgtcctcatccatgtacacaatacaagcaccccatccctaacttcacccctgcccgtgaagttcctaatacttttcaaacaaagggaccctgcattttcatttgctctggaccctgaaaacgatagagcctgccatgaatcccaagcctgggttcctctcagcctccagcttctctgatttaaaatgcagtgccagccaagtgtgctagggagagtctatgattccagcattcagaaggctgaggcagatgccagggtggggaggtggagtgggtgggtgagtgtgggggaacaccttcattgaagcagggggaagggggacgggatagggggcttccagagggttgaggggaaccaggaaaggggatagcatttgaaatgtaaataaagaaaatagctaattaacgaagaagaagaagaagaagaagaagaagaagaagaagaagaagaagaagaagaagaagaagaagaagaagaaggagaagaagaagaagaaggagaagaagaagaagaagaagaagaagaagaagaagaagaagaagaagaagaagaagaagaagaagaagaagaagaagaagaagaagaagaaagaagaagaagaagtcacacacgtgatgcatagacatacatgcagaaaaaaagacccacagccatacaaagaaaagaaggtgggactgaggtttgagcaggtctccagggcctcccttgttagtctagttagactcaaaacaacaaaaacaaaccccgggctggtgagagagtttaatggtgtagtggctattcctggttgtcaacttgactatttggaatgaactataatccagaattggaaggctcaccagtgaccctaatctggaggctgggagatagaagtttctgatctggatcttggtatggagatcttgaggcatagtggctatggattccagaagattaagacagggagatctccttgagttcaaggtcatctgagattaaaggtgtggtggcacacacctttaatctgggctacaccttcttttggagaccatataaggacattggaagaagggagtctctctctgcctgtctctgtctctgtctccgtgtctctgtctctctctctctctgtctctgtctctgtctctctctgtctctctctctctctctctctctctcttgtctcttgtctctcttaccctgcgggaatgagcaagtgctagatccttggacttccactcacagctgctgctgaccattgttgggaattggactacagactgtaagtcatcaataaattcctttactatatagaaactagctataagttctgtgactctagagaaccctgactaatacaaatggctaatggagtttagcatcatgcccaatgacctgagttcaatccctgggagccaatatgtgggaggatagaactgagtctagtatgttgtcttatgactaccacatacatgaacctcattctactttcatgcttccaagcattagcatccacatccacgcaagcttatacatacacacacacagacacacacacagacacagacacacacagagacatcactgaaaagaaaaaaattttgttttggctcagtttccaacattttgggattaaaagttgggctagctccattgttttaggacctggaggaggctgaaccccttggcattcaggacagacaaaaagcaagggaacagagtatgttggggataagttacatccttccaagctggacgtggtggtgcatgcctttaattccagcacttgggaggcagaggcaggcagatttctgagttcgaggccagcctggtctacaaagtgagttccaggacagccagggatacacagagaaaccctgtctcaaaaaaacaaaaacaaaacaaaacaaaagatacatccttccaaaaggccctacctgctaatagcccattaggctatgatcccatttctctgtctatcctggaactctctgtacaccaggttggccttcaactcagagatcgccagccttcgcatcagtgatgtggattaactcttcaggaccatagcactctccatggcactaccaactgcagaccaaaccttccacactgcagcctcttgtcagatccaagcctagcttgaccaagatctctggccttgagtcctgcttcagatagagtatccttctttaggaagaaagggatattggaactggagtggtaccctgggctggagagaggtgaggagtagcttagcagccaggctaggagctgccacaaaagacctttggaaaagtaaccacttaacagggtcaggagatcaatattcctgtcccagcataagctgttgtctctcttggactgtatgagtggcagccatgttgactttttgcctatcactgcgcccaccatggctaagtgatggatttcttgctggtgtgtatgaaccccaggttggaactctagtgggacccaacgctgcactcttgttcttccattgcagcaggtcagggtcaaaggacacagccctttctcgaaagcctggaggtgtgttgaggtaagacagccagatgtctctcttgcccaatgagccgtggcccctgccctgcctcccaccggctctcttacccgtctgatcctgattgtttatagggcactgccccggcgtccaggaagcctgggaggtaatagacatgcaaacaaacccagggagtaatttctcaataagctgtcagctctttctccatcacacatttagctgcaagaatttttataatcaaattgcacttatttaggacagagagattcattctctaattaaatgctctgattaaaagcttagtgatataaaatctgattccactaaagttaggaggggaaaaaaagaaaaacccaaactccaaccaagcaaatcacagggctcagctcctcttgatgctgtccctcatatcatgtctaaggacactgggagtcttctccagaaagtggtcactacaagatcagtgacctaggtggtgatggaggtccctccctgtgtcatgagtcctgcgggcatgtggggcactttccccattgtggactttcatctgactgtgaaggtcattgtggggagctaggcagccccatgtctctgaattactgtgaactctatgcttagagcccctctgtcgccacgtggagaggccacttgtgtgacactgttcctagggagccaatattcattcacccaagacagtgaagcaacaatacaacagagttacaataccatcaaagtccaaactggtgagccaatgggtttctcagggactcttacaggaggatggctacaggctgcttacaagggcatggatgacaattgtgctgaaagcctgctctagcacaagaggacaactcatgaaaattcgaacactggagctctgatcacaacttacaggcaactttacagataggagagtctcctcttctcagaaacccttactgcttaatacaagattggcaggggaggggctttatgaatctggtaagtttcaaggacttcctgagacttgtgggttgtttccttcctgagtcttaaggagccttcctacaggatagactgttttcacttggaggaaaataccatacaaccctctaccccttcccctagttcttacattctttctgctccatttgccatgatgttcactgaacctccaaaagaatcatataggtgttcacccaaggctaagctttgggccactatgttacagtggcagccaattgttttcaggagcttcactagtggttaggagtctctgaggtacactttatatacataaaaaaagttgttttacagaggccagtgagatggctcaggaatacatgtccttactattaagaataatgacctgaatttcatccccaggacccacacagtggaagagaaataactcttaccagtctttctcttacctccaaaacacacacacagccaggcatggtggcacatgcctttaatcccagcacttgtgaggcagaggcaggcagatttctgagttcgaggccagcctggtctacaaagtgagttccaggacagccaggggccagggctatacagagaaaccctgtctcaaaaaacaaaaacaaaaaacaaacaaacaaacaaacaaaaaaaaaaaccaaacacacacacaattcatgtaatttaaaaaattagcaaaagaaaattcccttaattgaggctggcagcaacagcaatccacagagcataggcactcacattgcatctgtttaacaaaacaacagcagttcctttcccactggagtctctgacctccccagacacagggtttttttttttgtttgttttgttttgttttgttttttgtcctgacaaacactactaaacaggatttccctcccgtggcacaggtgtaaactgaatcaggaatgttgttggttgcactgaaaacacttagtgccgctattgcatctgtagccacaccttcctgatcatgtcccatgcagggaccatggccaaactctcgccaacagttcatagagctgtagaccacctctgccattgggttttgttttgttttgttttaaagatttattatgtattcagcattctgcctgcatgtatatctgcaggctagaagagggctcgagatcacattataggtggttataagccaccatgttgctgggaattgaactcaggacctctggaagagcagccagtgctcttaacctctgagccctctctccagctaggcattggggtttttatttattatggttttggtggtggtcatggtgtctttccccatgaaggatacactttttaaaatatttgctgctccttttacaatatgtatctaaatctttaagaccctcaaaacttaggattatgtaacaaaatcccgttatagaggatggatagggtccttgagtggccagcatcatttgtcccaggtatgtgctagttggacttgagtggctaaggggataggagaccaccagagaaatagaaagaagtttcaaccctgtgtggaaagattttcatcacctgaattagtgttttcatcaaaagagtaacattgaatacagtgtcatggatgggagacacttcctccagaatctatggatatttcctttgagccatcctgcctctgcatcctgggtactgctgttgctgcagggttactctgatgacatcagcagagccagcttgcccaactagtctggcatgggctcaagggctgcacagtaacctgtcatgcctgctgcaggagccagctcccttgtcagacaggctcctgcccaacactgtagccttgcctttcccttgcatagcagactgctgaaagggcctgcctgggcttaaaaatctctacccccaccctcagtactgtgtaccacatactccagggaaagtgttttccaccccttaggacaggcgaatgtcgtttatgaatggctgattaggttttaaagtcttccagaagctttctactatagcctttggctttctgttgattcattcattcattctttatttatttatttatttattttggttttttgagacaaggtttctctgtatagccctggctgtcctggaactcactctgtagaccaggctggcctcgaactcagaaatctgcctgcctctgcctcccaagtgctgggattaaagggattcattttgttttgagacaaactcttaccatgtagccctggctgtcctgaggctctctacatagaccaggttgaccttgaacacacagagatctgcctgcctctgcctcccgagtgctgggtttgaaggtctgcgcccagtttgtcaactttttaaagtagccagttctgcagggatcttgtcacatctgcctgtgagtagctgattctgacccctttctctgtcttcttgtccttttatcccctttcgtatttcacaaatctgctttccatgtcggcctgcattgcagaggcttgccagagttcttact

SEQ ID NO: 37 - DNA, 26636 bp, Homo sapiens
gaggcacgatttgcctatttcccagcgtccagtgtgggagatactacggctgtgtccgtacagaccacagaccagagcttgcaggctggaggtgaggagtagaagtcagattggcaggtgggggaggcaacgggcccagcagggagggaagcccccccagccagttctgacttcaccctgccttgccactaaccccccactctccctgcaggccagttctacgtcatgatgacgccccaggatgtgcttcagacaggaacacagaggacgatcgccccccggacacacccttactctccgtatgtgcaggggacacctggagggcctggtgttgaaatggaaggaagaggggtttctggagtagaagctgggcagttagcatgaagtgggcacatggtgtaatgttttttttctttgcctgtttctgctgctctagtgcacataaagtatcatgtcttttgtttttgcagatggatttaccttgcaaagataattttcaaatctaatacttagcagatgcttgggcaaacagctctgcgataatacatgccccctttttttttcctcctcttgtagaaaaattgatggaaccagaacaccccgagatgagaggagaagagcccagcacaacgaaggtgaggacaaggtgtggctccgggtccccctgaccaccaccctcacaggctcagccagccctggagtgtggagtgacagagagagaagccactcctgggcaggccacaagtgctccagagggctttgctggacgctgtaaaggtagaaagtgagcaacgaggggagagtacagtgtcagaagtagagggacagggagtgtgaattggaactggccatttgttgacccggctggtgatcttgaattcatggcccacatctaagatggtggacttcacactcccatacggattgcctgccccacttgaaaaatggggctgaccgggctcacgtgggctgacctttccacgtggcagctgtcatgctcacatcccgcactcccatgcctgcctggcctccagaagtaggtctgttcccccagggagcacatctgagggagaaactgcatgaagttctgcctctggctacctaaggccggagcatcctgccctttccagaaacaccaggtctcacctcaggtcatttggccttcagcactgtcccgccccgcctgtcagtagccactgcagtgggcacagcactgtgcaagtgccaggagagtgcttacacccaaacaaccatcattcaacaaatatttactgcccgtgggttctgggctgagcggcacaggccctgtgccaggtctggagtctggcctggagcgtcagggaggctcaaaggcctgagggcttatgtctcatgggtctcatgggacattgatggggggtgggctggggtgacgcttccctagggagaggggagtgtgggtcaggttactttgtggggtgctggtttggttgtgggagaagttccatttagaatgcctcaggagggaagatcgggaaggcctcgaatgcccgagtgaggggctgaatgctgagtcctaaaggtggtgatgggactggggtctgtggcccaggtagttgtgttctgagcagctcctccctgagttcaggcgttcattcagcgcgtgcatactacgaccagccccccttttgcgtcctcagatatggcaatgcagcagatgataggacagacaaggtctcagctctctgtgcgcgttctggtgggagagatgggagtcacacagccgcatcaggcagtgcaggcagtcacaggcaggagaggaaagctggggaagaaggtggcgggtgatggcggcatggtagtgtgctctgaagggctcttcgagaggtgacattgaagcagatccctgaagcgacctgagggaaggggcctgttgagaacctcaggagagtcccgggcagagggaagagctagaacacaggccaggccctgagccagggccgccatggtgtgtctgcagaagagcagaattcaggaaaggaaagaggaagttggcgcagtggagggggctgcccaggccagatggtggaggaccttggaagaagtccccagtgtggctgtctgggctcctgtggttttattccagggtgatgagaagccagcagaggggtttgggttgtggaggctgttggcaagagtggtgggaaggggctgggaggtaggagaccatacgactgtcaggcctgagacagggcaggggttgggggaaatgtggggaggactccaaggctggagaataagggtttcgtgctgaactcccctccatgcttggaagggaaggggtgcatctgagcttggttttgagatgcagtgagtttgaggggcccccagagcagccccagccccacgacttacctgtggtggggcgtcagggtggttcttaatctccgtacctgtcttccctctgtgaaatggtggaagcacagccgccccgggcacctggtggggatgcagtgagtcttggtggccacacagtaaggcgaagagaggactcagaaccctcccaccccactctcacccccgcctctcccttagttaatctgactccaggcagccttgaaactttctcaccctgtgaagcagtcttcatcacctgcccacttctccagctccgtcctgtctccgctttcctgacttgcagagcatctgccccaatctgctcatcctcccagtaccctcagccatctggctcatggctctaccaaaacagctccacttccggtcacccgtggtgaccccattgccacatccactggcctcctttgctgtctgggctccaagcatctgatgctgcctgtttccctctgttcctttctggaatcttcctttctcctccatcctctctgattctcctgtgatctttgcctttcctaccccactgttaacagtgaaatttccagggctgtcccagttccaagtgagtagatgggggtgccggggaatctgtgttttccatcagctcttcaggtgatttgtcatagtggacaagcttgagaaactgctttggctgcgagtgtttctttttttttgagaagggggtctcactctgtcacccaggctggagtacagtggcacaatcacagctcactgcagccttgacctcccaggctcaagcgatcctcacacctcaggcttctgagtggctgggaccacaggcaggcgtcatcacatggggtaatttttttttatctgtagagtggaggtcttgctatgctgcccaggctcgtcttgaacttctggcctcaggcagtcctccggcctcggctacaggcctgagctgccacacccagtcttgctggtgtttcataaggtccggcccctcccgtcggcctcaggtgtatgacttgtgaggcccagcgatgggctcggaagctcttggtcagtatcccccaaactctgttcccccttgtaggtgttcctcttttttctttgctgcagaagagtgtgtgactcacaaaaagttgaggactgttccttgatgtcctcccaggcttcgcccaccacctggctcctggtaatgcaaggaactgtgtttccatccattcccttcctttcactgcaactccagccccacgttttgaactacctattcgagatttctgtctctggacatccctgtaatgcctcaaactcaactcgcccaaaagagaatgtgccatctcccgtctccaaaggctttcatgcaaccttcttctttgcagagcagcaaaagctacccctgtcacagctgcccaagccagaaactaagaccagagccgctttcaactctgccctcttcttcccttatggccacaaaccccaagtttctcttctgtggtgatttcagatccgcttctctcacttctttttccctccttcccaccacttcttggtactgcaggagcttatcccagagtcacagactcaaatgcctgcaggggcctgagggagggaggtgcacttggcatctcaggaaggggtgtgtggctgggtgtggtggctcccgcccggaatcccagcacttttgggattacattttggccaagacggacggatcacttgagcccaggagtttgagaccatcctaggcaatgtgacaaaaccctgtctctaccaaaaaaattaaaaattagccaggcctggtggtacatgcctgtaacagtcccagctacttgggaacctgtggtgggaagatggcttgagtccgggagacagaggttgcagtgagctgagattaccctccagcctgagcaacagacccagaccttgtgtcagaaaaagataggaaaggttgtggggggcccccagtgatctggggcatgtgtgcgctgcctgaagggtggcccttgcccagtgccttccccttgctgccctgtcagaatctagggccactgttgccagaaactctgagaagctagaaatcgagacttatgtgaaatctgatttttaggtgccagattagattgctttttccgtttcattgatttctactcttaatgttactaattcatgcttctactcacttggttttttgtttgtttgttgttttgttttgagatggaatctcgctctgtcacagtggcgcaatctcagcttactacaacctctgcctccccggttcaagtgattctcctgcctcagtctcccaagtagctgggactacaggtgcccgctgccacacctagctagtttttgtatttttggtagagacggggtttcaccatgttggccaggctggtctcgaactcctggcctcaggttatccacctgcctcagcctcccaaagtgctgggattacaggagtgagccactgcacccggccccttctactcactttggattcaatttgctaggtttcatgctttagcttccctggcacaccccaaccccagctttttaaggtaattctttttttttttttttttccaattttctactaaaatctttattttacaggattaatgtttcacagcagggattgagatgattcttaacctttctctttgcttaacaacatttagagttgccagttcactccagcatcactttagctacatcccactgggatatgttgtttttgttatcattcagtttaaagtgttttccaattttccttgtgatttcttctttgacctttctgttatttggaggcaggttgcttaatttccaaatatttgtgggtttttcagatatctttttgttattgatttttaatttagttctgttatggtcagagaacatactctgtatgatttcagttccttgaaattcgatgagacttacccgacgggcccgaatgtgtcctagcttggcggaagcttctggggcattgacgaggacaggtgtctgctgctgtcaggcagaatgtccccccaggtcagtgaggtcaggctggttgagtgttcaggctttctattctgatttttgttgttgttgtttacttgttccaccaatcaatgagaaagatgtccatgtctctcactatatttgtggatttgtccatttcttccttcagtcctggcaggtttcgcttctgaattttctcttttttttttttttttttttgagacagagtctcgctctgtcacccaagctggtgtgcaatgatgtggtctcggctcactacaacctccacctcttgggttcaagcaattctcgtgcttcagcctcccaagtcgctgggattataggcatgcactgctatgcctggctaatttttgcatttttagtagagccggggtttcgccatgttggccaggctggtctcaaactcctggcctcatgtgatccaccctcccaaagtgctgggattacaggcgtgagccaccccacccagcttctgaattttaagtttcctatggagtaactgaagtgcttctgtggaatgaacgtggccttggtcctaatgggtcttcctgtatttcaaatgtgccatgatggtcttccgaagccacaggctggacagcattaccgcctgctaatgtcagggcctggattcaagggcctgggactctggaggaggaggagatgcggtcctgacctgcgagcagagcacacaaggccttgacaaccgatctttacaaccttttcccacccctgcataccctgaaatggttttcaggccaccatttctgggatcttcccagctgcctgccttagagtctttctctcagaaaccagcccgaatgtttcctggatctctgaggattcatcccacccccattcccatgcagaggccatggctcggcgcctggcgttcccgaggcactttgtaccatcttcagtgatgacacgaatgcaatggggttagtgccacttgcccacagtggtgctgcgagtgcccatggggcgcaccggggctgcttccaccctggaccccagcctggcggagggcctggcacatagtagggcggggagtaggtgtgtaagaagtaagcttgctctggagaggatgtacctgcagccggcgcccagctctcgagaggactgtgggagggcagaggctgaaacgaggccgcctgccgagttcctccacagacccctgggcgaggagcgctctgctggggactgcgccagcggtgcctccaggcctggactctcagctccgctgctgcttttggccagagttcccaaaggcgggtgtggttgtctttggtgggaaggttcagcgcaccgcgatagtaataggggagcaagcactcgctgagcccagtgcagggcctggaccgtgctccatagcaagcactgatcttgggctattggttttggaggaaagagggagcacaaggatggaaggggccagggaagagaggtcacggtgggagaaggagagtccgcatccatcggagggtttgtcactcaggcctgagtgggaggcactggaggcagggagaggccagtcagcagcatgcggccacagcccagagaagccagaggggtttgctggtgggtgggccccagccttttcaagggaacggcaggtctggggagctgccgatctcggggtgtgagggtaacgggcaggctgtggcccacccctccttctcaggctcactggacccctgaccggtttcatcaccattatccaaggctttgaaaagaccccctggccttcctgccacatgtgccctagctatagggcttcgttcccctccacaaatggtgcagacagcatgagccaccctggcagggggctgggggtccgtggggtaggagttgggggtagctgagcgttctttcctgtccccacggtgcctggtgctggggcttggcagccagggttgggacagcctggctttagcaggtcctgagtcaggggtctcaggctccgcagcacacagtccccaggcaggtgtcaggatgggatgtggccagagaaaggcatgtgctctgtctggggatagctgccacccagctgacacagttggcatgagattgtggagttttatggagtaaaatcacaaatctgggttttttaagtaaaaccttctatgagttgccatctctggccttcaacataggatttgggtctttcctgggtgagctggtgctttgtgggccaggccctgggagctgcaagtaccagttgggatctgccattgccctgtggaaggattttaagcaggggtgaaacatggtcagacttggatttagagatgaggaaaaaaaacaaaatcacggtgccagagtctctggggagactggagaatgcagtgcaggggccgcaggagccaaaaaggggcactggtcctgcgaagagtggctctgtccatccctgccttccagtatgtgcccactgtgaccagagctccatttctcaaaagaagccagtgatgccaattaccatgagaaatttccttatttttaactgtcgattaaaatttgtacaagtatggtggggcaggcctgcaaaatgatctccaagtgcctggcctttgatgcccgtcctaaaagcatgtgtggcactggagggcccacgtttctttgttcctcttgagaagctggggtgggggccggctgggctcagggtgcggcccctcacttcccagggctgtggtctcggtggggcctgcactgttcctgggtgtccttgggctgagcctctgccctgtgaggacggccgctcaggcatgatccgtcagcgaagccgtggctgtgactctgttttccgcagtggagcggaggcggagggacaagatcaacaactggatcgtccagctttcgaaaatcattccagactgtaacgcagacaacagcaagacgggagcggtgagcaccccggaccctcagtgtctgcggtggtcccggcccccgacccttgcatgcagaaagtccaacagccatggggctcgggagtcatccctggggtggaggccggtgggcggtgcctgccctaaggctcctggtcccctcgccccccagagtaaaggagggatcctgtccaaggcctgcgattacatccgggagttgcgccagaccaaccagcgcatgcaggagaccttcaaagaggccgagcggctgcagatggacaacgagctcctgaggcagcaggtgggtgcggggcctggagcgggtcagggcccaggagccccagatgcaaggcgctggccctcagctcccttgacctccgtcgtgtccgccagatcgaggagctgaagaatgagaacgccctgcttcgagcccagctgcagcagcacaacctggagatggtgggcgagggcacccggcagtgacgcccgccaccaccacgcagccgccgccgcccacgccggcctctgctgcccccttccccagcccttagcacagagagggacacatgcccctcccccagctgcgtttttttatagtagatttttaacaaaaaacggggagaaataatgcatttctgtggatacagtgcccaccgccctcctccacttggaaacggtatcctccctgcccatccgtctgtctgtcgcccttctcccggccctcactaagccccggcacttctagtggtctcacctggaggcaagagggaggggacagaggccctgccacgtcccgctgcctcctgctctctggaggtactgagacagggtgctgatgggaaggaggggagcctttggggggccacccggggcctggacctatgcagggaggccacgtcccaccccacctcttgtttctgggtccctgctcccctttgggggtgtgtgtgtgtgttttaattttctttatggaaaaattgacaaaaaaaaaatagagagagaggtatttaactgcaataaactggccccatgtggcccccgccttgtctgcttgtgtgtttgtccatctcaggagtggggagggggcctggggtctgcagagctccacgaggcatggttctgctgttgtgcacatggctgtgcatggtccctgccagctgcaccacccattacccagtggttggttggatggatggaggaattaaggaatgaatgtcccctttgaggccctagacgtgcatgagggtgtggggagctggggtcaaggacatgtcccatgttggaggagaggcaggggtctccgtgtcaacagttcctgaaaacacaaccagcccctggccctgccctgctgggccaaagccctcccctctgcaccagccaatagtggggcctggccttgagcccctcacccccagggagggcagatggccagggcgccaagcttggcccgtcagcctgtcgccttgcaccaaggctctggcgcctgtgctgtgacccctgcccctgctgatgatgaaacctgtcctcagctgagatgcagcgatgcctggtagggctgggggctgctcctgtgtctccccaggtgagcacacccctattcactgggccctgcttcagcctgcagcacccttcaactcccaggagctgggcttgccactctgctcaccttgtggagctccatctgcctttcctccccaattcccccactccctgcactcgtctcttcccacaagagccctgtctccttttcctagctattcccatctgaggccatctttattcatttagtttttagagacagggtttcactctcacccaggctggggtgcagtggcacacaatcacggctcactgcagccttgaccaactacaggtgcgtagcaccacagccaagtttttgtatagatggggtctcgctttgttacccaggctgtgacaagaggagcctcccacgtggtgtggatgaggaggcagatggcagggcctgtgcatttctgtgcttgagtgggccttgaaagtggttcagcaaccaggaagaagtgttcattcctcgacaacaacatccccgggctctggtgacttggctgacactggatggccctggaatgaaaaaggcaaagaggcaaaatgtgcaagggcccatctggaaccaaggtttgttgatcccctgggccgtgtgcaccctgagctgggcctggtagtggaaaggaatgaaggcactgcagtcaggcagcctgggttcatcccccagctagtggtgtcctaaggaaccggctccccaaaaacatccctggcttgtagtgcttgccaatttctgggtgtcaagactcccactgctgctgatttcaggataccagcatgatgccactgaatgcagagtttcgagatgtgcatggtctgctatgttgagccaggtctagcataccgctgtgccctgctgtgttttaggggagatggggaaacctggtgggtaagagcaaaagccctggagtcaggctgtccaggctagaatctcagctctgcctctggctgagcaagcttgggccatgccctgatctctgccttcagtgccttttctgtaaagtgaaggaaatgagtgtccgacggggaggaggttcctaaaagggagcagggtctggggagcccaggcctctggggttgggtgactgagaaggcagcccctgaatacagagcagagctgaaggtggggcagtaagtgctgctgggagaacaggcagcacaggctgagttggtgcagaagtgagtcaacatatgtgccatcgtataaaatgtactcatcggactgtagatgttagctattactattactgctattttatgttttatagacagggtctcactctgtcacccaggctggagtgcagtcacacaatcatagctcactgcaacctcagcctcctgggcttaagcgatctgcctcagcctcccaagtagctgggactacagatgtgtgccaccacgcctggctaaatttgtttaaaattttttttgtagagatggggtctccctatgttgcccaggctagtcttgaacttctgggctcaagcgaccctcctgccttggcctcccaaattgctgggattacaggcataagccactgtgctgggccatattactgctgtcatttatggccaaaagtttgctcaaacattttccagttaccagagccacatctcaagggtctgacactgggaaaacaccacgtgcggatcgggcacacgctgatgcttgccctgctcagggctatctagtgttccctgccagaacctatgcacgtgtggtgagagcttaaagcaatggatgcttcccccaacatgccagacactcctgaggagcctggcggctgctggccatgccccgtgtgcatgtaggcgatggggaagtgagtggaggagagcggaaccttgattctgctcatcaaactgcttaaccgctgaagcaaaagggggaacttttttcccgatcagcagaatgacatcgtgatggggaaagggctccccagatggctggtgagcagtgtgtgtctgtgaccccgtctgccccaccccctgaacacacctctgccggctgagggtgacacaaccctgttccctgtcgctctgttcccgcttatctctcccgccttttcggcgccaccaccttcttggaaatgagacagagcaaaggggagggggctcagaccaccgcctcccctggcaggccccataaaagcgactgtcactcggtcccagacaccagagcaagctcaagacccagcagtgggacagccagacagacggcacgatggcactgagctcccagatctgggccgcttgcctcctgctcctcctcctcctcgccagcctgaccagtggctctgttttcccacaacaggtgagagcccagtggcctgggtccttagcagggcagcagggatgggagagccaggcctcagcctagggcactggagacacccgagcactgagcagagctcaggacgtctcaggagtactggcagctgaacaggaaccaggacaggcacggtggctcatgcctgtaatcccagcactttgggaggttgaggcaggcagcccacttgaggtcagtttgagaccagcctggccaacatggtaaaaccccgtctctactaaaaatacaaaagttagccaggcttggtggcaggtgcctgtaatcccagctactcgggagactgaggcaggagaattgcttgaacccgcaaggtggaggttgcacagtgagctgagattgcaccactgcactccagcctggcaacagagcaagactccatctccaaaaaagaacagaaatcaatgaagcaccgagtgacagggactggaaggtcctaattccatgggtatttacggaacccctacgccgtgtggagtcttattctagacagtggggacgaggccatgaacaaggtagatgagagaggagatttctccatcctggtcagggaatttgttaaagactgatgaaaacatgaataaataattgtgtctagtacattctattcgtgaatctcataacagacagtggtagagtgaccgtgacccattcgccacacagtagagtcacttttttggtttgttttttagagacagggtcttcctctgttgctgaggctggagtgcagtggtgcagtcatagttcactgcagcctcaacctcctgtgctcaagcaatcctcccacctcagcgtcccaagtagctgggacagcaggcacatgccacgggttgggggaccacaggcatggtcaaggggctggcagtcaagcaagtgtttcatgagaaagtgacagttgaccttcgtcttggagggtgagagatggaggcagcaaagacctaaggagaggacaagccagcatagcccagggtcaggctgaacaagaggagatggtgggacttggggataaggctgaggggtgggcagtccctaagtcttgtgggcaaccatgcagacactgatttttccttggaataaagaggaagcccccataagcttttttttttttttctgagatagggtctcgctctgtcgttcaggctggtgtgcagtggcatcatctgggctcactgcaacctccgcctcccgggttcaagcaattctcctgcctcagcttcccgagcagctgggattacaggcggctgccaccacgcccggctaatttttgtttttttagtagagacagggtttcaccatgttggccagactggtcttgaactcctgacctcaggtgattctcccacctcggcttcccaaagtgctgggattacaggcgtgagccactgcgcccagcctcctgtaggtttttaaaatggagaaaaccacaatctcactggccatgttttaaaaaacttaatctgccagtcaggcaccatggctcacacctgtaatcccagagttttgggaggccaaggtaggaagatcagttgagcccaggagttcaagaccagcttgggcaacacaaccagaccccacctctacaaaaaattaaaaaattagccgggtgtggtggcgtgcacctgctgtcccagctactcgggaagctgaggcgggagcatcgcttgagcacaggaggtcaaggctgcagggagctatgactgtgccactgcactctggcctgggcaacagaggaagactctgtctaaaaaacaaacaaaaaaagtgactctgctgtgtggcaaatggattgaggggcaagaatgcagggaggtgtgttaggaggctggcactggcatccaggcaggggaaggtgatatcccaaagaagagtagcagctgtggaaagaggaggaggcggatctgggaggtttttttttttaggaaaagccgcccatgggaaggtgagcagaagcaagaaagcaaggcccctcctaagagtccatttgagctctgggtttaaaccacttggagaggagcaggttgccgggagccagtctcagaggtccactgggccccctgccatcctctgcacccccttctgctttcacagacgggacaacttgcagagctgcaaccccaggacagagctggagccagggccagctggatggtgagcgcaacagtgatgcctttcctagccccctgctccctccccatgctaaggccggttccctgctcacattcccttccttcccacagcccatgttccagaggcgaaggaggcgagacacccacttccccatctgcattttctgctgcggctgctgtcatcgatcaaagtgtgggatgtgctgcaagacgtagaacctacctgccctgcccccgtcccctcccttccttatttattcctgctgccccagaacataggtcttggaataaaatggctggttcttttgttttccaaaccagagtgtctgttgtcctttctctctgccgagtgtctgtgctaagagcttgtcctgaccctgccttgcaagcaccagtgcttggtgggtcatgtggggctggtgtgtcctggaggttgccaggaaagttggtgaagaaaatttgtttctgttctcccccttcatgttgcaataataggggatgaaagttaatgtttcctctccttgagatcttcctaaaacagctgtagaaatcagtgcctgtaaggcaagcttgtccaacctggaggccacatgcagccctggatggctttgaatgcacccaacacaaatttgtagtttcttaaggcattatgagatttttccgcaatttttttttttctcatcagctgtcattagtgttagtgtgttttatgtgtggcccaagacaattcttccagtgtggcccagggaagccaaaacattggacactgctataaaggttctcaaagtaagatccagggactccttttgtagggctcctgaaggtggaaactactaagactttttttttcctttttttttccttttttttctttcttttttttttttttttgaggcagagtctctctgtgtcacccaggctggagggcagtggcatgatcttggctcactgcaacctccacctcccaggttcaagcgattcccctgcctcagcctcctgaatagctgggactacaggcacgtgccaccacacctggctaatttttgtatttttagtagaggtggggttttgccatgttgtccaggctggtctcgaactcctgacctcaagtgatccacccgtctcagtctcccaaagtgctgagattacaggtgtgagccaccacgcccggcctacaaagatgtttatttgcctttttcaccctggttctctcatgagtatacaatggagtttccaggaggctctgcgacacctgttggcatcatcaccagatggctaatggattgtgtgctggtgtatctcacgcttttaaatgtcccagtttctagcccggtgcagttgcaccagccctgctactcgggaggctgaggcaggaggataatttaagactgggagttccagaagaagacctggtgtcaaaaaaaaaaaaaatggggcaacgaaaatgagagcaatacagctttcaagaatgggaggggccaggggtggtgattcatgcctacagcactttgggtggctgaggcaggcagatcacttgaggtcaggagttcaagaccagcctggccaacatggtgaaacaccgtctctacaaaaattagccaggcatggtggcatgtgcctgtaatcccagctagtcaggaggctgagtcaggagaatcacttgaaccctggaggtggaggttacagtgagccaagacaacactgctgcactccagcctgggcgacggagtgagaccctgtctccagaaaaaaaaaaaaagaagaatgggcaggaactcagttccttgtggaggtgaactatattcctatatgtttcacgtgcaaagtgtgtccttcctgagagaatacaacttaagatgctcctgtgtaacaatcccccatacctcgctcatctgctatacctggatggcctctgaaggccatgggcctcacaccttttggtcttaggacccctttacattctgagaaattattgaggactccaaaaagctcttgataaagtgggctatatctctagttgcctgatgtattagaaactgaaactgggaaaatatttttactgtttatttatttatttttgagacagggtctcactctgtcgcccaggctggagtgcagtggcgcgatctcagctcactgcaaactccacctcccagtttcaagcggttctcctgccttggcctcctgagtagctggaactacaggcgcccgccaccatgcctggctaattttcatatttttagtagagacagggtttcaccgtgttggccaagctggtcttaaacgcctaacctcaagtgatccacccgcctcagccactcaaaatgctgtgattacaggtgggcctggcctgcccacatttgatagaaacagacataggggctgttatttcactgtcttcttagctcccaggaagcaacagctctcacttgatggtaaagggcattggtcattcggcctcaatgttgggtgtgggcagggagtgggaaggcccaggctgggcgggagagggctccaagacacggctgccacacccaaggcaggtaaacctgactagaacttctgattttgtcaagagaaggtgggaattcctatttttattagagatttcttgctttgacagtattggcaactgagcaaagcaatttgtcttttaacatcaacattctgtgagccaaacgaagcccagctgggcgccagatcagtctggggcaccatcaatgtctgccttcgctttggaatccacagaggcttgtcctctgggaggggaggtttcctgaatgaaaactgaagggatagggagaggggagttgtggtgagcttggcctcttattagctgtaacatcttgcatgcatcttcttcatatccggagctccacctcctcatctgtattttttattttatttttttagtctgggtcttgctccatagcccaggctgaagtgcagtggtgtgatcatggctcactgcagtcttgatctcccgggctcaagcgatcctcccacctctgcctcctgagtagctgggaccgcaggtgcctatcaccacgccccgctaaagttttgtattttgtgtagagacgtggatctggctgtgttgcccaggcgggtctcaaactcatggcttcaaatgatcctcccacttcagcctcccaaaatgctgggactacagttgtgagccaccatgcctggcctctccttacctttaaaagaacagaggcactgggcgtggtggctcacgctgtaatcccagcactttgggaggccaaggcgggtggatcacctgaggtcaggagtttgagaccagcctgaccaacatggtgaaaccccgtctctactgaaaatacaaaaattagccaggcgtgttggcgcacacctataatctcagctactctggaggctgaggcaggagaatcgcttgaacccaggaagcagaggttgcagtgaaccaagatcatgccactgcactccagcctgggtgacagaacaagactccatctcaaaaaaaaaaaaaaaaaacaaaaaaggaacagaagctaagtccatacaggacttagcttaactggctctagagctgctcaaccaagggaatgagtgtgaaattgctttggaaactgtccaatgcttcctcaatgtaaaggattcatattgacaggagagggtagaggcctccctcctggcaggtgggaaacctgaaatcaggaattacacttaatgacacggggtgctcttctctcctgagcaagcagttctctggggtggtcctagagagatgggagaacatgtaaagcagagatactcaaatttcagcgtgctcaaaatctcctggagggcctgcaaaaatgcagatgggtccaggctcagtggctcaagcctgtaatcccagcactttaggaagctgaggctggaggatcacttgaagccaggagttcgagaccagcctggccaacatggtgaaagcccgtctctactaaaaatacaaaaattagctgggtgtggtggtgcacacgtgtagtcccagctactcgggaggttgaggcacgagaattgcttgaacctgggaggcagaagctgaggtgagctgagaccttgccactgcactctagcctgggtgacagaatgagactctgtctcaaaaaaaattaaataaataaaaataaaatgcagatgaggctgggcgtggtggagcatgcctataatcccagtggtttacgaggctgagacgggaggattacttgaggccaggaattcaaggctgcagtgacctatgatggcaccactgcactgcagcctgggtgacacagtgagacgatgtctgtaaaacaaataaacaaataaactgcagatagctgggcctccagaatttctgattccacaggtgcaaggcggggcccttgaccttgcattttgagcaagctgcagtcctgtggaggactggttgtgaagctgacaccattgtctgagggcagcaaaggctcttggatggattgagcctcagctcccatctatgagagctttaagctttaagtgagagctccccatggccgagagcttcattctgaattcctgctgctaggaattcaaaactcacattgaagtcctaacgcctagtagctcagaatgtgaccttagttggaggcagggtcttcacagaggtaatcaagttaaaatgagacgggagaatcctaatccaatataactggtttcctaaatctgacagggtacagtgactcacacctgtaatcccagcagtttgggaggccaacacaggaggactgcttgagatcaggaattcaagaccagcctgggcaatatagtgagaccctgtctctagcaaaaaaaaaaaaaaaaaaaaaagtgccagtagtcccagttactattgagaggctgaagcaagagagtcgcttgaatctggagggtggaggtggcagtaaggtatgattgcaccactgcattccagcctaaatgacaaagcaatactatgtctcaaacataaataaataaataaataaataaataaataaataaataaacggcaaatctgggcaggggtgaatacagggggaagggaatgtgaagatgaagatgccatacagagaaaggcccggaacagatcctcacacccctcagaaggaaccaacactgccagcacttgatcttgttgatcttggaattcaagctcaattctggcagggttttttgtttgtttgtttgtttgtttgtttgagtcggagtcttgctctgttgcccagcctggagtgcagtggcgcaatctccgctcactgccagccccgcctcccgggttcacgccattctcctgcctcagcctcctgagtagctgggactacaggcgcctgccaccatgcccggctaattttttgtatttttagtagagacagggtttcaccgtgttagccatgatggtctcgatctcctgacctcgtgatctgcccgccttggcctcccaaagcactgggagtacaggtgtgagccaccgtgcatggcctcaattccggtttttaagccacccagtttgtgaaactttgttgtaacagccctggaaaactgatacacctgctctctcgtaaaagatcagctgatacggcagcaccggccactggatctgcgggtcagttgtccccttagacagggcacctgcccgccagtcacaggtcctgtcacccagccccttcctctcatgggctccagccgcctcgctcccacaggtctcctggagacccgagttgctgatgtcagcgactattgcgagtgctcctgtgggacactgtcctctccccagcaacagccttcagttcacacccagggaggagatggagccccacactgcaccagcacacgactccagctccaactaggtgggtgttgatgctgaaggctgtgacatgcaaataccccccaggatctccttgtcaccccgaccaccaccaccaaagcccaggcaccaggcccctctcttctccaggacccaggcattcaagccccgcccgactctcaatggtcctttgtcccggactgggaaaggcacgggcagagtctgacatcatgaagcctggggtgggggtgggactccccctccccctccaactcccccccagccccacaacgcttctctccctggtctgagggatttccccgcccctcaccccctgggttctcccttgagagcgaggaccccccctccccactgctctggcctgaaggaggacaggagatgtcccagtgaggctgaacagctcatggtgaaatcactgctgcactttgtcacgccacctccagctgccccgagcccccacccaccttgcaaaagtcatgaccaaggggtggaatctgcactcagagggtccttgcccaacttggtcagcacagtcctatgtgcaccaagcactgccccggggacagaagggtgcacatgacagacagagaggcagataggtttctggtgagcccctgcctctgagagctcctgggttagtgggaggcagaggcgggcagacctagggtgcacacgggccagcctgccaaggctacagaaggaaaggacagcattgcaatggaggggcctggctgatgggcgaagatgggaaagcttcccagggaagcggcacccaggctgctgagcctacaggatgggtgaacggcagccagtgccagagtggggagtgctatggggtggggactgctttccaggaagaatgagcagcaggtgcacaggccttgagtctgaaggtgccctggggctctggggaacacattcaaccacccacactgtttattaagctcaactgcctgccaggagcttgtctacgagcaaggatggattgagaatatccaagacgaagcttctggcctggtggaggtcacgttctcatgaaaggagttggtgaacacggaaggtcatttcagatggcaagaggaggtgacactgacgttgagggtggaaaggacctgtctcctcctgctgcccacctaatgttgccaccaagattccctgaggacaatgcctctgtccctcagcctgggacttccaaagagattagactgcccccccacccccgggacccagaatcagggtgtacagggatggaagatggggagagagcaaggcagccactcccgacccctccaggaaagagctaggagaacccaggcgtcaggctgcccagtccgagccccgtggtgacaagggcccctttgtgcccccctcccccgggggtagggaggagctgggccctggaggcaggcggcccctggcacccagggggaggggaggggctggcaagtgggggcctagaccctggaaggcaggggactgcgagctgggctggcggagcagaggtgcagaagcaactgagtccaagtgagtatggtggcagggaggccagggcaaggggagcagggcaccggggcagtggcacccagacgtgagcagggtcaggtgctctgggtgagggagcatcgctgtgcaccgctactgatttaggatgcaggagtgtgtggcttggggctgctttggggatgggctcggaccatcgctggggcagcgatggggctctgggaagaaaccacagagagaaaaaacaaagggccccccctcagcaccccttgtgggtgaagattttgcaggagaggtttccttggggttcccgagtgcggggcagatggggtggaggaggtctgcatctggccgaagaatggaaggatgtccaggtgatcagacacctgcaggctgcaatctgggaggtggatgggggcagtgggctgttagtgactgcattctagcacctgggcacatagcaggtgtgtgtgtgtgtgtgtgtgcgtgtgcgtgcacacacatggctgcccatgcaccttcctctgtaagcctcagtcgacttttcttcattaatccccactaaggacactttttatttttcgttacttttttttttttaagagacgggactctcactatattgcccaggctggtctcaaacttctgggcacaagagattctcccaacttggccttccaaagtgctgggtttacaggcgtgagccactgcgcccggccccaactacagaaactttttagatgcatttgtcctcatcccatccttcccttggcattttaatccaacagatctgctgtacatatgtttatggactgtggccacacacactgtaatagctgaggttgatttggcccccatcccgagaacttgttttccccgctgttaagagtgcatggtctacctgcttgtttcatgtctgcccgggcacgtgctcatcctcatctgcatctctctcctgtaccttcctgtcacaggtgcaagggcagcgtcggccaggtgtccatcggcgcgtgtctgagtggacgcgtctatagccatcctcagtgtgtgtgtgcagttccttgcatctttgttagcctggcatgcatgctgggctgtgtgtgtgtgtgtgtgtgtgtgctgaatgccagggctgtgtctgtccaggtgtgtgtggacagcagcagaggcattgcatgcacgccttgggaactatgtgagtgccagcccatccctgtgggcacaggggtccctgtgcctgtctgtgtgttcagggtcctgtctgggtgtctgtatgagtctccgctgcgtgtgcctgccccttctggctggggctacatctgtcacatttcatccccgcgattggatgtgtctgtgcatgtgtctctgtccgtgggaagagggcggtgaaggctgggaaaagcaattgcttggaaaccctggctgcaaccccaaggcaacccatggagcagcagggtgccaggggctcgctagcccccaccctgggccttcctggccctgctcaaaggccagccaggagtgcctgacccctttcttactccccacttaccctgaaagccccccgcaggctaaaacaccctctccccgagggaacaggactcttttgtaccggggaccagcttctggtgagggtgcggacaccaggggccgtctgtggggtgggagagggcggcaggaattcacgcggcatgtcgggaatgctgatactgtgaaacccagtcattgatggctctgggtccctgcccgccacccccaggccccggccgtgggacatctgctccctcactccactcgccacacccctcagtctcacccccgtaccccgatgcggtcgttcccccttccctccccacagttctctgacaccccagcttggagggagttgttgccagagagtggcttcgaggctgtgtgggagggtcccaggcacaatgggagggccacatgggcagcctgacaacaggtcacaacccatgcaggagatactgaagcgggggtgggttgggtgcctcaatcccgcccccttgcacctgagtgactcttgttgcatgcaggttgtctggcggcttcaggtggacccagaagacgtccccaactcagggagattcaggtgaggggcagggtaccaactctcttcccttgcttcagctttgcaatgctggccctgccttggctctctggttcttactttctggagatctccaggggcatcacggtgacaaagataatgatcagcacatcatcactgcatagagacaggacatgcagcaaagactgcagaccaactgtgtggccttgggcgagtcacttaacctctctggacctcagctataaaatgaggataatgcatcttcctcaaagagatccaatgagttaagacagcagaataagcagtgagggctggcacatggccaatgccatagaagggtttataattataagtaatagcagcaggctgggtgaggtggctcatgcctgtaatcccaacactttgggaggctgaggcaggaggatcgcttgagccaaggagttcaagaccagtctgggcaacacagaacatggcaagactcccatctctaaaaaaaataataataataaccaaataaataaactaaaataaaattagccaggcatggtggtgtgtacctgaggtcccagttactctgaaggatcgcttaagcctggcagattgaagctgcagttgagtgagccacgattgcaccactgcattccaggctgggtgacagggctgagaccccatctcaaaaagtaaaaagttaaaaaatatcagcagaccaggcatggtgatttacacctgtaatcctttgggaagccaaggcaggaatattgctggaggccaggagttgaagaccagcctgggcaacatagtaagaccccacctccacaaccatttccacaaaaaagaagaaaaattaactgggtgtggggtggcgcataccagaagctgagacaagaggataacacgagctcaggattttgaggctatagtgagctgttattgtgtcactgcattccagcccgggcaatgaaacaagaccctgtctcagaaaaataagtaaataaatgcataaataaataataatagcagcagcagctaacatatgaatgggccccttcctgaagcccagatggaacaccccctttcacttcccccagcctttaaccctctcctctccctttccagcgatcactcactcgctgtacagaatgatattcctcacggcactgcctctgttctggattatgatttcaggtaacggctgacaggtgctggggacctaaaggctttggcccctgagcaggttggaggtgggtccccgcagccccccggcatgtggttggggatgggagccggagggggtgatcgggtaggacgtgtccctgagcctcagctctcctgcttgcccgcagcctcccgagggggtcactggggtgcctggatgccctcgtccatctcggccttcgaaggcacgtgcgtctccatcccctgccgctttgacttcccggatgagctgcggcccgctgtggtgcatggtgtctggtacttcaatagcccctaccccaagaactaccccccggtggtcttcaagtcgcgcacccaagtagtccacgagagcttccagggccgcagccgcctcctgggggacctgggcctgcgaaactgcaccctcctgctcagcaacgtcagccccgagctgggcgggaagtactacttccgtggggacctgggcggctacaaccagtacaccttctcagagcacagcgtcctggatatcgtcagtgagtccccagcggttgtgcaggcaccgggagctggggcagcggggcgggaaggagtgtggccggaaggcctccccgcaccttccccagcaggcctggatggcagatctgggaggtgctgatttggctgggggtgcaaacctcaaggcccacgcagaccatgcagatgacagacatgaacaaagcagggccccaaaatagtcttgctgccctcagggggaaacaggtgctgctactcttttggaaacacctggagaaaggcagtggggccagggggtaggggcaaggctgctgggcccccactttagcgtggtgatcttgggcaagtgacttaacttccttgggccttggttttcttttccgtaaaatggggataagaacagcacttaaggcaatgagtgaaaagccatcagatgcccagagcagcacctggcacgtggcccccagctctggccaacagaaagcagggcggtggctgtcaggtgttctgaattttcaagataaaccagaattttggattctttggtgtaatctcctaattcttaaattttggttgctgattcagatttctttttttaaaatcctttaagccaaatagaatacagctatggccagacatggcaatcagaatagggcacactgcctgatttcagggatccccctgcctcatttctgagtggcgctgctgcttggagtcctcagcgctgagtccctatgagagagccgggttcaccctggtgcagaaagagactgcacaggtgcagtacacacacacaccactctacagaaatcacacactacacactgcacactctacctacacactacccacacaccacacactacacatacatcacacactacacaaaccacacaccacacactgctcctgctacctacacactgcccacacaccaaacatacacatcacaccaaacacaccacacacacacactacacaaaccacacaccacacactgcatacactacacacacacacactgcttggcgctgaggactccaagcagcagcgccactcagaaatgaggcagggggatccctgaaatcaggcagtgtgccctattctgattgccatgtctggccatagctgtattctatttggcttaaaggattttaaaaccacacaccacacacacacca

SEQ ID NO: 38 - DNA, 26636 bp, Homo sapiens
tggtgtgtgtgtggtgtgtggttttaaaatcctttaagccaaatagaatacagctatggccagacatggcaatcagaatagggcacactgcctgatttcagggatccccctgcctcatttctgagtggcgctgctgcttggagtcctcagcgccaagcagtgtgtgtgtgtgtagtgtatgcagtgtgtggtgtgtggtttgtgtagtgtgtgtgtgtggtgtgtttggtgtgatgtgtatgtttggtgtgtgggcagtgtgtaggtagcaggagcagtgtgtggtgtgtggtttgtgtagtgtgtgatgtatgtgtagtgtgtggtgtgtgggtagtgtgtaggtagagtgtgcagtgtgtagtgtgtgatttctgtagagtggtgtgtgtgtgtactgcacctgtgcagtctctttctgcaccagggtgaacccggctctctcatagggactcagcgctgaggactccaagcagcagcgccactcagaaatgaggcagggggatccctgaaatcaggcagtgtgccctattctgattgccatgtctggccatagctgtattctatttggcttaaaggattttaaaaaaagaaatctgaatcagcaaccaaaatttaagaattaggagattacaccaaagaatccaaaattctggtttatcttgaaaattcagaacacctgacagccaccgccctgctttctgttggccagagctgggggccacgtgccaggtgctgctctgggcatctgatggcttttcactcattgccttaagtgctgttcttatccccattttacggaaaagaaaaccaaggcccaaggaagttaagtcacttgcccaagatcaccacgctaaagtgggggcccagcagccttgcccctaccccctggccccactgcctttctccaggtgtttccaaaagagtagcagcacctgtttccccctgagggcagcaagactattttggggccctgctttgttcatgtctgtcatctgcatggtctgcgtgggccttgaggtttgcacccccagccaaatcagcacctcccagatctgccatccaggcctgctggggaaggtgcggggaggccttccggccacactccttcccgccccgctgccccagctcccggtgcctgcacaaccgctggggactcactgacgatatccaggacgctgtgctctgagaaggtgtactggttgtagccgcccaggtccccacggaagtagtacttcccgcccagctcggggctgacgttgctgagcaggagggtgcagtttcgcaggcccaggtcccccaggaggcggctgcggccctggaagctctcgtggactacttgggtgcgcgacttgaagaccaccggggggtagttcttggggtaggggctattgaagtaccagacaccatgcaccacagcgggccgcagctcatccgggaagtcaaagcggcaggggatggagacgcacgtgccttcgaaggccgagatggacgagggcatccaggcaccccagtgaccccctcgggaggctgcgggcaagcaggagagctgaggctcagggacacgtcctacccgatcaccccctccggctcccatccccaaccacatgccggggggctgcggggacccacctccaacctgctcaggggccaaagcctttaggtccccagcacctgtcagccgttacctgaaatcataatccagaacagaggcagtgccgtgaggaatatcattctgtacagcgagtgagtgatcgctggaaagggagaggagagggttaaaggctgggggaagtgaaagggggtgttccatctgggcttcaggaaggggcccattcatatgttagctgctgctgctattattatttatttatgcatttatttacttatttttctgagacagggtcttgtttcattgcccgggctggaatgcagtgacacaataacagctcactatagcctcaaaatcctgagctcgtgttatcctcttgtctcagcttctggtatgcgccaccccacacccagttaatttttcttcttttttgtggaaatggttgtggaggtggggtcttactatgttgcccaggctggtcttcaactcctggcctccagcaatattcctgccttggcttcccaaaggattacaggtgtaaatcaccatgcctggtctgctgatattttttaactttttactttttgagatggggtctcagccctgtcacccagcctggaatgcagtggtgcaatcgtggctcactcaactgcagcttcaatctgccaggcttaagcgatccttcagagtaactgggacctcaggtacacaccaccatgcctggctaattttattttagtttatttatttggttattattattattttttttagagatgggagtcttgccatgttctgtgttgcccagactggtcttgaactccttggctcaagcgatcctcctgcctcagcctcccaaagtgttgggattacaggcatgagccacctcacccagcctgctgctattacttataattataaacccttctatggcattggccatgtgccagccctcactgcttattctgctgtcttaactcattggatctctttgaggaagatgcattatcctcattttatagctgaggtccagagaggttaagtgactcgcccaaggccacacagttggtctgcagtctttgctgcatgtcctgtctctatgcagtgatgatgtgctgatcattatctttgtcaccgtgatgcccctggagatctccagaaagtaagaaccagagagccaaggcagggccagcattgcaaagctgaagcaagggaagagagttggtaccctgcccctcacctgaatctccctgagttggggacgtcttctgggtccacctgaagccgccagacaacctgcatgcaacaagagtcactcaggtgcaagggggcgggattgaggcacccaacccacccccgcttcagtatctcctgcatgggttgtgacctgttgtcaggctgcccatgtggccctcccattgtgcctgggaccctcccacacagcctcgaagccactctctggcaacaactccctccaagctggggtgtcagagaactgtggggagggaagggggaacgaccgcatcggggtacgggggtgagactgaggggtgtggcgagtggagtgagggagcagatgtcccacggccggggcctgggggtggcgggcagggacccagagccatcaatgactgggtttcacagtatcagcattcccgacatgccgcgtgaattcctgccgccctctcccaccccacagacggcccctggtgtccgcaccctcaccagaagctggtccccggtacaaaagagtcctgttccctcggggagagggtgttttagcctgcggggggctttcagggtaagtggggagtaagaaaggggtcaggcactcctggctggcctttgagcagggccaggaaggcccagggtgggggctagcgagcccctggcaccctgctgctccatgggttgccttggggttgcagccagggtttccaagcaattgcttttcccagccttcaccgccctcttcccacggacagagacacatgcacagacacatccaatcgcggggatgaaatgtgacagatgtagccccagccagaaggggcaggcacacgcagcggagactcatacagacacccagacaggaccctgaacacacagacaggcacagggacccctgtgcccacagggatgggctggcactcacatagttcccaaggcgtgcatgcaatgcctctgctgctgtccacacacacctggacagacacagccctggcattcagcacacacacacacacacacacacagcccagcatgcatgccaggctaacaaagatgcaaggaactgcacacacacactgaggatggctatagacgcgtccactcagacacgcgccgatggacacctggccgacgctgcccttgcacctgtgacaggaaggtacaggagagagatgcagatgaggatgagcacgtgcccgggcagacatgaaacaagcaggtagaccatgcactcttaacagcggggaaaacaagttctcgggatgggggccaaatcaacctcagctattacagtgtgtgtggccacagtccataaacatatgtacagcagatctgttggattaaaatgccaagggaaggatgggatgaggacaaatgcatctaaaaagtttctgtagttggggccgggcgcagtggctcacgcctgtaaacccagcactttggaaggccaagttgggagaatctcttgtgcccagaagtttgagaccagcctgggcaatatagtgagagtcccgtctcttaaaaaaaaaaaagtaacgaaaaataaaaagtgtccttagtggggattaatgaagaaaagtcgactgaggcttacagaggaaggtgcatgggcagccatgtgtgtgcacgcacacgcacacacacacacacacacacctgctatgtgcccaggtgctagaatgcagtcactaacagcccactgcccccatccacctcccagattgcagcctgcaggtgtctgatcacctggacatccttccattcttcggccagatgcagacctcctccaccccatctgccccgcactcgggaaccccaaggaaacctctcctgcaaaatcttcacccacaaggggtgctgagggggggccctttgttttttctctctgtggtttcttcccagagccccatcgctgccccagcgatggtccgagcccatccccaaagcagccccaagccacacactcctgcatcctaaatcagtagcggtgcacagcgatgctccctcacccagagcacctgaccctgctcacgtctgggtgccactgccccggtgccctgctccccttgccctggcctccctgccaccatactcacttggactcagttgcttctgcacctctgctccgccagcccagctcgcagtcccctgccttccagggtctaggcccccacttgccagcccctcccctccccctgggtgccaggggccgcctgcctccagggcccagctcctccctacccccgggggaggggggcacaaaggggcccttgtcaccacggggctcggactgggcagcctgacgcctgggttctcctagctctttcctggaggggtcgggagtggctgccttgctctctccccatcttccatccctgtacaccctgattctgggtcccgggggtgggggggcagtctaatctctttggaagtcccaggctgagggacagaggcattgtcctcagggaatcttggtggcaacattaggtgggcagcaggaggagacaggtcctttccaccctcaacgtcagtgtcacctcctcttgccatctgaaatgaccttccgtgttcaccaactcctttcatgagaacgtgacctccaccaggccagaagcttcgtcttggatattctcaatccatccttgctcgtagacaagctcctggcaggcagttgagcttaataaacagtgtgggtggttgaatgtgttccccagagccccagggcaccttcagactcaaggcctgtgcacctgctgctcattcttcctggaaagcagtccccaccccatagcactccccactctggcactggctgccgttcacccatcctgtaggctcagcagcctgggtgccgcttccctgggaagctttcccatcttcgcccatcagccaggcccctccattgcaatgctgtcctttccttctgtagccttggcaggctggcccgtgtgcaccctaggtctgcccgcctctgcctcccactaacccaggagctctcagaggcaggggctcaccagaaacctatctgcctctctgtctgtcatgtgcacccttctgtccccggggcagtgcttggtgcacataggactgtgctgaccaagttgggcaaggaccctctgagtgcagattccaccccttggtcatgacttttgcaaggtgggtgggggctcggggcagctggaggtggcgtgacaaagtgcagcagtgatttcaccatgagctgttcagcctcactgggacatctcctgtcctccttcaggccagagcagtggggagggggggtcctcgctctcaagggagaacccagggggtgaggggcggggaaatccctcagaccagggagagaagcgttgtggggctgggggggagttggagggggagggggagtcccacccccaccccaggcttcatgatgtcagactctgcccgtgcctttcccagtccgggacaaaggaccattgagagtcgggcggggcttgaatgcctgggtcctggagaagagaggggcctggtgcctgggctttggtggtggtggtcggggtgacaaggagatcctggggggtatttgcatgtcacagccttcagcatcaacacccacctagttggagctggagtcgtgtgctggtgcagtgtggggctccatctcctccctgggtgtgaactgaaggctgttgctggggagaggacagtgtcccacaggagcactcgcaatagtcgctgacatcagcaactcgggtctccaggagacctgtgggagcgaggcggctggagcccatgagaggaaggggctgggtgacaggacctgtgactggcgggcaggtgccctgtctaaggggacaactgacccgcagatccagtggccggtgctgccgtatcagctgatcttttacgagagagcaggtgtatcagttttccagggctgttacaacaaagtttcacaaactgggtggcttaaaaaccggaattgaggccatgcacggtggctcacacctgtactcccagtgctttgggaggccaaggcgggcagatcacgaggtcaggagatcgagaccatcatggctaacacggtgaaaccctgtctctactaaaaatacaaaaaattagccgggcatggtggcaggcgcctgtagtcccagctactcaggaggctgaggcaggagaatggcgtgaacccgggaggcggggctggcagtgagcggagattgcgccactgcactccaggctgggcaacagagcaagactccgactcaaacaaacaaacaaacaaacaaacaaaaaaccctgccagaattgagcttgaattccaagatcaacaagatcaagtgctggcagtgttggttccttctgaggggtgtgaggatctgttccgggcctttctctgtatggcatcttcatcttcacattcccttccccctgtattcacccctgcccagatttgccgtttatttatttatttatttatttatttatttatttatttatgtttgagacatagtattgctttgtcatttaggctggaatgcagtggtgcaatcataccttactgccacctccaccctccagattcaagcgactctcttgcttcagcctctcaatagtaactgggactactggcacttttttttttttttttttttttgctagagacagggtctcactatattgcccaggctggtcttgaattcctgatctcaagcagtcctcctgtgttggcctcccaaactgctgggattacaggtgtgagtcactgtaccctgtcagatttaggaaaccagttatattggattaggattctcccgtctcattttaacttgattacctctgtgaagaccctgcctccaactaaggtcacattctgagctactaggcgttaggacttcaatgtgagttttgaattcctagcagcaggaattcagaatgaagctctcggccatggggagctctcacttaaagcttaaagctctcatagatgggagctgaggctcaatccatccaagagcctttgctgccctcagacaatggtgtcagcttcacaaccagtcctccacaggactgcagcttgctcaaaatgcaaggtcaagggccccgccttgcacctgtggaatcagaaattctggaggcccagctatctgcagtttatttgtttatttgttttacagacatcgtctcactgtgtcacccaggctgcagtgcagtggtgccatcataggtcactgcagccttgaattcctggcctcaagtaatcctcccgtctcagcctcgtaaaccactgggattataggcatgctccaccacgcccagcctcatctgcattttatttttatttatttaattttttttgagacagagtctcattctgtcacccaggctagagtgcagtggcaaggtctcagctcacctcagcttctgcctcccaggttcaagcaattctcgtgcctcaacctcccgagtagctgggactacacgtgtgcaccaccacacccagctaatttttgtatttttagtagagacgggctttcaccatgttggccaggctggtctcgaactcctggcttcaagtgatcctccagcctcagcttcctaaagtgctgggattacaggcttgagccactgagcctggacccatctgcatttttgcaggccctccaggagattttgagcacgctgaaatttgagtatctctgctttacatgttctcccatctctctaggaccaccccagagaactgcttgctcaggagagaagagcaccccgtgtcattaagtgtaattcctgatttcaggtttcccacctgccaggagggaggcctctaccctctcctgtcaatatgaatcctttacattgaggaagcattggacagtttccaaagcaatttcacactcattcccttggttgagcagctctagagccagttaagctaagtcctgtatggacttagcttctgttccttttttgttttttttttttttttttgagatggagtcttgttctgtcacccaggctggagtgcagtggcatgatcttggttcactgcaacctctgcttcctgggttcaagcgattctcctgcctcagcctccagagtagctgagattataggtgtgcgccaacacgcctggctaatttttgtattttcagtagagacggggtttcaccatgttggtcaggctggtctcaaactcctgacctcaggtgatccacccgccttggcctcccaaagtgctgggattacagcgtgagccaccacgcccagtgcctctgttcttttaaaggtaaggagaggccaggcatggtggctcacaactgtagtcccagcattttgggaggctgaagtgggaggatcatttgaagccatgagtttgagacccgcctgggcaacacagccagatccacgtctctacacaaaatacaaaactttagcggggcgtggtgataggcacctgcggtcccagctactcaggaggcagaggtgggaggatcgcttgagcccgggagatcaagactgcagtgagccatgatcacaccactgcacttcagcctgggctatggagcaagacccagactaaaaaaataaaataaaaaatacagatgaggaggtggagctccggatatgaagaagatgcatgcaagatgttacagctaataagaggccaagctcaccacaactcccctctccctatcccttcagttttcattcaggaaacctcccctcccagaggacaagcctctgtggattccaaagcgaaggcagacattgatggtgccccagactgatctggcgcccagctgggcttcgtttggctcacagaatgttgatgttaaaagacaaattgctttgctcagttgccaatactgtcaaagcaagaaatctctaataaaaataggaattcccaccttctcttgacaaaatcagaagttctagtcaggtttacctgccttgggtgtggcagccgtgtcttggagccctctcccgcccagcctgggccttcccactccctgcccacacccaacattgaggccgaatgaccaatgccctttaccatcaagtgagagctgttgcttcctgggagctaagaagacagtgaaataacagcccctatgtctgtttctatcaaatgtgggcaggccaggcccacctgtaatcacagcattttgagtggctgaggcgggtggatcacttgaggttaggcgtttaagaccagcttggccaacacggtgaaaccctgtctctactaaaaatatgaaaattagccaggcatggtggcgggcgcctgtagttccagctactcaggaggccaaggcaggagaaccgcttgaaactgggaggtggagtttgcagtgagctgagatcgcgccactgcactccagcctgggcgacagagtgagaccctgtctcaaaaataaataaataaacagtaaaaatattttcccagtttcagtttctaatacatcaggcaactagagatatagcccactttatcaagagctttttggagtcctcaataatttctcagaatgtaaaggggtcctaagaccaaaaggtgtgaggcccatggccttcagaggccatccaggtatagcagatgagcgaggtatgggggattgttacacaggagcatcttaagttgtattctctcaggaaggacacactttgcacgtgaaacatataggaatatagttcacctccacaaggaactgagttcctgcccattcttctttttttttttttctggagacagggtctcactccgtcgcccaggctggagtgcagcagtgttgtcttggctcactgtaacctccacctccagggttcaagtgattctcctgactcagcctcctgactagctgggattacaggcacatgccaccatgcctggctaatttttgtagagacggtgtttcaccatgttggccaggctggtcttgaactcctgacctcaagtgatctgcctgcctcagccacccaaagtgctgtaggcatgaatcaccacccctggcccctcccattcttgaaagctgtattgctctcattttcgttgccccattttttttttttttgacaccaggtcttcttctggaactcccagtcttaaattatcctcctgcctcagcctcccgagtagcagggctggtgcaactgcaccgggctagaaactgggacatttaaaagcgtgagatacaccagcacacaatccattagccatctggtgatgatgccaacaggtgtcgcagagcctcctggaaactccattgtatactcatgagagaaccagggtgaaaaaggcaaataaacatctttgtaggccgggcgtggtggctcacacctgtaatctcagcactttgggagactgagacgggtggatcacttgaggtcaggagttcgagaccagcctggacaacatggcaaaaccccacctctactaaaaatacaaaaattagccaggtgtggtggcacgtgcctgtagtcccagctattcaggaggctgaggcaggggaatcgcttgaacctgggaggtggaggttgcagtgagccaagatcatgccactgccctccagcctgggtgacacagagagactctgcctcaaaaaaaaaaaaaaaagaaagaaaaaaaaggaaaaaaaaaggaaaaaaaaagtcttagtagtttccaccttcaggagccctacaaaaggagtccctggatcttactttgagaacctttatagcagtgtccaatgttttggcttccctgggccacactggaagaattgtcttgggccacacataaaacacactaacactaatgacagctgatgagaaaaaaaaaaattgcggaaaaatctcataatgccttaagaaactacaaatttgtgttgggtgcattcaaagccatccagggctgcatgtggcctccaggttggacaagcttgccttacaggcactgatttctacagctgttttaggaagatctcaaggagaggaaacattaactttcatcccctattattgcaacatgaagggggagaacagaaacaaattttcttcaccaactttcctggcaacctccaggacacaccagccccacatgacccaccaagcactggtgcttgcaaggcagggtcaggacaagctcttagcacagacactcggcagagagaaaggacaacagacactctggtttggaaaacaaaagaaccagccattttattccaagacctatgttctggggcagcaggaataaataaggaagggaggggacgggggcagggcaggtaggttctacgtcttgcagcacatcccacactttgatcgatgacagcagccgcagcagaaaatgcagatggggaagtgggtgtctcgcctccttcgcctctggaacatgggctgtgggaaggaagggaatgtgagcagggaaccggccttagcatggggagggagcagggggctaggaaaggcatcactgttgcgctcaccatccagctggccctggctccagctctgtcctggggttgcagctctgcaagttgtcccgtctgtgaaagcagaagggggtgcagaggatggcagggggcccagtggacctctgagactggctcccggcaacctgctcctctccaagtggtttaaacccagagctcaaatggactcttaggaggggccttgctttcttgcttctgctcaccttcccatgggcggcttttcctaaaaaaaaaaacctcccagatccgcctcctcctctttccacagctgctactcttctttgggatatcaccttcccctgcctggatgccagtgccagcctcctaacacacctccctgcattcttgcccctcaatccatttgccacacagcagagtcactttttttgtttgttttttagacagagtcttcctctgttgcccaggccagagtgcagtggcacagtcatagctccctgcagccttgacctcctgtgctcaagcgatgctcccgcctcagcttcccgagtagctgggacagcaggtgcacgccaccacacccggctaattttttaattttttgtagaggtggggtctggttgtgttgcccaagctggtcttgaactcctgggctcaactgatcttcctaccttggcctcccaaaactctgggattacaggtgtgagccatggtgcctgactggcagattaagttttttaaaacatggccagtgagattgtggttttctccattttaaaaacctacaggaggctgggcgcagtggctcacgcctgtaatcccagcactttgggaagccgaggtgggagaatcacctgaggtcaggagttcaagaccagtctggccaacatggtgaaaccctgtctctactaaaaaaacaaaaattagccgggcgtggtggcagccgcctgtaatcccagctgctcgggaagctgaggcaggagaattgcttgaacccgggaggcggaggttgcagtgagcccagatgatgccactgcacaccagcctgaacgacagagcgagaccctatctcagaaaaaaaaaaaaaagcttatgggggcttcctctttattccaaggaaaaatcagtgtctgcatggttgcccacaagacttagggactgcccacccctcagccttatccccaagtcccaccatctcctcttgttcagcctgaccctgggctatgctggcttgtcctctccttaggtctttgctgcctccatctctcaccctccaagacgaaggtcaactgtcactttctcatgaaacacttgcttgactgccagccccttgaccatgcctgtggtcccccaacccgtggcatgtgcctgctgtcccagctacttgggacgctgaggtgggaggattgcttgagcacaggaggttgaggctgcagtgaactatgactgcaccactgcactccagcctcagcaacagaggaagaccctgtctctaaaaaacaaaccaaaaaagtgactctactgtgtggcgaatgggtcacggtcactctaccactgtctgttatgagattcacgaatagaatgtactagacacaattatttattcatgttttcatcagtctttaacaaattccctgaccaggatggagaaatctcctctctcatctaccttgttcatggcctcgtccccactgtctagaataagactccacacggcgtaggggttccgtaaatacccatggaattaggaccttccagtccctgtcactcggtgcttcattgatttctgttcttttttggagatggagtcttgctctgttgccaggctggagtgcagtggtgcaatctcagctcactgtgcaacctccaccttgcgggttcaagcaattctcctgcctcagtctcccgagtagctgggattacaggcacctgccaccaagcctggctaacttttgtatttttagtagagacggggttttaccatgttggccaggctggtctcaaactgacctcaagtgggctgcctgcctcaacctcccaaagtgctgggattacaggcatgagccaccgtgcctgtcctggttcctgttcagctgccagtactcctgagacgtcctgagctctgctcagtgctcgggtgtctccagtgccctaggctgaggcctggctctcccatccctgctgccctgctaaggacccaggccactgggctctcacctgttgtgggaaaacagagccactggtcaggctggcgaggaggaggaggagcaggaggcaagcggcccagatctgggagctcagtgccatcgtgccgtctgtctggctgtcccactgctgggtcttgagcttgctctggtgtctgggaccgagtgacagtcgcttttatggggcctgccaggggaggcggtggtctgagccccctcccctttgctctgtctcatttccaagaaggtggtggcgccgaaaaggcgggagagataagcgggaacagagcgacagggaacagggttgtgtcaccctcagccggcagaggtgtgttcagggggtggggcagacggggtcacagacacacactgctcaccagccatctggggagccctttccccatcacgatgtcattctgctgatcgggaaaaaagttcccccttttgcttcagcggttaagcagtttgatgagcagaatcaaggttccgctctcctccactcacttccccatcgcctacatgcacacggggcatggccagcagccgccaggctcctcaggagtgtctggcatgttgggggaagcatccattgctttaagctctcaccacacgtgcataggttctggcagggaacactagatagccctgagcagggcaagcatcagcgtgtgcccgatccgcacgtggtgttttcccagtgtcagacccttgagatgtggctctggtaactggaaaatgtttgagcaaacttttggccataaatgacagcagtaatatggcccagcacagtggcttatgcctgtaatcccagcaatttgggaggccaaggcaggagggtcgcttgagcccagaagttcaagactagcctgggcaacatagggagaccccatctctacaaaaaaaattttaaacaaatttagccaggcgtggtggcacacatctgtagtcccagctacttgggaggctgaggcagatcgcttaagcccaggaggctgaggttgcagtgagctatgattgtgtgactgcactccagcctgggtgacagagtgagaccctgtctataaaacataaaatagcagtaatagtaatagctaacatctacagtccgatgagtacattttatacgatggcacatatgttgactcacttctgcaccaactcagcctgtgctgcctgttctcccagcagcacttactgccccaccttcagctctgctctgtattcaggggctgccttctcagtcacccaaccccagaggcctgggctccccagaccctgctcccttttaggaacctcctccccgtcggacactcatttccttcactttacagaaaaggcactgaaggcagagatcagggcatggcccaagcttgctcagccagaggcagagctgagattctagcctggacagcctgactccagggcttttgctcttacccaccaggtttccccatctcccctaaaacacagcagggcacagcggtatgctagacctggctcaacatagcagaccatgcacatctcgaaactctgcattcagtggcatcatgctggtatcctgaaatcagcagcagtgggagtcttgacacccagaaattggcaagcactacaagccagggatgtttttggggagccggttccttaggacaccactagctgggggatgaacccaggctgcctgactgcagtgccttcattcctttccactaccaggcccagctcagggtgcacacggcccaggggatcaacaaaccttggttccagatgggcccttgcacattttgcctctttgcctttttcattccagggccatccagtgtcagccaagtcaccagagcccggggatgttgttgtcgaggaatgaacacttcttcctggttgctgaaccactttcaaggcccactcaagcacagaaatgcacaggccctgccatctgcctcctcatccacaccacgtgggaggctcctcttgtcacagcctgggtaacaaagcgagaccccatctatacaaaaacttggctgtggtgctacgcacctgtagttggtcaaggctgcagtgagccgtgattgtgtgccactgcaccccagcctgggtgagagtgaaaccctgtctctaaaaactaaatgaataaagatggcctcagatgggaatagctaggaaaaggagacagggctcttgtgggaagagacgagtgcagggagtgggggaattggggaggaaaggcagatggagctccacaaggtgagcagagtggcaagcccagctcctgggagttgaagggtgctgcaggctgaagcagggcccagtgaataggggtgtgctcacctggggagacacaggagcagcccccagccctaccaggcatcgctgcatctcagctgaggacaggtttcatcatcagcaggggcaggggtcacagcacaggcgccagagccttggtgcaaggcgacaggctgacgggccaagcttggcgccctggccatctgccctccctgggggtgaggggctcaaggccaggccccactattggctggtgcagaggggagggctttggcccagcagggcagggccaggggctggttgtgttttcaggaactgttgacacggagacccctgcctctcctccaacatgggacatgtccttgaccccagctccccacaccctcatgcacgtctagggcctcaaaggggacattcattccttaattcctccatccatccaaccaaccactgggtaatgggtggtgcagctggcagggaccatgcacagccatgtgcacaacagcagaaccatgcctcgtggagctctgcagaccccaggccccctccccactcctgagatggacaaacacacaagcagacaaggcgggggccacatggggccagtttattgcagttaaatacctctctctctattttttttttgtcaatttttccataaagaaaattaaaacacacacacacacccccaaaggggagcagggacccagaaacaagaggtggggtgggacgtggcctccctgcataggtccaggccccgggtggccccccaaaggctcccctccttcccatcagcaccctgtctcagtacctccagagagcaggaggcagcgggacgtggcagggcctctgtcccctccctcttgcctccaggtgagaccactagaagtgccggggcttagtgagggccgggagaagggcgacagacagacggatgggcagggaggataccgtttccaagtggaggagggcggtgggcactgtatccacagaaatgcattatttctccccgttttttgttaaaaatctactataaaaaaacgcagctgggggaggggcatgtgtccctctctgtgctaagggctggggaagggggcagcagaggccggcgtgggcggcggcggctgcgtggtggtggcgggcgtcactgccgggtgccctcgcccaccatctccaggttgtgctgctgcagctgggctcgaagcagggcgttctcattcttcagctcctcgatctggcggacacgacggaggtcaagggagctgagggccagcgccttgcatctggggctcctgggccctgacccgctccaggccccgcacccacctgctgcctcaggagctcgttgtccatctgcagccgctcggcctctttgaaggtctcctgcatgcgctggttggtctggcgcaactcccggatgtaatcgcaggccttggacaggatccctcctttactctggggggcgaggggaccaggagccttagggcaggcaccgcccaccggcctccaccccagggatgactcccgagccccatggctgttggactttctgcatgcaagggtcgggggccgggaccaccgcagacactgagggtccggggtgctcaccgctcccgtcttgctgttgtctgcgttacagtctggaatgattttcgaaagctggacgatccagttgttgatcttgtccctccgcctccgctccactgcggaaaacagagtcacagccacggcttcgctgacggatcatgcctgagcggccgtcctcacagggcagaggctcagcccaaggacacccaggaacagtgcaggccccaccgagaccacagccctgggaagtgaggggccgcaccctgagcccagccggcccccaccccagcttctcaagaggaacaaagaaacgtgggccctccagtgccacacatgcttttaggacgggcatcaaaggccaggcacttggagatcattttgcaggcctgccccaccatacttgtacaaattttaatcgacagttaaaaataaggaaatttctcatggtaattggcatcactggcttcttttgagaaatggagctctggtcacagtgggcacatactggaaggcagggatggacagagccactcttcgcaggaccagtgcccctttttggctcctgcggcccctgcactgcattctccagtctccccagagactctggcaccgtgattttgttttttttcctcatctctaaatccaagtctgaccatgtttcacccctgcttaaaatccttccacagggcaatggcagatcccaactggtacttgcagctcccagggcctggcccacaaagcaccagctcacccaggaaagacccaaatcctatgttgaaggccagagatggcaactcatagaaggttttacttaaaaaacccagatttgtgattttactccataaaactccacaatctcatgccaactgtgtcagctgggtggcagctatccccagacagagcacatgcctttctctggccacatcccatcctgacacctgcctggggactgtgtgctgcggagcctgagacccctgactcaggacctgctaaagccaggctgtcccaaccctggctgccaagccccagcaccaggcaccgtggggacaggaaagaacgctcagctacccccaactcctaccccacggacccccagccccctgccagggtggctcatgctgtctgcaccatttgtggaggggaacgaagccctatagctagggcacatgtggcaggaaggccagggggtcttttcaaagccttggataatggtgatgaaaccggtcaggggtccagtgagcctgagaaggaggggtgggccacagcctgcccgttaccctcacaccccgagatcggcagctccccagacctgccgttcccttgaaaaggctggggcccacccaccagcaaacccctctggcttctctgggctgtggccgcatgctgctgactggcctctccctgcctccagtgcctcccactcaggcctgagtgacaaaccctccgatggatgcggactctccttctcccaccgtgacctctcttccctggccccttccatccttgtgctccctctttcctccaaaaccaatagcccaagatcagtgcttgctatggagcacggtccaggccctgcactgggctcagcgagtgcttgctcccctattactatcgcggtgcgctgaaccttcccaccaaagacaaccacacccgcctttgggaactctggccaaaagcagcagcggagctgagagtccaggcctggaggcaccgctggcgcagtccccagcagagcgctcctcgcccaggggtctgtggaggaactcggcaggcggcctcgtttcagcctctgccctcccacagtcctctcgagagctgggcgccggctgcaggtacatcctctccagagcaagcttacttcttacacacctactccccgccctactatgtgccaggccctccgccaggctggggtccagggtggaagcagccccggtgcgccccatgggcactcgcagcaccactgtgggcaagtggcactaaccccattgcattcgtgtcatcactgaagatggtacaaagtgcctcgggaacgccaggcgccgagccatggcctctgcatgggaatgggggtgggatgaatcctcagagatccaggaaacattcgggctggtttctgagagaaagactctaaggcaggcagctgggaagatcccagaaatggtggcctgaaaaccatttcagggtatgcaggggtgggaaaaggttgtaaagatcggttgtcaaggccttgtgtgctctgctcgcaggtcaggaccgcatctcctcctcctccagagtcccaggcccttgaatccaggccctgacattagcaggcggtaatgctgtccagcctgtggcttcggaagaccatcatggcacatttgaaatacaggaagacccattaggaccaaggccacgttcattccacagaagcacttcagttactccataggaaacttaaaattcagaagctgggtggggtggctcacgcctgtaatcccagcactttgggagggtggatcacatgaggccaggagtttgagaccagcctggccaacatggcgaaaccccggctctactaaaaatgcaaaaattagccaggcatagcagtgcatgcctataatcccagcgacttgggaggctgaagcacgagaattgcttgaacccaagaggtggaggttgtagtgagccgagaccacatcattgcacaccagcttgggtgacagagcgagactctgtctcaaaaaaaaaaaaaaaaaaaagagaaaattcagaagcgaaacctgccaggactgaaggaagaaatggacaaatccacaaatatagtgagagacatggacatctttctcattgattggtggaacaagtaaacaacaacaacaaaaatcagaatagaaagcctgaacactcaaccagcctgacctcactgacctggggggacattctgcctgacagcagcagacacctgtcctcgtcaatgccccagaagcttccgccaagctaggacacattcgggcccgtcgggtaagtctcatcgaatttcaaggaactgaaatcatacagagtatgttctctgaccataacagaactaaattaaaaatcaataacaaaaagatatctgaaaaacccacaaatatttggaaattaagcaacctgcctccaaataacagaaaggtcaaagaagaaatcacaaggaaaattggaaaacactttaaactgaatgataacaaaaacaacatatcccagtgggatgtagctaaagtgatgctggagtgaactggcaactctaaatgttgttaagcaaagagaaaggttaagaatcatctcaatccctgctgtgaaacattaatcctgtaaaataaagattttagtagaaaattggaaaaaaaaaaaaaaaaagaattaccttaaaaagctggggttggggtgtgccagggaagctaaagcatgaaacctagcaaattgaatccaaagtgagtagaaggggccgggtgcagtggctcactcctgtaatcccagcactttgggaggctgaggcaggtggataacctgaggccaggagttcgagaccagcctggccaacatggtgaaaccccgtctctaccaaaaatacaaaaactagctaggtgtggcagcgggcacctgtagtcccagctacttgggagactgaggcaggagaatcacttgaaccggggaggcagaggttgtagtaagctgagattgcgccactgtgacagagcgagattccatctcaaaacaaaacaacaaacaaacaaaaaaccaagtgagtagaagcatgaattagtaacattaagagtagaaatcaatgaaacggaaaaagcaatctaatctggcacctaaaaatcagatttcacataagtctcgatttctagcttctcagagtttctggcaacagtggccctagattctgacagggcagcaaggggaaggcactgggcaagggccacccttcaggcagcgcacacatgccccagatcactgggggccccccacaacctttcctatctttttctgacacaaggtctgggtctgttgctcaggctggagggtaatctcagctcactgcaacctctgtctcccggactcaagccatcttcccaccacaggttcccaagtagctgggactgttacaggcatgtaccaccaggcctggctaatttttaatttttttggtagagacagggttttgtcacattgcctaggatggtctcaaactcctgggctcaagtgatccgtccgtcttggccaaaatgtaatcccaaaagtgctgggattccgggcgggagccaccacacccagccacacaccccttcctgagatgccaagtgcacctccctccctcaggcccctgcaggcatttgagtctgtgactctgggataagctcctgcagtaccaagaagtggtgggaaggagggaaaaagaagtgagagaagcggatctgaaatcaccacagaagagaaacttggggtttgtggccataagggaagaagagggcagagttgaaagcggctctggtcttagtttctggcttgggcagctgtgacaggggtagcttttgctgctctgcaaagaagaaggttgcatgaaagcctttggagacgggagatggcacattctcttttgggcgagttgagtttgaggcattacagggatgtccagagacagaaatctcgaataggtagttcaaaacgtggggctggagttgcagtgaaaggaagggaatggatggaaacacagttccttgcattaccaggagccaggtggtgggcgaagcctgggaggacatcaaggaacagtcctcaactttttgtgagtcacacactcttctgcagcaaagaaaaaagaggaacacctacaagggggaacagagtttgggggatactgaccaagagcttccgagcccatcgctgggcctcacaagtcatacacctgaggccgacgggaggggccggaccttatgaaacaccagcaagactgggtgtggcagctcaggcctgtagccgaggccggaggactgcctgaggccagaagttcaagacgagcctgggcagcatagcaagacctccactctacagataaaaaaaaattaccccatgtgatgacgcctgcctgtggtcccagccactcagaagcctgaggtgtgaggatcgcttgagcctgggaggtcaaggctgcagtgagctgtgattgtgccactgtactccagcctgggtgacagagtgagacccccttctcaaaaaaaaagaaacactcgcagccaaagcagtttctcaagcttgtccactatgacaaatcacctgaagagctgatggaaaacacagattccccggcacccccatctactcacttggaactgggacagccctggaaatttcactgttaacagtggggtaggaaaggcaaagatcacaggagaatcagagaggatggaggagaaaggaagattccagaaaggaacagagggaaacaggcagcatcagatgcttggagcccagacagcaaaggaggccagtggatgtggcaatggggtcaccacgggtgaccggaagtggagctgttttggtagagccatgagccagatggctgagggtactgggaggatgagcagattggggcagatgctctgcaagtcaggaaagcggagacaggacggagctggagaagtgggcaggtgatgaagactgcttcacagggtgagaaagtttcaaggctgcctggagtcagattaactaagggagaggcgggggtgagagtggggtgggagggttctgagtcctctcttcgccttactgtgtggccaccaagactcactgcatccccaccaggtgcccggggcggctgtgcttccaccatttcacagagggaagacaggtacggagattaagaaccaccctgacgccccaccacaggtaagtcgtggggctggggctgctctgggggcccctcaaactcactgcatctcaaaaccaagctcagatgcaccccttcccttccaagcatggaggggagttcagcacgaaacccttattctccagccttggagtcctccccacatttcccccaacccctgccctgtctcaggcctgacagtcgtatggtctcctacctcccagccccttcccaccactcttgccaacagcctccacaacccaaacccctctgctggcttctcatcaccctggaataaaaccacaggagcccagacagccacactggggacttcttccaaggtcctccaccatctggcctgggcagccccctccactgcgccaacttcctctttcctttcctgaattctgctcttctgcagacacaccatggcggccctggctcagggcctggcctgtgttctagctcttccctctgcccgggactctcctgaggttctcaacaggccccttccctcaggtcgcttcagggatctgcttcaatgtcacctctcgaagagcccttcagagcacactaccatgccgccatcacccgccaccttcttccccagctttcctctcctgcctgtgactgcctgcactgcctgatgcggctgtgtgactcccatctctcccaccagaacgcgcacagagagctgagaccttgtctgtcctatcatctgctgcattgccatatctgaggacgcaaaaggggggctggtcgtagtatgcacgcgctgaatgaacgcctgaactcagggaggagctgctcagaacacaactacctgggccacagaccccagtcccatcaccacctttaggactcagcattcagcccctcactcgggcattcgaggccttcccgatcttccctcctgaggcattctaaatggaacttctcccacaaccaaaccagcaccccacaaagtaacctgacccacactcccctctccctagggaagcgtcaccccagcccaccccccatcaatgtcccatgagacccatgagacataagccctcaggcctttgagcctccctgacgctccaggccagactccagacctggcacagggcctgtgccgctcagcccagaacccacgggcagtaaatatttgttgaatgatggttgtttgggtgtaagcactctcctggcacttgcacagtgctgtgcccactgcagtggctactgacaggcggggcgggacagtgctgaaggccaaatgacctgaggtgagacctggtgtttctggaaagggcaggatgctccggccttaggtagccagaggcagaacttcatgcagtttctccctcagatgtgctccctgggggaacagacctacttctggaggccaggcaggcatgggagtgcgggatgtgagcatgacagctgccacgtggaaaggtcagcccacgtgagcccggtcagccccatttttcaagtggggcaggcaatccgtatgggagtgtgaagtccaccatcttagatgtgggccatgaattcaagatcaccagccgggtcaacaaatggccagttccaattcacactccctgtccctctacttctgacactgtactctcccctcgttgctcactttctacctttacagcgtccagcaaagccctctggagcacttgtggcctgcccaggagtggcttctctctctgtcactccacactccagggctggctgagcctgtgagggtggtggtcagggggacccggagccacaccttgtcctcaccttcgttgtgctgggctcttctcctctcatctcggggtgttctggttccatcaatttttctacaagaggaggaaaaaaaaagggggcatgtattatcgcagagctgtttgcccaagcatctgctaagtattagatttgaaaattatctttgcaaggtaaatccatctgcaaaaacaaaagacatgatactttatgtgcactagagcagcagaaacaggcaaagaaaaaaaacattacaccatgtgcccacttcatgctaactgcccagcttctactccagaaacccctcttccttccatttcaacaccaggccctccaggtgtcccctgcacatacggagagtaagggtgtgtccggggggcgatcgtcctctgtgttcctgtctgaagcacatcctggggcgtcatcatgacgtagaactggcctgcagggagagtggggggttagtggcaaggcagggtgaagtcagaactggctgggggggcttccctccctgctgggcccgttgcctcccccacctgccaatctgacttctactcctcacctccagcctgcaagctctggtctgtggtctgtacggacacagccgtagtatctcccacactggacgctgggaaataggcaaatcgtgcctc

SEQ ID NO: 39 - DNA, 25649 bp, Mus musculus
tctgccgccccctgcaggtgacataccgcgtagtccaggtgactgatggtcagctggacggccagggcgacgcggccggcgccgtcagcgtcgtgtccaccgctgccttcgcgggggggcagcaggctgtgacccaggtgggtgtggacggggcagcccagcgccccggccctgccgctgcctctgtacccacaggtcccgcagcacccttcccgctggtaggtggcccgcgacttatggggaggggctggggagggggaaggcccagggggtggggtgtgtgacacacacatgatgttctctgggctggccggctgtgtaaggtctggtcagagttttgcacaggcgttggatagggtcttttggagttacttttcattgcaaaactggaaaacttcttagaggaaagagtagagctaatgatggttgaatggtgtcagagacgagattctgtacagaatggcacacacagtaggctacgcccttgcctcaccgtatagtaaacaaacaccgataccagtaacaaagatggcatagcaggggtggctaaggatggcctatgtgtactcctccctaggctgtaattcaaaatccattcagcaatggtggcagcccggcggccgaagctgtcagcggggaggcacgatttgcttattttccagcatccagtgtgggcgataccacagctgtgtctgttcaaactacagaccagagcctacaggccggaggtaaggggaaggaagggttctgaggtaaagctagggaaaccatttaagcagttccagcttgacccattactgatgttcgctgcacattccctgcaggccagttctatgtcatgatgacaccccaggatgtgcttcagacaggcacacagaggacaattgcaccccggacacacccctattctccgtatgtgccagtcccattgttggagccagagggaagggagggtttcagggctggtcagcatacagcaggagtggggtatgggttttatgagcttctgcttcggaagtatcagtttaaatttttttcatctatttccaccctctcttcacggggatttgctttgaaagataactgtgaagagctaacccaatggtagcctagcattctgcgaagccctgggttcaatccccagtaccttaaaaacaaaggtgtttgtcaagtctgatagcttggtaaatgctgtcgtttccccttctgctttaggaaaattgatggaaccagaactcctcgagatgagagaagaagagctcagcacaatgaaggtaaggatggcggagtgctcctgggtgccttgagcccattgcctgacatgtccagatgctggagacgtgcatgctgagtggttaggtcagtgctgattggcggaggacggcaagatgttgggaaagatggagggcgtgcattcagtttggccagatatttcctcttgcccgcctatgattttgatttgatttgttggccatcctcttgaagtggtggaccccagatctgcacatggggtttgacctcatgagcaggcttccatttctacctgggcagcctctggccagctgaagccagagcctcctacccttcccggaagctccatgttccaccctgaggtcttttgtcctttagtgctgtcctttggtctcccagccttgataggtcaccactgctaagcacatagcagccctcagtgtaaggtagttctaatacccaaacagccatcactcaacaaatatttactgaccctggatcccaggcagggcagggcaacacagcacaggccctgtgccaagtctgcagcctggcctagggagtccgtcagaattgtgaaggacagcttgtggctaagggattgctaacgtgctgaagtgaggtcaccccaggaagatttttccaagaacttggccagtagagggacacacaggctgatgaagagtcaagttctttcaaggggattgtttgcttgttgctaaacttctgtgcacactctttaagaatgagccagggtgaagcctcagatgtctagacaaggccctaagacttaggagtgctttgatgtcaatggtgggggccactgctgttctaagtggcaagttcagactttcagccaataagtacatacctataccagctccccatctagacctcaagtacacagagagacaaggtctggactctcaccactccttggtaggagacaagctgcacatattgccatgtgcccccagcatgccggagtactggaggagaggaagctaagcaagaggagcagacttgtcaacacgagcttcagaggcctctctcggggatctggggacagcacagacaagtgtctaggccaggggcagacacacttttaagtttgaggaagagcagaatggggaagggaaagaggaagcttcatcctagtgctgaggggaaacctaccaggctggctcacgcggggtctctaggagctcttccctaattggttttcctgatcctggggatgtagtctgaccacggggaaaccctcatggggcctgtgtgtggatgcaaactgataggatgatgaggaaccgaaacccaagaagtctgtattagtcctgtatctgggaagggagaggcctggtctgaggtgtcgggattcagaggatgggcatacggagccagattcggggggatctgctaggttgaggcctaatgcctaggtcaggtggctttgaaggaaagggtaaactgagccttgaggttgttttggatgtgatttggggacagttagatgtttctctagtgggttattcaggctgtgacagctcctccacccaactcaggtctggttttccatctttgcagctgtgttgtctgatgtaaatgatagtaacacaaccctcagtttccacaaaccctggcctcactgcagctgcccgcctcggagtggcctcaggctgtggcagcctggctagcaggccgggaagggtcactgtgcctcacccggggttgtttttcacccataacctcgcctctcagtccaaccctctggcgtctaacctgtaaaaggtttgaacctccacctacctgtcctccgtcctccttggagcttggcagtctagcctaccaggctggccccattgaaggtcacctgtgacaacgtcattgccaaatcttctagcttcttttccagtctgagctccacacatctgctgtgactgctagcctcaccccacctccacccttggggatgttcattgtttgtccctccctccatccctgcaacagcctgatattcctcacaggctttccaggctgagcctgagggtcaccgcaaggtccctgggctgtctttacagagaggttctcataaatgaggagcagcatggagtgtttcttaaggcctgggcctgagttcttttccatttattgtaagcgccggccgcaggtgcaccgaagctctagttgtcacacccctaacatccccggcaccagagtcttttgttccttttatccaaaaaggtgatagttgcttcttcccatcctcttggggcttggcgcggtccaaaagatgcagtttttacttcctggtcatctgaaattgccactcagaatcttggcatgtctagctgtccatgagacttctcatacctgtgttgtccttatagcacacactgcctgccttcctgagaggccccaaaaatgctccctgccagaaacaaggcagggtgactttcagagctctaccctttccttcccagggctctgtgctgacaagagtctccatgtagcttctccgtctttttcccctgtggtttttctgtagggtgggttgcagagggtactagcaggggcctgaggaaactgcacatttgtaccaagggacctgtcgggagcctgaatgaaaggggtggctggggagcctgttgttaatggtgatagcagtgcaggtcttgccatgaaacctgtctttaagtgctgggctggacagctctttctgctttattggttttcactgtaagagggtcctgcttgggttcttcattatggtggtgcatggggttttgccttgtggtttgttttgttttgagttctttgtttatggcgctgggactataacctagggcctggagcatgctaagaaagtgctctgccagcaactatacccctagagtctcactgtttatccggactgatcttgtacttagaagcctcctgcttccgcctgcctagtagctgggattaccaaatctttcttttaaaagatgaatatcatggtatgctcttgtaatctcaacactggtgaagctggggcagaatccagctgggctgcataggaagacactgtcttaaagaaaaaataaacgaacaaaccttttcctgatgcaaaaccagagctacagacttctgactgtagacttcaggcccatttggacaaataggtttttttattctgttttgttttttttgttttggttgtttttctaatttgattctcgctctctttttttcttgtaataaattattatttatattcactttatatctagaccacagtccccctccctcctctgctcccagatccctcttggcagatcacacacacacacattgcccctccttgggtaccaccccaccctggggcatctagtcccagcaggactacatcctctctcattgaggcccaaccaggcagttcaggtagggggaagggacccaaaggcagagaacagagaccaagacagcatcccccccccccccgccccctacacacacacttgttaggaggcccgcctgaagaccaaattgcacatttgccacaaatgtgtaggggatctagctccatgctccctagtttgtagcccaggctctgaattcccatggtcccaggtcagttgactctgggtcttcctgtggtatccttgacccctctgacttgctcacttctatcccctactcttccacaagactccccaaactccacctgatgagtgtggctctctgcatctgcctccatccactgctggatgaagtctctcaggagacagttatgctaggctgctgtctgcaagcacaagagtatcattagtagagttagttagttaattagactctctcacatgggatgggtctcaagtcagggcagtcattggatgactgttccctcagtctctgctccatctttatccctgcacatcttgtaggcaagacaaattttgggttaaaggctttatagatagatgtccccctgcctcttctggaagtcctgcctggctacaggaagtggccctttcgtctctacatccctctctggtaggaatctcaactagagtcaccccatagacgccctgcattctcccaacgattcccattctcgctcccagcccttgcctgcccactcctctccccacacctgactgcctccttgccccctctcctacccagttctctctttccatccacctccaatgaccatttcatttccccgtgtgagtgagattcacacatccttccttgggacctccttattatccagtttcttctggtctgtggatcatagcttagttatcctgcactttatggctaatgttcacttatcagtgagtacataccgtgcatgtctttctgactctgggtcacctcactcaggatgatgttctcaagttccatccattgtctgcaaagttcataatgcctttgttttcagtagctgagtagtactccattgtgtagaagtgccacacttcctttctccactcttcaggtgcgggacatctaggtggtttccagtttctggctattgcaaataaagctgctatgaacacatgtgagcaagtgtccctgtggtatagtagagcatcttttgggaatatgcctaggagtggagtagctgggccttgaggtagaattattccccgttttctgagtaactgccaaattgatttccaaagtggttgcacaagtttcactcccaacagcaatgtaggcgtgttccccttgctccacatttcaccagcatctgctgtccctcaagtttttgatcttagccatcctgactggtgtgaggtggaatctcagggtcattttgatttgcatttccctgatgactaaggatgttgaacatttctttaagtgcttctcagccattcaagattcctgttgagaattctcttttagctctgtacttcattttataattggtttatttggtttgttgatgtctaatttcttgagttgtttctgtcagatgtagagttggtgaagaccctttcccaacctgtacactgccgttttgtcccagctggcagagttgtttgccttacagaagcttttcagtttcatgggattgagcaaatgttgatattatcatttatatcaaaatattttccagttctgtgattttctctttgaccctaggttgttcaggaagcatgttgcccaatttgcagacatgtagtagagctctggatctcatttttgtttgatttctcagttctctgtagtcagaacacagcagacatggttccagttctttgagaaacttaacctgggctctgtgagaggacaagcctggagaaggagccacgtgaaccatggtgggtggtacctgccgctgtgaaagggcctctcctctacagggaggcagcttgactgagggagccagggggacccagcctcctattttcttgcttttcttggtgatggagagaggcgtgctaatggctcctgctcctgctcttcctttggtcctggaaggttgtgctatgaggtgtgggggttggttggtttgtttgttttagaaacagtttttctatatggccttggctattttagaacttattctgtaaagcagactggtctcaaactcaccaatatccgccctgcatctgcctcctgagttataagattaaaggtgtgtgctaccacacatggctgtgagaagtgttttaagtgcttttttctaactacagcgcttctctgatctaactggcttctgctggtccagcttgtcctaatggtttttacaagccagggacctaacaatgttaccacctggacacaggctatgaacacacacatacacacacacacacacacacacacacacaagtgtttattgtctttcctgtggtcctgatcttactttccatctgccttcaggtcccttctctctgaaacccaagtatttcttgtctctgggaattctgattgtgggctgtatccagaaagcattgctgcaccctgcccttctttgggcatgtgtactgtaggtacagggtccctattgtatatcacttcacagtggcatcatgagtaccagccaggacagagccaggattgagtccactggatgcagccacacacctctacattttgcaaaattaaatgtacacaaaggaactctgccttgcacatctactcttagcctgagggttgaggtgtgtctgtcagaggaaggtcctgcctggggcccaagccctagaagagaggaaggtggagaactactcagtgaggcctgtagaaccctagagatagagcacccagcaagggactacagtgggtgtgcttctaggccttgactagactcaactatgctgctgcagtcctccaccaagttcccaaaggatggttccaacttggtggtgacataagtgagttagcccagagcatagtggacacataccacagcacttatgaattcagcatgaccaagttgttgtcaggacattggaaagatggcacaggaagaatcattgctgtgaaaaggatagggcagaggagaaatatgaagtcactaaggccaaattgggaggcacctgacagagtgaccaagcagaggcagtaggctccacctgttcccagaccctgaagtcccttaagggaatgggcaaggtgtgaggacagttctgaagagagaggtgactgccctcacccacccctctcacttaaggctgggccaattttccacttttcccgacctcatgaggaaatgccacttgctgtttcccacagcccatcaggctcagggcccagctcccctcagacgtagccagccactgcagccctcctgacaagaggatggagggctatgagatttggggtgccaggtcttgtatatcccagcagtaggaggactgtgcctgggggtgatgcagggctgggaagccttgctagagcgagctgtggaactggctccagtcaggaggctcctggcaggtctcctgagcatacaacaagccagaggaaagcacagctgtctgccagacagttgtcactcagcatagctaacagtaagaggtatggcctctaaggtatggtgttcacattcctgggcgaggtgaagtcccctgggtcagggactcgggcatagctcttgtatggagactggagcttgccaaggctgtggagaaggatttgaaacaggggcgagccatcgtcggattttcacattaaagatgaaaaggagctgggatggagctcagttggtaaagtgtggccttccttcccagcactgagtaaaacttcgcaatggtggctgcttaaggaatgtaagaagttcagatcacccttggctacatactttgtgcccgacctgccctacatgacacaattcccaagggaacaaaaaaataaaaaagaatgaaaaaagcaaaattagagaagccagagtttgtgaacaaagagaaatgagacataagggttacaggggccgtgggggtgctggatcctgcatagggggtgatatacaagttccagacctacattttcagtctatggtgtgacactgtgtgcagcagtcctcgtggctttctgtcctgacagcatggcacttgagggttgccacttgactgggctcctcaggaagcagtgtggcccatgaggagacagcagccggggtcctcgcttagcaacatgactgggcagcctatgccatcctagtttcagtgagtctgtccatagaatgctgattttactgttttcctgcagtggaacggagaaggagggacaagatcaacaactggatcgtccagctttccaaaatcattccagattgtcatgcagacaacagcaagacaggagcagtaagtgtcctcagtctcttccagaagtcgggcacaggagccgagctgttctgtcctcctgactcttgtctgccctccactccagagtaaagggggcatcctgtccaaggcttgcgattacatccgggagctacgccagaccaaccagcgcatgcaggagaccttcaaggaggcagagcggctgcagatggacaatgagctcctcaggcagcaggtgggtacaggcctggaatccacgggggcccagtgtgccaaggcctaaccctggctcccgtgtcccccatggtgcctgcagatcgaggagctgaagaatgagaatgccctgcttcgagcccagctacagcagcacaacctggaaatggtgggcgagagtacccggcagtgatgcccgccggctcacccttcagctgctgtcggcctctgctgcccctcccccagcccttagcacagagagggagatgcccctccccaagctgcgtttttttatagtagatttttaacaaaaacaaggagacataatgcatttctgttgatacgttgcccactaccctcctccatgcgaaaacgatgcccacctgcccatctgtccatcagcctcccttctcggtcctcaccagcccatcacttatagtgggctcatcaggaggagcaggggaggaggacagaggccccgctgcccgctgcctccttggtctctagaggtattgagacagggtgctcatgggaaggagggagctttggggatgcgggccttccctggggcttggacctttgcagggaggccatgcccgccacccctcttgttctggatccctgctcccctctgggtgtgtgggtgtgtgtgtacgtttgggtgtgtgtgtatgcgcgtgtgtgcgtgtgtgtgttttaattttctttatggaaaatggacaaaaaatagagagagaggtatttaactgcaataaactggccagtgtggccccgccttgtctgtctgtgtgtccatgttgggcatggggttgggtagggttcctagggtctccctgatatctaagctacagttatactgtagctgtgtgacaatggctgggggcattaactgaggccctggggtgctgattaggggtgtgggagctgaggtcaaggacatacccctgctgttagaggggaggctggagtatccctgggctctggggctgaagccctccctctgtaccagccaatgatgagggctggccttgagccccccacccccaagagagggcagatggccagaaagccaggcttggcccggcagtctgtcgcctcaaattgtagctctggcgcctgtgctgtgacccttgtggcccttggctgatgatgaaacctgtcctgagaagccacagtgatggttggcggggtcggggaataccatcatgtccccaagagattggctcaccattcccaggatggaggcctgcgcgtcaggttccctttgctacactttgtaccttgcctcaatctaagtactcctgttggcccctggtgtcttgagaaccctgtctcgagctggagagatggctcatcagttaagagcacctgctgctcttccataggtcctgagttcaattcccagcaaccacatgatggctcacaaacctctgtaatgggatccgatgccctctttagtgtgtctgaagacatcgaccgtgtactcatataaattaagtaaataaaacttaaaaaaaaaaatgaaccctgtctttggccttaccacttccaaaagtcctctttgaggaagcatgtggaacacatgaacagcccaatgagcagcaacagaggggtagaagccttcccaggttctggacagaactgactggatgctccctgtgtaactcaggaatgccgtccagtagtttatctctggagtcaaagtttgataatatctcaggctgctcataccaaggggtccaggtaatagaaagagcaccacacaggctttagtagtactccaagaactagctataaaagccctggtgtaggctgtgtaccaatctctgtggtatatgttgtccaagtggcatggggaggttctggcataatcccactgcacttggagctgagagggggcacagtctgttcctgctaagccaagtgtcacacaatactgtgtcccctgtgcttagagggaaaccatttgaggaatacatcgtcaagccagacccctgcatcagtgactggaaggcaactttcagcataaacaactgtagagcccaggagggagtaggcagccacttagaggccaagtagcaccagctgttaacacaaaagtgagttggcaccggtggtaaagacacagaatcagtactcactgccatgtgaaaccagtgtgttttttatacacgagcttgtgaaatgcattggctctgcctatgattagtgactgctgcctcgggaggcagaaggggaatccaacatgacagctacatcatatggtcttcacagtggtctccacggtggactccagggctaatgctgacacaaactcatgggcctaaaatgctgggatgcaccctgcacatgtgtacgacattgctgggtccttctgagaaacccagtgagtaacagccatactgaaggcactgataggggtaaaggtacagttcttccactcaccaatccaatcactgtttaggggaaagaaggggaatttttctgagagccacagtgtgacatcacaggtggctggctgcaggcttgtgtccctggttctgtctgccccaccctctggatgcacctctgctggctgtaggtgacacaaccctgtcccctgtcactgttcccgcttatctctcccgcctgtttggcgccactattttcttggaaatgagtcagagcaaaatgggggtgggtgaggcgcaggtgaccctcctcccactagtcccataaaaaggactgggactggctcctagacagccaccacacaagtccttagactgcacagcagaacagaaggcatgatggcactcagcactcggacccaggctgcctgtctcctgcttctcctccttgccagcctgagcagcaccacctatctccatcaacaggtgagcaccccaggcccattgtggtgggagagccaggtcccaggcaggcaggagctgctcaccactgagtagttagaatggctcaggagtgatggcagctgctgacaaggaagagggtggtccttagtgggagctgggaagctgcacaggtgtccttgaatagctactctgttgtcctactgtggaaaatgaagcatggtgggagccaaacaaaagtgttccttggctgtcccaccccgtcagggcattctttaagcagcctttacatgagtattttataaagaattactgtggatagtacaaaagacaatgggcagaaaaactctaatgaggaaggaccagaggtggggctaagaggctgacagccaggcaaagtattctatgagaaaatgatacagaagtcgggcagtggtggcacatgcctttaatcccagcatttgggaggcagaggcaggtggatttctgagtttgaatccagcctggtctacaaagtgagtttcaagacagccagggctacacagagaaatcctgtctgaaaaaaaaaaaaaaacaaaaaaagaaaaaaaaaatgatacagaagggtctggagagatggcttagctgttaggaacatttgatgcttgtgcataggacctagagtcagttcccagcacccatgtggtggatcacaaccatcctgaactctacttccagggtacctgatgccttctgccctagatggcagtcagcagtaagcatgcatatgatacacataggcactcaaggcaatcacaagacccttggggactgtagggtctgataagtgaagccagtgttggcaataaagggctgtagaggttctgctgtgccgagctttgtggacagctgtgcagatgatgatctgtcctggaaagccacaatccagatgaatgtgctataagcctttgtgctatggggtgacctggttataagagataagatgcagggaaaactgtccggagtgtgcaaaagcaaagaaagtgggtgcttttaggagcatccaaggaatggtgaggggacacagggcagtaggagcccttctagaaattctgtctaagcacagtccctaaatctctggggagaagctggcagagaaaagtcaggaagctatgccgggtactccacaagattcaatacctcttctgctttcacagatgagacagactacagagctgcagcctttgcacggggaagaaagcagggcagacattgcggtaagagcatctgggactccctccctgatccccagcctctcccatgcccaagctaggctgcttacctctctttctttacacagataccaatgcagaagagaaggaagagagacaccaacttccccatctgcatcttctgctgtaaatgctgtaacaattcccagtgtggtatctgttgcaaaacatagcctagagccacatcctgacctctctacacccctgcagcccctcaaccccattatttattcctgccctccccaccaatgaccttgaaataaagacgattttattttcaaacctaggtgtctaggttttttaccctttttttttcttgccaaagaaatggactttttgcaagccctgctgaggacaggcactgagctgggtttacaggtctatgtacaatgaggctgctggaacgctggggaacagcatttcttgtctgttcttcactttgcttcttatttcaaaagatctggagtttatgtagcagcctggaaggaacctgaaaagactttccttagtctttttctgtctttcattcttcttaaaagttttttacaaatgtgtgtatgcatgtgtgtgtgtgtgtgtgtgtgtgtgtgagagagagagcacatggaagagccagagtagccccagctgatatgaaacttgctttgtcaaactcagagatcatttgcctttgccttctaagtcttggaatttaaggtgtgtgctatatctgccatcagtttatctttcctggttttttggatgtttgtttgtttgtttgtttgtttgttttgagacatggtttctctgtatagccctggctgtcctggaactcactctgtagaccagactggcctcgaactcagaaatctgcctgcctctgcctccagagtgttgggattaaagaggtgtactaccacgcccggatcctttctttttattgatttatatttaattctgtgtgtgtatgtatgtatatgtttgtatatacatgtgtgtgtgtgtgtgtgtgtgtgtctgtgtgtatctgtgtctgtgtgtgtgcatgcttgtgcacgttttggtttttgatacagggtctctccctgaacctggaacaaataccccataaactgtataagcatgactctaggatcaatctgtctctgtcacagctttgtaatgtggatgctagcactcagcctacacagcaagtaatttacccactgagccttctttcaatctacacttaatagggacactgatacacaattccctatcgtcccggcttgtacaatttcaacagccctaatgatgagaaaaaacattggtcacttggcctctgttggatcctggaagagatatattagtctaaatacatgacaactgggagctggccaccatgtccagaggcatgcaaagaaggacttctaattttgtcacgatagtctggaaagcctgtttgtgagatatactagtactttaaatattagcaactaagccaggtattgtagttcaaaccagtagcaatgacattaaggagttcttctatcaagtgctcttctgtcccccgaggactgataatcaaacgcaggcctcacatagaacagccagatacttacacaactgacatacaccctaagcaaggagagagagatttatttatttatttatctatctatctatttatttattgtaggcagggtcttgtgtaatctaacctggtcttggactccctaagtagccaatgatgaccttaaacttctatctttctgcctctacctcttgagttccgggattatcagctagctttcgtgcagtgcctcgacacacacccagggcctcttgatttctagcaaccgctctaccatctctatccctatatctttatccctggtttgtgtttgagaaagggtctccctctatatgtatcccaggctggcttttcaaaacttgctgcaatcctcctgcctcagaacaactagaattcaaaaagtctatctttgggaccaacttaaccaaactagaagccagcaactacctccccaccacatccttttacatcagaggctgatcatcagaggaagctgaaaagaacaaagacaccccacctttgcctactcttttacaaccttgaaacttggtttcaaggacaccctggtttctcttggtggctttgtttaatggaacaaacatgggcttgattgggcactgtcaaaccagaggtgctgatcataaggctaaggctgttagggttgagtccagagacaaggagcatacacattatggcagaagcaaaccctcccccaacaacaacaatgaggtcatagcccctgattatatgcgaagacactcacacatagcacaacccatgttctggaaaatattggaccttatgaagagctcagccccctggcttgctccactccctatcttgctctgccccctgacttgctccaccccctgtcttgctccaccccctgattgctccaccccctatcttgctctgccccctggccctttcacactcttcagaagtccctctcctctcacttacagttttaggatatgacttgagtatttcagaatgaaggtgatccagagaagccagtcagtcacccctgggtgaataccggtcaccatattacctagattcgcagtttgctcaacccactggaaggtcctttttcttaagactcaagcagcctgggagttgtaggagacaagggccagaagcaagttaggggggtcctgaatgaagtcagaggggcatggagaagaccctgctatggtcagcttggctctccacagcactggtgggtgcttctgcctgttgaactcagtcaaggagaagagtgtagatttgttttgaaaactaacaaaatgctcccaaatgtgaacaatcagtacagacaagggggaagaaaaggtctctctcactccttattttgttttgaaaatagtttcactgtagccccagctgtcctggaacttgctagtagattagggggctggagaaatgacccagcagtgaagagcctgtactgttcttccagggtctggagtcaggcttccagcatccaggtcaggcagctcacagccacctctaactccagctccagggtgtctgaagccatctcctttgaaactcctctgccaagagggcatagtgtaggaagaaggaaatgtacagactgaagcccaggagaagaaagataaggccgagggagattagcttgtgcacctgcgaaggctggaggagcaggcataagggatgttaagaccaggaatctgaaggccaagggctgcttcaggttgttggaccctctgctactgttggtaataagtctcagtgcatctgagacgtcatcactgttcttgctgagaccacccgagagactgacttccttcctcacaaccaaaacagtcctgctggccctctgccctgcactgcgggattctggagtcgttctgttctcacttgtggccgagtttaacttatgtataataaaccctcttcctcactgtctcaaaaataaaagggaaagaagagaagagaagagaagagaagagaagagaagagaagagaagagaagagaaagggaagggaagagaaaagaagagaagagaagagaaaagaaagggaagggaagagaagagaaaagaaagggaaggggaaagggaaagggaaagggaaagggaaagggaaagggaaaaagaaagggaaagggaaaggaaaggggaagggaaggggaaagggaaagggaaagggaaagggaaagggaaagggaaagggaaagggaaagggaaagggaaagggaaagggaaagggaaagggaagggaagggaagggaaaggaaagggaaaaaggaaagggaaaaaggaaagggaaaaaggaaagggaagaaaaggaaaggaaagaaaaggaaaggaaagaaaagaaaaggaaagaaaaggaaagggaaaaaggaaagggaaaaaggaaagggaaaaggaaaggaaaaaggaaagggaaaaaggaaagggaaaaaggaaagggaaaaggaaagggaaaaaggaaagggaaaaaggaaagggaaaaaggaagaggaaagaaaaggaaaagaaaaggaaaaggaaagaaaaggaaagaaaagaaaagaaaagaaaaaaagaaaagaaaagaaaaatgaagtagggcagtggaggtctgcctttgaaggttcctggtcttctaagattgatggtggtgaccaaccattcacagggacctctgagaccataagctaaaacctatccttcctccggttagctgtcatcaggggtattctgtcacatcggccgtagtgaccactatatagcattactgattacactcaatacctatggaaattcctctctcacttctggacacagttctccagaaggtcctagaagtgaggatatgaaggagagggattacagttttagtgttcaagcctgggtagtggtggtgcacacctttgaactaagcattcaagagggatagtcatgcaggtctcagagttccaggccagcatggtcttcagagtgagttctaggcctgccagttctacacagagaaaccttatttcttgaaacaaacaaaaccaaaacaacaactttggtgtgtatcaagggtggatcttatacaaacctattcaaatgtttactgctgagccccagcccagcgtttcccattcagtagatgggcgaggcatagaagttgttggttttgagaaaaggtctcagtctgtattcctggctagcctggaactcactatgtacaccaggttggcttccaatttatattgatcctcctgcctgtacatattgactactgaagttaaaggcttgcgctgccatgttcggcttgctttattttgttttatagggtttctttttcattttcgttccgatgtgtatttgtatgagtatctgcagcatgtgtgaaggcgccttcagagagcagaaggcggcactgcgttctctggagctggagctacaggaggctgtgaactgaatagctaacgtgggcactgggaactgaactggaattctgtggaagagtgttacatgctcttaagcaccgcaccacacacacacacacgcaccacacacacacacacacacacacacacacacacacacacacacacacaccccacaagtgtttattgtctttcctgtggtcctgatcttactttcaatctgcctggggtcccttctctctgaaacccaagtatttcttgtctctgggaattctgattgtgggctgtatccagaaagcattgctgcaccctgcccttctttgggcatgtgtactgtaggtacagggtccctattgtatatcacttcacagtggcatcatgagtaccagccaggacagagccaggattgagtccactggatgcagccacacacctctacattttgcaaaattaaatgtacacaaaggaactctgccttgcacatctactcttagcctgagggttgaggtgtgtctgtcagaggaaggtcctgcctggggcccaagccctagaagagaggaaggtggagaactactcagtgaggcctgtagaaccctagagatagagcacccagcaagggactacagtgggtgtgcttctaggccttgactagactcaactatgctgctgcagtcctccaccaagttcccaaaggatggttccaacttggtggtgacataagtgagttagcccagagcatagtggacacataccacagcacttatgaattcagcatgaccaagttgttgtcaggacattggaaagatggcacaggaagaatcattgctgtgaaaaggatagggcagaggagaactatgaagtcactaaggccaaattgggaggcacctgacagagtgaccaagcagaggtagtaggctccacctgttcccagaccctgaagtccctgaagggaacgggcaaggtgtgtggtcagttctgaagagagaggtgactgccctcacccacccctctcacttaaggctgggccaattttccacttttcccgacctcatgaggaaatgccacttgctgtttcccacagcccatcaggcgcagggcccagctcccctcagacgtagccagccactgcagccctcctgacaagaggatggagggctatgagatttggggtgccagggtcttgtatatcccagcagtaggaggactgtgcctgggggtgatgcagggctgggaagccttgctagagcgagctgtggaactggctccagtcaggaggctcctggcaggtctcctgagcatacaacaagccagaggaaagcacagctgtctgccagacagttgtcactcagcatagctaacagtaagaggtatggcctctaaggtatggtgttcacattcctgggcgaggtgaagtcccctgggtcagggactcgggcatagctcttgtctggagactctatcttgcccagtctgtggaggaagattttaaacaggggtaagccatcatcagattttcacattaaagatgaaaaggagctgagatggagctcagttagtagagtgtggccttccttcccagcactgagtaaaacttcgcaatagtggctgcttagagaatggaggcaagcaggtcagaagttcagaatcatcctcggctacatagtttgagccaagcctggtctacatgagactatttccaaggggaccaaaaaaaaaaaaagaaaagcaaaattagagaagccagagtctgtggacatagagaatgagccataagggttacaggagccgtgggtgtgctggatcttgcataaggggtgttttagtaagggtttcaattcctgcacaaacatcatgaccaagaagcaagttggggaggaaagggtttattcagcttacacgtccacagtgctgttcatcaccaaggaagtcaagactggaactcgagcacggcaggaagcaggagctgatgcagaagccatggagggatgtcctttactggcttgcttcccctggcttgctcagcctgctctcttattgaacccaagactgccagcccagagatggcaccacccacaaggggcctttcccccttgatcactaattgcgaaaatgccttacagctggtctcatggaggtacttccccaactgaagctcaaccccagcctgtgtcaatttgacacatcaaaccagccagtacaattgaccccttgtcaacttgacacacaaacacatcactagtaagcctcaactcttagttcttattcatccccaagatctaaacaactttaaaagtcccacagtctttacatatcaaaagttcaatcttttaaaaaaatccattttcttttaaaattcaaagtaccttaaaattcagtctcttaactctaggcttcactaaaaaaacttccttcaagagggaaaaacatcagggcacagtcacaatcaaaagcaaaaattaaactccaactgtccaatgtctgtgatccaactcacgatgctctgggctcctccaagggcttgggtcacttctccagccatgccctttgtagcacacaccttgtcttctaggctccagctacctgtactccactgctgctgctgtccgtggtggtcatctcatggtactggcatctccaaacactgctatcttccgcaataactaggcttcaccaacagcctctcataggctctcttcatggtgccaagcctcaactcctttgcatgaccccttcagtcctgggccatcaactgcaactgaggctgcaccttcaccaatggccttccgtggcctctcacagtgcctagcctcagctgctctgtgtgatcccctcatgccttcaaaaacagtaccacctgggtgactcttacacattaccaagtcctgctgcggcacgaggtacaactttggttctctctggaacacagcctcggtgctctcagaaaacacttccaagaagatgtcacctcaatgatgctggtctctgcttaatcaccgctaatttcttagctccagctaaccagaatcaatagtcccagtaaggaaaagttttcactttagtagttctggtatcttgttaatcacagctgattcttcagccccagctaaacagaaccacagaatcttcacaatccaaaatagcaatggccctgaaaagagtctttaattttccctctgagatttcacaaaccagacctccatcttctgcactgttctcaacattaacatccaagctcctacacaacgtctgacagagcacttaataccgatcttctagcccaaagttccaaaatccttccacagtcctccccaaaacatggtcaggttgtcacaggaataccccactatgctggtaccaatttgtcttagtcagggtttctattcctgccctgttgggagccgcgcccacattcgccgttacaagatggcgctgacagctgtgttctaagtggtaaacaaataatctgcgcatatgccgagggtggttctccactccatgtgctctgccttccccgtgacgtcaactcggccgatgggctgcagccaatcagggagtgacacgtcctaggcgaaatataactctcctaaaaaagggacggggtttcgttttctctctctcttgcttcttgcactcctgctcctgaagatgtaagcaataaagctttgccgcagaagattctggtctgtggtgtttttcctggccggtcgtgagaacgcgtctaataacaattggtgccgaattccgggacgagaaaaaactcgggactggcgcaaggaagatccctcattccagaaccagaactgcgggtcgcggtaataaaggttcccgtaaagcagactgttaagaaggattcaactgtatgaattcagaacttttcagctggggaacgagagtaccagtgagtatagctttacgaggtaagcctggccttgaactttctaaggaaattcaagacagtctatcagaagtaaagtggaaaatgtttggccttgaattttttctagtgttagaagcccttttgttccttttcacatgttatcaagtggttaaggcagggaaaattctagaggaaattcaggacaagctatcagaagtaaagtggggagagagagtaggaacaaagaggaaatatggtacacaaaataagtatacaggcctttccaagggtcttgaacccgaggaaaagttaaggttaggtaggaatacctggagagagattagaagaaaaagaggaaaaagggaaaagaagaaagatcaattagcggaggtctctaggaaaaggagcctgtgctcatcgctggatgggctcggggagccagctcttagtagctctgaagcagatgaagaattctcctctgaggaaacagactgggaggaagaagcagctcattatgagaaaaaagggtaccagccaggtaaagtgctagctaatcagttaaggaagccaaaagcggctggcgaaggccagtttgctgattggcctcagggcagtcggcttcaaggtccgccctatgcggagtccccgccctgcgtagtgcgtcagccctgcgcagagaggcagtgcgcagagaggcagtgcgcagactcattcattcccagagaggaacaaaggaaaatacaacaggaatttccggtctttgaaggagccgagggtgggcgtgtccacgctccggtagaatacttacaaattaaagaaattgccgagtcggtccgtaaatacggaaccaatgctaattttaccttggtgcagttagacaggcttgccggcatggcactaactcctgccgactggcaaacggttgtaaaagccgctctccctagtatgggcaaatatatggaatggagagcgctttggcacgaagctgcacaagcgcaggcccgagcaaacgcagctgctttgactccagagcagagagattggacttttgacttgttaacgggtcagggagcttattctgctgatcagacaaactaccattggggagcttatgcccagatttcttccacggctattagggcctggaaggcgctctcccgagcaggtgaaaccactgggcagttaacaaagataatccagggacctcaggaatccttctcagattttgtggccagaatgacagaggcagcagagcgtatttttggagagtcagagcaagctgcgcctctgatagaacagctaatctatgagcaagccacaaaggagtgccgagcggccatagccccaagaaagaacaaaggcttacaagactggctcagggtctgtcgagggcttgggggacctctcaccaatgcaggcttagcggccgccatccttcaatctcagaaccgctccatgggcagaaatgatcagaggacatgttttaattgcggaaagcctgggcattttaagaaagattgcagagctccagataaacagggagggactctcactctttgctctaagtgtggcaagggttatcatagagctgaccagtgtcgctctgtgagggatataaagggcagagtccttcccccacctgatagtcaatcagcttatgtgccaaaaaacgggtcatcgggccctcggtcccagggccctcaaagatatgggaaccggtttgtcaggacccaggaagcagtcagagaggcgacccaggaagacccacaagggtggacctgcgtgccgcctccgacttcctattaatgcctcaaatgagtattcagccggtgccagtggagcctataccatccttgcccccgggaaccatgggccttattctcggccggggttcactcaccttgcagggcttagtagtccaccctggagttatggattgtcaacattcccctgaaatacaggtcctgtgctcaagccctaagggcgttttttctattagtaaaggagataggatagctcagctgctgctcctccctgataataccagggagaaatttgcaggacctgagataaagaaaatgggctcctcaggaaatgattctgcctatttggttgtatctttaaatgatagacctaagctccgccttaagattaacggaaaagagtttgaaggcatccttgataccggagcagataaaagtataatttctacacattggtggcccaaagcatggcccaccacagagtcatctcattcattacagggcctaggatatcaatcatgtcccactataagctccattgccttgacgtgggaatcctctgaagggcagcaagggaaattcataccttatgtgctcccactcccggttaacctctggggaagggatattatgcagcatttgggccttattttgtccaatgaaaacgccccatcgggagggtattcaactaaagcaaaaaatatcatggcaaagatgggttataaagaaggaaaagggttaggacatcaagaacagggaaggatagagcccatctcacctaatggaaaccaagacagacagggtctgggttttccttagcggccattggggcagcacgacccataccatggaaaacaggggacccagtgtgggttcctcaatggcacctatcctctgaaaaactagaagctgtgattcaactggtagaggaacaattaaaactaggccatattgagccatctacctcaccttggaatattccaatttttgtaattaagaaaaagtcaggaaagtggagactgctccatgacctcagagccattaatgagcaaatgaacttatttggcccagtacagaggggtctccctgtactttccgccttaccacgtggctggaatttaattattatagatattaaagattgtttcttttctatacctttgtgtccaagggataggcccagatttgcctttaccatcccctctattaatcacatggaacctgataagaggtatcaatggaaggtcttaccacagggaatgtccaatagtcctacaatgtgccaactttatgtacaagaagctcttttgccagtgagggaacaattcccctctttaattttgctcctttacatggatgacatcctcctgtgccataaagaccttaccatgctacaaaaggcatatccttttctacttaaaactttaagtcagtggggtttacagatagccacagaaaaggtccaaatttctgatacaggacaattcttgggctctgtggtgtccccagataagattgtgccccaaaaggtagagataagaagagatcacctccataccttaaatgattttcaaaagctgttgagaaacagtaagaaacccacttaaaaatgggattgtggtatatactgatggatcaaaaactggcataggtgcctatgtggctaatggtaaagtggtatccaaacaatataat

(The sequence listing continues in the following parts.)

1. A single stranded oligonucleotide having a sequence 5′-X-Y-Z, wherein X is any nucleotide, Y is a nucleotide sequence of 6 nucleotides in length that is not a seed sequence of a human microRNA, and Z is a nucleotide sequence of 1-23 nucleotides in length, wherein the single stranded oligonucleotide is complementary with at least 8 consecutive nucleotides of a PRC2-associated region of a target gene listed in Table 4.

2. The single stranded oligonucleotide of claim 1, wherein the oligonucleotide does not comprise three or more consecutive guanosine nucleotides.

3. The single stranded oligonucleotide of claim 1, wherein the oligonucleotide does not comprise four or more consecutive guanosine nucleotides.

4. The single stranded oligonucleotide of claim 1, wherein the oligonucleotide is 8 to 30 nucleotides in length.

5. The single stranded oligonucleotide of claim 1, wherein the oligonucleotide is 8 to 10 nucleotides in length and all but 1, 2, or 3 of the nucleotides of the complementary sequence of the PRC2-associated region are cytosine or guanosine nucleotides.

6. The single stranded oligonucleotide of claim 1, wherein at least one nucleotide of the oligonucleotide is a nucleotide analogue.

7. The single stranded oligonucleotide of claim 6, wherein the at least one nucleotide analogue results in an increase in Tm of the oligonucleotide in a range of 1 to 5° C. compared with an oligonucleotide that does not have the at least one nucleotide analogue.

8. The single stranded oligonucleotide of claim 1, wherein at least one nucleotide of the oligonucleotide comprises a 2′ O-methyl.

9. The single stranded oligonucleotide of claim 1, wherein each nucleotide of the oligonucleotide comprises a 2′ O-methyl.

10. The single stranded oligonucleotide of claim 1, wherein the oligonucleotide comprises at least one ribonucleotide, at least one deoxyribonucleotide, or at least one bridged nucleotide.

11. The single strand oligonucleotide of claim 10, wherein the bridged nucleotide is a LNA nucleotide, a cEt nucleotide or a ENA modified nucleotide.

12. The single stranded oligonucleotide of claim 1, wherein each nucleotide of the oligonucleotide is a LNA nucleotide.

13. The single stranded oligonucleotide of claim 1, wherein the nucleotides of the oligonucleotide comprise alternating deoxyribonucleotides and 2′-fluoro-deoxyribonucleotides.

14. The single stranded oligonucleotide of claim 1, wherein the nucleotides of the oligonucleotide comprise alternating deoxyribonucleotides and 2′-O-methyl nucleotides.

15. The single stranded oligonucleotide of claim 1, wherein the nucleotides of the oligonucleotide comprise alternating deoxyribonucleotides and ENA nucleotide analogues.

16. The single stranded oligonucleotide of claim 1, wherein the nucleotides of the oligonucleotide comprise alternating deoxyribonucleotides and LNA nucleotides.

17. The single stranded oligonucleotide of claim 13, wherein the 5′ nucleotide of the oligonucleotide is a deoxyribonucleotide.

18. The single stranded oligonucleotide of claim 1, wherein the nucleotides of the oligonucleotide comprise alternating LNA nucleotides and 2′-O-methyl nucleotides.

19. The single stranded oligonucleotide of claim 18, wherein the 5′ nucleotide of the oligonucleotide is a LNA nucleotide.

20. The single stranded oligonucleotide of claim 1, wherein the nucleotides of the oligonucleotide comprise deoxyribonucleotides flanked by at least one LNA nucleotide on each of the 5′ and 3′ ends of the deoxyribonucleotides.

21. The single stranded oligonucleotide of claim 1, further comprising phosphorothioate internucleotide linkages between at least two nucleotides.

22. The single stranded oligonucleotide of claim 21, further comprising phosphorothioate internucleotide linkages between all nucleotides.

23. The single stranded oligonucleotide of claim 1, wherein the nucleotide at the 3′ position of the oligonucleotide has a 3′ hydroxyl group.

24. The single stranded oligonucleotide of claim 1, wherein the nucleotide at the 3′ position of the oligonucleotide has a 3′ thiophosphate.

25. The single stranded oligonucleotide of claim 1, further comprising a biotin moiety conjugated to the 5′ nucleotide.

26. A single stranded oligonucleotide comprising a region of complementarity that is complementary with at least 8 consecutive nucleotides of a PRC2-associated region of a target gene listed in Table 4, wherein the oligonucleotide has at least one of:
a) a sequence that is 5′X-Y-Z, wherein X is any nucleotide and wherein X is anchored at the 5′ end of the oligonucleotide, Y is a nucleotide sequence of 6 nucleotides in length that is not a human seed sequence of a microRNA, and Z is a nucleotide sequence of 1 to 23 nucleotides in length;
b) a sequence that does not comprise three or more consecutive guanosine nucleotides;
c) a sequence that has less than a threshold level of sequence identity with every sequence of nucleotides, of equivalent length to the second nucleotide sequence, that are between 50 kilobases upstream of a 5′-end of an off-target gene and 50 kilobases downstream of a 3′-end of the off-target gene;
d) a sequence that is complementary to a PRC2-associated region that encodes an RNA that forms a secondary structure comprising at least two single stranded loops; and/or
e) a sequence that has greater than 60% G-C content.

27. The single stranded oligonucleotide of claim 26, wherein the oligonucleotide has the sequence 5′X-Y-Z and wherein the oligonucleotide is 8-50 nucleotides in length.

28. A composition comprising a single stranded oligonucleotide of claim 1 and a carrier.

29. A composition comprising a single stranded oligonucleotide of claim 1 in a buffered solution.

30. A composition of claim 28, wherein the oligonucleotide is conjugated to the carrier.

31. The composition of claim 30, wherein the carrier is a peptide.

32. The composition of claim 30, wherein the carrier is a steroid.

33. A pharmaceutical composition comprising a composition of claim 28 and a pharmaceutically acceptable carrier.

34. A kit comprising a container housing the composition of claim 28.

35. A method of increasing expression of a target gene in a cell, the method comprising delivering the single stranded oligonucleotide of claim 1 into the cell.

36. The method of claim 35, wherein delivery of the single stranded oligonucleotide into the cell results in a level of expression of a target gene that is at least 50% greater than a level of expression of the target gene in a control cell that does not comprise the single stranded oligonucleotide.

37. A method increasing levels of a target gene in a subject, the method comprising administering the single stranded oligonucleotide of claim 1 to the subject.

38. A method of treating a condition associated with decreased levels of a target gene in a subject, the method comprising administering the single stranded oligonucleotide of claim 1 to the subject.

39. The method of claim 38, wherein the target gene is listed in Table 4.

40. The method of claim 39, wherein the condition is listed in Table 4 or otherwise disclosed herein.
